United States Patent Application Publication US 2007/0072175 A1 - sequence listing, part 11

SEQ ID NO: 28530 - DNA, 4090 bp, Macaca Mulatta
  misc_feature (1)...(4090): n = A,T,C or G
ttcccgccagcaggagccgcgcggtaggtgcggtgcgtttcggcgctccgtccgacagaacggttgggccttgtcggctgtcgnnnnnnnnnnnnnnnnnnnnnnnnnnnnnnnnnnnnnnnnnnnnnnnnnnnnnnnnnnnnnnnnnnnnnnnnnnnnnnnnnnnnnnnnnnnnnnnnnnnnnnnnnnnnnnnnnnnnnnnnnnnnnnnnnnnnnnnnnnnnnnnnnnnnnnnnnnnnnnnnnnnnnnnnnnnnnnnnnnnnnnnnnnnnnnnnnnnnnnnnnnnnnnnnnnnnnnnnnnnnnnnnnnnnnnnnnnnnnnnnnnnnnnnnnnnnnnnnnnncagttgtgacttctccccaggagatttggtttgggccaagatggagggttacccctggtggccttgtctggtttacaaccacccctttgatggaacatttatccgcgagaaagggaaatcagtccgtgttcatgtacagttttttgatgacagcccaacaaggggctgggttagcaaaagacttttaaagccatatacaggnnnaggttcaaaatcaaaggaagcccagaagggaggtcatttttacagtgcaaagcctgaaatactgagagcaatgcaacgtgcagatgaagccttaaataaagacaagattaagaggcttgaattggcagtttgtgatgagccctcagagccagaagaggaagaagagatggaggnnnnnnnnnnnnnnnnnnnnnnnnnnnnnnnnnnnnnnnnnnnnnnnnnnnnnnnnnnnnnnnnnnnnnnnnnnnnnnnnnnnnnnnnnnnnnnnnnnnnnnnnnnnnnnnnnnnnnnnnnnnnnnnnnnnnnnnnnnnnnnnnnnnnnnnnnnnnnnnnnnnnnnnnnnnnnnnnnnnnnnnnnnnnnnnnnnnnnnnnnnnnnnnnnnnnnnnnnnnnnnnnnnnnnnnnnnnnnnnnnnnnnnnnnnnnnnnnnnnnnnnnnnnnnnnnnnnnnnnnnnnnnnnnnnnnnnnnnnnnnnnnnnnnnnnnnnnnnnnnnnnnnnnnnnnnnnnnnnnnnnnnnnnnnnnnnnnnnnnnnnnnnnnnnnnnnnnnnnnnnnnnnnnnnnnnnnnnnnnnnnnnnnnnnnnnnnnnnnnnnnnnnnnnnnnnnnnnnnnnnnnnnnnnnnnnnnnnnnnnnnnnnnnnnnnnnnnnnnnnnnnnnnnnnnnnnnnnnnnnnnnnnnnnnnnnnnnnnnnnnnnnnnnnnnnnnnnnnnnnnnnnnnnnnnnnnnnnnnnnnnnnnnnnnnnnnnnnnnnnnnnnnnnnnnnnnnnnnnnnnnnnnnnnnnnnnnnnnnnnnnnnnnnnnnnnnnnnnnnnnnnnnnnnnnnnnnnnnnnnnnnnnnnnnnnnnnnnnnnnnnnnnnnnnnnnnnnnnnnnnnnnnnnnnnnnnnnnnnnnnnnnnnnnnnnnnnnnnnnnnnnnnnnnnnnnnnnnnnnnnnnnnnnnnnnnnnnnnnnnnnnnnnnnnnnnnnnnnnnnnnnnnnnnnnnnnnnnnnnnnnnnnnnnnnnnnnnnnnnnnnnnnnnnnnnnnnnnnnnnnnnnnnnnnnnnnnnnnnnnnnnnnnnnnnnnnnnnnnnnnnnnnnnnnnnnnnnnnnnnnnnnnnnnnnnnnnnnnnnnnnnnnnnnnnnnnnnnnnnnnnnnnnnnnnnnnnnnnnnnnnnnnnnnnnnnnnnnnnnnnnnnnnnnnnnnnnnnnnnnnnnnnnnnnnnnnnnnnnnnnnnnnnnnnnnnnnnnnnnnnnnnnnnnnnnnnnnnnnnnnnnnnnnnnnnnnnnnnnnnnnnnnnnnnnnnnnnnnnnnnnnnnnnnnnnnnnnnnnnnnnnnnnnnnnnnnnnnnnnnnnnnnnnnnnnnnnnnnnnnnnnnnnnnnnnnnnnnnnnnnnnnnnnnnnnnnnnnnnnnnnnnnnnnnnnnnnnnnnnnnnnnnnnnnnnnnnnnnnnnnnnnnnnnnnnnnnnnnnnnnnnnnnnnnnnnnnnnnnnnnnnnnnnnnnnnnnnnnnnnnnnnnnnnnnnnnnnnnnnnnnnnnnnnnnnnnnnnnnnnnnnnnnnnnnnnnnnnnnnnnnnnnnnnnnnnnnnnnnnnnnnnnnnnnnnnnnnnnnnnnnnnnnnnnnnnnnnnnnnnnnnnnnnnnnnnnnnnnnnnnnnnnnnnnnnnnnnnnnnnnnnnnnnnnnnnnnnnnnnnnnnnnnnnnnnnnnnnnnnnnnnnnnnnnnnnnnnnnnnnnnnnnnnnnnnnnnnnnnnnnnnnnnnnnnnnnnnnnnnnnnnnnnnnnnnnnnnnnnnnnnnnnnnnnnnnnnnnnnnnnnnnnnnnnnnnnnnnnnnnnnnnnnnnnnnnnnnnnnnnnnnnnnnnnnnnnnnnnnnnnnnnnnnnnnnnnnnnnnnnnnnnnnnnnnnnnnnnnnnnnnnnnnnnnnnnnnnnnnnnnnnnnnnnnnnnnnnnnnnnnnnnnnnnnnnnnnnnnnnnnnnnnnnnnnnnnnnnnnnnnnnnnnnnnnnnnnnnnnnnnnnnnnnnnnnnnnnnnnnnnnnnnnnnnnnnnnnnnnnnnnnnnnnnnnnnnnnnnnnnnnnnnnnnnnnnnnnnnnnnnnnnnnnnnnnnnnnnnnnnnnnnnnnnnnnnnnnnnnnnnnnnnnnnnnnnnnnnnnnnnnnnnnnnnnnnnnnnnnnnnnnnnnnnnnnnnnnnnnnnnnnnnnnnnnnnnnnnnnnnnnnnnnnnnnnnnnnnnnnnnnnnnnnnnnnnnnnnnnnnnnnnnnnnnnnnnnnnnnnnnnnnnnnnnnnnnnnnnnnnnnnnnnnnnnnnnnnnnnnnnnnnnnnnnnnnnnnnnnnnnnnnnnnnnnnnnnnnnnnnnnnnnnnnnnnnnnnnnnnnnnnnnnnnnnnnnnnnnnnnnnnnnnnnnnnnnnnnnnnnnnnnnnnnnnnnnnnnnnnnnnnnnnnnnnnnnnnnnnnnnnnnnnnnnnnnnnnnnnnnnnnnnnnnnnnnnnnnnnnnnnnnnnnnnnnnnnnnnnnnnnnnnnnnnnnnnnnnnnnnnnnnnnnnnnnnnnnnnnnnnnnnnnnnnnnnnnnnnnnnnnnnnnnnnnnnnnnnnnnnnnnnnnnnnnnnnnnnnnnnnnnnnnnnnnnnnnnnnnnnnnnnnnnnnnnnnnnnnnnnnnnnnnnnnnnnnnnnnnnnnnnnnnnnnnnnnnnnnnnnnnnnnnnnnnnnnnnnnnnnnnnnnnnnnnnnnnnnnnnnnngatgtcttactgtgcctggctaactacagtcgagggggtgatggtcctatgtgtcgcccagtaattctgttgccagaagatacccctcccttcttagagcttaaaggatcacgccatccttgcattacgaagactttttttggagatgattttattcctaatgacattctaataggctgtgaggaagaggagcaggaaaatggcaaagcctattgtgtgcttgttactggaccaaatatggggggcaagtctacactcatgagacagnnnnnnnnnnnnnnnnnnnnnnnnnnnnnnnnnnnnnnnnnnnnnnnnnnnnnnnnnnnnnnnnnnnnnnnnnnnnnnnnnnnnnnnnnnnnnnnnnnnnnnnnnnnnnnnnnnnnnnnnnnnnnnnnnnnnnnnnnnnnnnnnnnnnnnnnnnnnnnnnnnnnnnnnnnnnnnnnnnnnnnnnnnnnnnnnnnnnnnnnnnnnnnnnnnnnnnnnnnnnnnnnnnnnnnnnnnnnnnnnnnnnnnnnnnnnnnnnnnnnnnnnnnnnnnnnnnnnnnnnnnnnnnnnnnnnnnnnnnnnnnnnnnnnnnnnnnnnnnnnnnnnnnnnnnnnnnnnnnnnnnnnnnnnnnnnnnnnnnnnnggcatgcatggtagaaaatgaatgtgaagaccccagccaggagactattaccttcctctataaattcattaagggagcttgtcctaaaagctatggctttaatgcagcaaggcttgctaatctcccagaggaagttattcaaaagggacatagaaaagcaagagaatttgagaagatgaatcagtctctacgattatttcg

SEQ ID NO: 28531 - DNA, 762 bp, Macaca Mulatta
  misc_feature (1)...(762): n = A,T,C or G
gggttatacttcttaagagataaaagattatgaatactgattataccctctgttagttctacaatgacctggggctgcttttggttcagattggctaaaaatttaaatttaagtaatctgaaaatctttttttaggagacagtcttagaatgtgattttattacctgttggataagccactgggaggaaaaaaccttggcacttgactattgattataactaaagaggcagctgttatttgttcacaaagcgtcagcttaaacattgctattggtttttaaatttgattttgttcccctattccttcctttgttatctaggatcaatgtaatcattaatcttgtttggactaatatggctctgtttcagcatggtggggagttatatttcagtgacgtctatacgagccttgaactgccagaagaaatcaggacacacaaagttttatggggtaggtgattttgtttagtttggtattaaggcagatggttgttcatgtgcagaactcctttctgctaatagccaggatgaggctttatgacatgagatcgggctttatgacatggggttaggctatgaggccaaggttccattcttcctctgccattcanaaatgatanggctttggatagtttaattcatctctttgagttatcattttccaaattgtaaaatgttaataataatacaatctgcccttataggggctggttatgaaagattaaatggggataaaggaaatggggaaaaatacttttgaaa

SEQ ID NO: 28532 - DNA, 597 bp, Macaca Mulatta
  misc_feature (1)...(597): n = A,T,C or G
gggctggaggacacggacttgagccggctctacacagcaacatccctgatgcagattgatgacaatgtgatgaggaagtttcatggctataactccctgaaggaatactatgaggaagaaagttgcatgcggtacctgcacaggatttatgttcctctcatgctagttaatgcagctgacgatccgttggtgcatgaaagtcttctaaccattccaaaatctctttcagagaaacgagagaacgtcatgtttgtgctgcctctgcatgggggccacttgggcttctttgagggctctgtgctgttcccggagcccctgacatggatggataagctggtggtggagtacgccaacgccatttgccaatgggagcgtaacaagtcacagtgctctgacacggagcaggtggaggctgacctggagtgaggcctccggactctggcatgctccagcagccctcctctggaagctgcgtcccctcaccccctgtttcaggtctcccatctccctcagtgacctggatctgacctcacaccatcagcagggggcacccaccatgcacacctgtctcggagtangcagctcttcctgggagct

SEQ ID NO: 28533 - DNA, 237 bp, Macaca Mulatta
tgttatttaaatcattgcattcaatttttaatgtcaagaatagtggacaacttttgtcaggtgactactaacaatgctccttcattttactacttcttaaaacgaggttggattctaaagataaagattttggagactctgggatgagtgtgcatttattttcagagatgacataatatgataatgtgacaactataagactgttgttttaaaccttaagacctgatgcctcagttc

SEQ ID NO: 28534 - DNA, 1517 bp, Macaca Mulatta
  misc_feature (1)...(1517): n = A,T,C or G
atctggagaagcgcaagaatcctgtgtgccactttgtgacgcccctagacggctctgtggacgtagatgagcaccgccggccggaggnnnnnnnnnnnnnnnnnnnnnnnnnnnnnnnnnnnnnnnnnnnnnnnnnnnnnnnnnnnnnnnnnnnnnnnnnnnnnnnnnnnnnnnnnnnnnnnnnnnnnnnnnnnnnnnnnnnnnnnnnnnnnnnnnnnnnnnnnnnnnnnnnnnnnnnnnnnnnnnnnnnnnnnnnnnnnnnnnnnnnnnnnnnnnnnnnnnnnnnnnnnnnnnnnnnnnnnnnnnnnnnnnnnnnnnnnnnnnnnnnnnnnnnnnnnnnnnnnnnnnnnnnnnnnnnnnnnnnnnnnnnnnnnnnnnnnnnnnnnnnnnnnnnnnnnnnnnnnnnnnnnnnnnnnnnnnnnnnnnnnnnnnnnnnnnnnnnnnnnnnnnnnnnnnnnnnnnnnnnnnnnnnnnnnnnngacctcttctcttctagccgctccatttttgggctcatgctacctgcatctgcctcagcacctgtaccagatcccaacaacccacctgcacaggnnnnnnnnnnnnnnnnnnnnnnnnnnnnnnnnnnnnnnnnnnnnnnnnnnnnnnnnnnnnnnnnnnnnnnnnnnnnnnnnnnnnnnnnnnnnnnnnnnnnnnnnnnnnnnnnnnnnnnnnnnnnnnnnnnnnnnnnnnnnnnnnnnnnnnnnnnnnnnnnnnnnnnnnnnnnnnnnnnnnnnnnnnnnnnnnnnnnnnnnnnnnnnnnnnnnnnnnnnnnnnnnnnnnnnnnnnnnnnnnnnnnnnnnnnnnnnnnnnnnnnnnnnnnnnnnnnnnnnnnnnnnnnnnnnnnnnnnnnnnnnnnnnnnnnnnnnnnnnnnnnnnnnnnnnnnnnnnnnnnnnnnnnnnnnnnnnnnnnnnnnnnnnnnnnnnnnnnnnnnnnnnnnnnnnnnnnnnnnnnnnnnnnnnnnnnnnnnnnnnnnnnnnnnnnnnnnnnnnnnnnnnnnnnnnnnnnnnnnnnnnnnnnnnnnnnnnnnnnnnnnnnnnnnnnnnnnnnnnnnnnnnnnnnnnnnnnnnnnnnnnnnnnnnnnnnnnnnnnnnnnnnnnnnnnnnnnnnnnnnnnnnnnnnnnnnnnnnnnnnnnnnnnnnnnnnnnnnnnnnnnnnnnnnnnnnnnnnnnnnnnnnnnnnnnnnnnnnnnnnnnnnnnnnnnnnnnnnnnnnnnnnnnnnnnnnnnnnnnnnnnnnnnnnnnnnnnnnnnnnnnnnnnnnnnnnnnnnnnnnnnnnntccaacgtggtcattgcacctgctgccatcgccagggnggctcctggggtcccggagttccacagcagcatcctggtgacagatctcggccatggcacgaacagcccgcctgcccccatctcccggctcttcccgagcacagcgcaagaccccctggggaagggcgagcaggtccagctgcatgggggcagcccccaggtcactgtcacagggcccagt

SEQ ID NO: 28535 - DNA, 722 bp, Macaca Mulatta
agcagaccagattgctgaggtgaagaccatggagagtcacccacccatacctcctgtctttgtggaacatgtggtcccacaagatgcaaatcagaaaggcctatgtaccaaagaaagaatgatctgcttggagtttacttctacggaatttcatgctggacagattgaggatgaattaaacttaaatgacatcaatggatgctcatcagggtgttgtctgaatgaatcaaaatttcctcttgacaactgccatgcatccaaagccttaattcagcctggacatgtcccagaaatggccaacaagtttccagacttaacagtggaagatttggagacagacgcactgaaagcagacatgaatgtccacctactgcctatggaagaattgacatctcgactgaaagacctccccatgtcccctgatcctgagtcaccaagcccccaacccagttgccagactgaaatctcagatttcagtacagatcgcattgacttttttagtgccctagagaagtttgtggagctctcccaagaaacccggtcacgatctttttcccattcaaggatggaggaactgggtggaggaaggagtgagagctgtcgactgtcagtggtagaagtagccccttccaaagtgacaactgatgaccagagaagcagctctttgagtaatactccccatgcatcagaagaatcttcaatggatgaggaacattcaaagg

SEQ ID NO: 28536 - DNA, 312 bp, Macaca Mulatta
caaatctaaatcttatcatttgaatatctttgttttagaaaacaattttcagttactttgttgtgctttgtcaaaggtcacacatatggtagaaaatcaagttatacttttaactttcgttttctattcaccaggtcatacagcagatggaacaaaaaaaattacaacaaggaattcctccatcagggccagctggagaattgaagtttgagccacgtatgtaattttgtttgattatttatttaggaaaataaattattgtatcaattgaagtccgacatttattacaaatataatttcaagtcatgaaga

SEQ ID NO: 28537 - DNA, 493 bp, Macaca Mulatta
taaatgccctggaagtgcaaggcaggaaaaccaggctgaattttggaggtggcccagcatttgggtgagagcacagtaaggaccactgctgtgggtggtacagaaagcttggttagaggccagaaagtcctggaatctggtgcatcaatcaaaatttcctgttggtcctgagactttgggcagaaatcatgaatgtcattaaggagcctgatgaaagaggtcccatcaaaaccacacagtttgctcccatttatgctgaggctcctgagttcatggaaatgagtgttgagcaggaaattctagtgactgatatcaaggtcaccagaactgctagctccctgtgccaaggttggcaaaatttgactttttgatggtgctggagttggcaagactgtagtgatcatggagttagtaggcaatgtcgccaagcccatggtggttactcggtgttttgctggtgttggtgacaggacccgtgagggcaatgatttat

SEQ ID NO: 28538 - DNA, 275 bp, Macaca Mulatta
atttggctagctgattggctgctgaaaaataatcctaacaaacccaaactttgtcaccatccaattgtagaagaaccttattaaaaaaatccttgaaagaacaaatcatgaactatcttattgtaaaaggctgtatttctattgtttgaaaaaattatttctagggtttaagtaactacaagtaaaataaatttatttcttaaaaataagtgttaaaggaataactattctatgaagcagataacattaaggtaaagtataggcttagagtatga

SEQ ID NO: 28539 - DNA, 153 bp, Macaca Mulatta
  misc_feature (1)...(153): n = A,T,C or G
ggctgtgatcaatagccaggaatggactttgagccgctccattcctgaactgcgcctggngggtgtgctgggcgacgccaggagtgggaagtcatcactcatccaccgattcctgaccggttcataccaggtgctggagaagacagagagtga

SEQ ID NO: 28540 - DNA, 470 bp, Macaca Mulatta
  misc_feature (1)...(470): n = A,T,C or G
gacatcaacccccatattcctcagtatatttcttcagtgccatggtatatcgatccttcaaaaagacctactttaaaacaccagagaccacaaccagagaaacaaaagcagttcagctcatctggagaatggtacaagaggggtgtaaaagagnnagaattccataattactaagtaccgcaaaggagcatgtgaaaattgtggggccatgacacacaaaaagaaagactgctttgannnnnnnnnnnnnnnnnnnnnnnnnnnnnnnnnnnnnnnnnnnnnnnnnnnnnnnnnnnnnnnnnnnnnnnnnnnnnnnnnnnnnnnnnnnnnnnnnnnnnnnnnnnnnnnnnnnnnnnnnnnnnnnnnnnnnnnnnnnnnnnnnnnnnnnnnnnnnnnnnnnnggcaaaacgaacattgaaagcccagaaactccaagaggaattagcctcaggaaaattagtggaacaggc

SEQ ID NO: 28541 - DNA, 640 bp, Macaca Mulatta
gctggcatcaaagtactattgtccccaaaattaaaaaatagtaagaacttgtccttgggtttcacattaatgagcgatactcatttctccttaatcagtgcagagttagaatgagtatggccctagtcataaacacaatcagaatgtagctgatatgctgtcacttgcctttgtagtaaattaaatacctaattttacctttttggccttactatatatgggtaagagtctttttttttctctttgtccgttgggcctaggagagaatggttaaagctatttaactgattttttaaagggacacaaatggaagaaaggggttcttgccagcaaacactgtctttgacacttggtagacacacagacctagattttgatgatagcatagaaagaacaaaatatggtaagaagtggcagaagggaatcacactgactaggtttgatgtccaggtgtaccatgccagagttgtggatgtacttaagtccaagggaaatctgtagaaggatgtccttgagttttggctcttcaaaatgattgccagatttagtgttttcagatatggcagcttgcaaactcccacctgggaaagaacaatggagaatagccccacagtacgagtgttacagatgaaagcacagt

SEQ ID NO: 28542 - DNA, 800 bp, Macaca Mulatta
  misc_feature (1)...(800): n = A,T,C or G
ggcacacaaatagtttcctcagggaagtgcataaagactccatgtacctcagccctcacctgtgctgggccagctgctgccgatcccttgggttccggagttgaagccatgaccggttggctcaggcggctgtggtgaactggccccagacacagcctggcgggcccaggagctctgaaatgcaagttcttgggcccttcccaaaagagcctgttggcgtttgacccacccgttgctcttgggcaccgtgtcatcctaataagggggtccacctccgggacgggtggggaggtgtgaggacagagcanttaagctgtgtctggctcatggagcccacggcgtggtgccgtggttggagggatgctcgtccttgcggcctgagtccctgttgtgctgtctactgacactacgccctgtgcccaccaggctggctgcgtgcacttttcctacaaagcatcatgtgaaatccgtgtgcttatgctccggtattcttcggagaagaaaatcttcatcgggctcgtccccccacaaccagggacaactttgttaacgggtgtccaaaaaatagaattttttttcccaaccccaacaacggggtccttgcaancggaagaacctggaagccaaggagccagcgaaccagacngaggggaatgggggggggggttaagtgggccaagcccccggggccctgggggccccccctcccaaaaagtccacaanaaatgaaagctccccctggccaaaaagaactggggtggaacattggtctttcctggaacacaagggggggccccccg

SEQ ID NO: 28543 - DNA, 152 bp, Macaca Mulatta
gtggttctgccacgtggacgatgacaactacgtcaacctgcgggccctgctgcggctgctggccagctacccgcacacgcgggacatctacatcggcaagcccagcctggacaggcccatccaggccacggaacgggtcagcgagaacaagg

SEQ ID NO: 28544 - DNA, 275 bp, Macaca Mulatta
aggtctttggcccaggcgttggggtagtctctgtatgtcaaggagtacagattggactatctatggctgttaacctaaagcaagtcacagccacggtacttattaatggaaccaactttccttttggcattccacaggtgtatcgtggtaagatctatcagccctttccctattctgcacaattaatatccatcagtaccttggggttactagagctctatcgcatttatgagacaactgaagttgggggcaatcaatatttatttcctgttgaa

SEQ ID NO: 28545 - DNA, 297 bp, Macaca Mulatta
cattgcattgcgcagagctcggccatctttctcatctgtcaggcgttcctgagaaagagggccattctacctctcctgctgccagccttcactccagcaaggagggtgctgggtgacctgagcccacatagccctgagtgagcagtgaggccgtctcctgccctcttctgcctggagagcttgtcagtgtccccagatgtcaggccctgcctcctgactttggccttttcactacagatacccgaagcacacacagcagagtcctctggacttcgaggaggaacccacagcaggagg

SEQ ID NO: 28546 - DNA, 606 bp, Macaca Mulatta
  misc_feature (1)...(606): n = A,T,C or G
gggtcagtcctgaaacagtttctttctgaaacagagaaaatgtcccctgaagacagagcaaaatgctttgaaaagaatgaggccatacaggcagcccatgatgccgtggcacaggaaggccaatgtcgggtagatgacaaggtgaatttccatttcattctgtttaacaacgtggatgaccacctctatgaactggatggacgaatgccttttccggtgaaccatggcgccagttcagagggcaccctgctgcaggacgctgccaaggtctgcagagaattcaccgagcgtgagcaaagagaagtccgcttctctgccgtggctctctgcaaggcagcctaattctctgtgggagggactttgctgattccccccttcccttcacgtgaaaaaataactgcccccccccatgagtctaaaaggtttcnnnnnnnnnnnnnnnnnnnnnncgttttgaaaaaaccctttcccctagcccaaccggggtttaaacaaattaaaggcacattttccccgggccattgggggggcccttaaaggcgaaccttccccccgggtttttttgttccacattaaacacctaaaggcccttttgttttcttgaan

SEQ ID NO: 28547 - DNA, 192 bp, Macaca Mulatta
agatgccaaggggtccatccgagagatcatcctgcccaagggcctggacctggaccggcctaagaggacgcgcacgtccttcaccgcggagcagctctatcggctggagatggagttccagcgctgccagtacgtggtgggccgtgagaggaccgagctcgcccggcagcttaacctctccgagacccaggt

SEQ ID NO: 28548 - DNA, 3720 bp, Macaca Mulatta
  misc_feature (1)...(3720): n = A,T,C or G
atgtatggaagtgctcgctctgttgggaaggtggaaccgagcaaccagagccctgggcgttcacccaggcttccacgttcccctcgcttgggtcatcgtcgaaccaatagtacaggagggagttcgggaagcagtgttggaggtggcagtgggaaaaccctttctatggaaaatatacagtctttaaatgctgcctatgccacctctggccctatgtatctaagtgaccatgaaaatgtgggttcagaaacacctaaaagcaccatgacacttggccgttctgggggacgtctgccttacggtgttcggatgactgctatgggcagtagccccaacatagctagcagtggggttgccagtgacaccatagcgtttggagagcatcacctccctcctgtgagtatggcatccactgtgcctcactcccttcgtcaggcgagagataacacaatcatggatctgcagacacagctgaaggaagtattaagggaaaatgatctcttgcggaaggatgtggaagtaaaggagagcaaattgagttcttccatgaatagcatcaagaccttctggagcccagagctgaagaaagaacgagccctgagaaaagatgaagcttccaaaatcaccattttggaagaacagtacagagttgtacaggaggagaaccagnnnnnnnnnnnnnnnnnnnnnnnnnnnnnnnnnnnnnnnnnnnnnnnnnnnnnnnnnnnnnnnnnnnnnnnnnnnnnnnnnnnnnnnnnnnnnnnnnnnnnnnnnnnnnnnnnnnnnnnnnnnnnnnnnnnnnnnnnnnnnnnnnnnnnnnnnnnnnnnnnnnnnnnnnnnnnnnnnnnnnnnnnnnnnnnnnnnnnnnnnnnnnnnnnnnnnnnnnnnnnnnnnnnnnnnnnnnnnnnnnnnnnnnnnnnnnnnnnnnnnnnnnnnnnnnnnnnnnnnnnnnnnnnnnnnnnnnnnnnnnnnnnnnnnnnnnnnnnnnnnnnnnnnnnnnnnnnnnnnnnnnnnnnnnnnnnnnnnnnnnnnnnnnnnnnnnnnnnnnnnnnnnnnnnnnnnnnnnnnnnnnnnnnnnnnnnnnnnnnnnnnnnnnnnnnnnnnnnnnnnnnnnnnnnnnnnnnnnnnnnnnnnnnnnnnnnnnnnnnnnnnnnnnnnnnnnnnnnnnnnnnnnnnnnnnnnnnnnnnnnnnnnnnnnnnnnnnnnnnnnnnnnnnnnnnnnnnnnnnnnnnnnnnnnnnnnnnnnnnnnnnnnnnnnnnnnnnnnnnnnnnnnnnnnnnnnnnnnnnnnnnnnnnnnnnnnnnnnnnnnnnnnnnnnnnnnnnnnnnnnnnnnnnnnnnnnnnnnnnnnnnnnnnnnnnnnnnnnnnnnnnnnnnnnnnnnnnnnnnnnnnnnnnnnnnnnnnnnnnnnnnnnnnnnnnnnnnnnnnnnnnnnnnnnnnnnnnnnnnnnnnnnnnnnnnnnnnnnnnnnnnnnnnnnnnnnnnnnnnnnnnnnnnnnnnnnnnnnnnnnnnnnnnnnnnnnnnnnnnnnnnnnnnnnnnnnnnnnnnnnnnnnnnnnnnnnnnnnnnnnnnnnnnnnnnnnnnnnnnnnnnnnnnnnnnnnnnnnnnnnnnnnnnnnnnnnnnnnnnnnnnnnnnnnnnnnnnnnnnnnnnnnnnnnnnnnnnnnnnnnnnnnnnnnnnnnnnnnnnnnnnnnnnnnnnnnnnnnnnnnnnnnnnnnnnnnnnnnnnnnnnnnnagattgaaaatcttcaagagcagcttagagataaggaaaagcagatgagcagcttgaaagagcgggtcaaatccttgcaggccgacaccaccaacactgacactgccttgacaactttggaggaggcccttgcagagaaagnnnnnnnnnnnnnnnnnnnnnnnnnnnnnnnnnnnnnnnnnnnnnnnnnnnnnnnnnnnnnnnnnnnnnnnnnnnnnnnnnnnnnnnnnnnnnnnnnnnnnnnnnnnnnnnnnnnnnnnnnnnnnnnnnnnnnnnnnnnnnnnnnnnnnnnnnnnnnnnnnnnnnnnnnnnnnnnnnnnnnnnnnnnnnnnnnnnnnnnnnnnnnnnnnnnnnnnnnnnnnnnnnnnnnnnnnnnnnnnnnnnnnnnnnnnnnnnnnnnnnnnnnnnnnnnnnnnnnnnnnnnnnnnnnnnnnnnnnnnnnnnnnnnnnnnnnnnnnnnnnnnnnnnnnnnnnnnnnnnnnnnnnnnnnnnnnnnnnnnnnnnnnnnnnnnnnnnnnnnnnnnnnnnnnnnnnnnnnnnnnnnnnnnnnnnnnnnnnnnnnnnnnnnnnnnnnnnnnnnnnnnnnnnnnnnnnnnnnnnnnnnnnnnnnnnnnaggcaagtgaaagaccagaataagaaggtagcaaatctgaagcacaaggaacaggtggaaaaaaagaagagtgcacaaatgctggaggaggctcggcgacgggaggacaacctcaacgacagctcccagcagctccaggnnnnnnnnnnnnnnnnnnnnnnnnnnnnnnnnnnnnnnnnnnnnnnnnnnnnnnnnnnnnnnnnnnnnnnnnnnnnnnnnnnnnnnnnnnnnnnnnnnnnnnnnnnnnnnnnnnnnnnnnnnnnnnnnnnnnnnnnnnnnnnnnnnnnnnnnnnnnnnnnnnnnnnnnnnnnnnnnnnnnnnnnnnnnnnnnnnnnnnnnnnnnnnnnnnnnnnnnnnnnnnnnnnnnnnnnnnnnnnnnnnnnnnnnnnnnnnnnnnnnnnnnnnnnnnnnnnnnnnnnnnnnnnnnnnnnnnnnnnnnnnnnnnnnnnnnnnnnnnnnnnnnnnnnnnnnnnnnnnnnnnnnnnnnnnnnnnnnnnnnnnnnnnnnnnnnnnnnnnnnnnnnnnnnnnnnnnnnnnnnnnnnnnnnnnnnnnnnnnnnnnnnnnnnnnnnnnnnnnnnnnnnnnnnnnnnnnnnnnnnnnnnnnnnnnnnnnnnnnnnnnnnnnnnnnnnnnnnnnnnnnnnnnnnnnnnnnnnnnnnnnnnnnnnnnnnnnnnnnnnnnnnnnnnnnnnnnnnnnnnnnnnnnnnnnnnnnnnnnnnnnnnnnnnnnnnnnnnnnnnnnnnnnnnnnnnnnnnnnnnnnnnnnnnnnnnnnnnnnnnnnnnnnnnnnnnnnnnnnnnnnnnnnnnnnnnnnnnnnnnnnnnnnnnnnnnnnnnnnnnnnnnnnnnnnnnnnnnnnnnnncagcttcaggatgagttagagaaaggtgaacgggacaatgcagaactgcaggagtttgccaacgccattcttcagcagatagcagaccactgtcccgacatcctagagcaagtggtcaacgccctggaagagtcctcttgaccctgctttgtggggaagcctgaggtagtcaacccaggagccaagaaaggagaactacaaggcacaggcgcccggaaccttcttggcacccaacactacaaacttcctcccatcttgctcacttgaagaagcgtgattccagcaccgtttctacatctgccgtctttctctgccttcctgctttggatgtggtctctacactaaccttcttgatgtccagggtagataaaaggtcgaatctctctgaagaactgtgacctggtcgtcaacagtgactgtggaagctggtggctcggccctgacagagggccatggagcagaggagcctctcatctcctgtcctctgacatgagaatgaaactaggaatg

SEQ ID NO: 28549 - DNA, 699 bp, Macaca Mulatta
  misc_feature (1)...(699): n = A,T,C or G
gccacttcggaaagcttcagcccactcactctctctcaggccaggcccccctggccactggagaaagcntgagtgatctcccctccacctcagagcaggcccggcacagctatggtgttcgctttaatggtttccaggctgatgacagtattattcctaccgaaatccgcaaccgtgccgaagcccatggccgtggtgttacccatgaccatgaagattccgatgagagcttgagctcagatgagcaccatggtcatggccccagtgggaagcccatgcttcacgatggcaagaagggtgtgcaagaagcaggctgggaccttgatgacaacagtgtcaagagtggctgccttgccgttgaggagcaactcaagtgtgatactaacagtacctggggccttaatgaggatgagctcatggcccatggccatgagaaggacaatagctcagagtctgaggatagttgccccccaagccctgggtgctccttcactgaagggttctcctttgatctctttaaccctgactacgtccctaaggttgacaagtggtcccggttcctcttccctctggcctttgggttattcaacattgtttactgggtataccatatgtattagtcccccagtgctccagaagggcaggagcactgtgctgtgctcatttcacagtttcttttgggtttttccctctttcctt

SEQ ID NO: 28550 - DNA, 336 bp, Macaca Mulatta
atgaggacagttgaatttggggcgtttttctacaagaagcagtcagccttctctcccccgtaaggactggctgtaaccttaagcccatcaaagttacttccagcctggagagaacctcaccaaacagctggtgtggcctgagggtggtcatggtgggaaatgggcatgagaataaatacctccccaaattcaatctgagcccagcaggagaggatggtagggttgccagggctcagaagtgcaagctggttccccaccccaccgcgcaaaaccgcacttttcctttgtttccttgggtgaatgcaggagcagcagtggctgccattcccacctgga

SEQ ID NO: 28551 - DNA, 597 bp, Macaca Mulatta
acatacttgccattaggaaacaaagtattgctaagtactgtaacatactggccaccaaaattcgtattgagattatcttggtttcttgtaagagataggaatgagttcttacctagtgttgcagtctagcaaatacagaggtggtttaatcaaacaactctagtgtgaagcaagagtaaagactaaggttttgagagcattcctactcacataagtcaagaaatctgtcagataggaatctaagtatttatagcgagattgtgaaagcaaccttaatgtttgaaggactgttgagactaggtgctttgcttcctttcctcagatatctttctgtggcatttgagaacagaaaccaagaaacacggtaattactaaattatgaggctttgctttttgtttgcttttaagtagaaaaacatgttggcaacattgagttttggagttgattgaggtaatcagacttaactagttttgtcattccatttgttaaagatacagtcaccaataattttttgagttttttgaaagaccccaatttaagccttgcttatttttaaaaattatttccattcagtgtatgttggatgtatatgaatt

SEQ ID NO: 28552 - DNA, 75 bp, Macaca Mulatta
ttcaaacgtcgctagtctgatttctcctgccaggcattatccattatcctaagtaaaatgtgggagttcttgcag

SEQ ID NO: 28553 - DNA, 844 bp, Macaca Mulatta
  misc_feature (1)...(844): n = A,T,C or G
tctgcacctcggaaaaataccaacacagtgaaatacagactcaagtttcgctttggataatattcctcttggccttgtgagaacgattctttcccctcaggagtttctataggtgtcttcagagttctgaaggaaaatttttggacacagcttcagctatactaccctgtattgaagtcacgtcatttgtttcagtgtgactgaaacaaaatgttttttgataggaaggaaactggaattctttgtactaatacagggagcacactgcttcaggtcagcaagacataaagccttttgctttatgcttgagggatatttagaactttgtattttcggaaagttaaataacatggactatgtatttttctgacttttacagatcaacctgaaagaacatacatggtacatttttatttttggtttccaaagaatattttgatgcggataaaatattttgttaannnnnnnnnnnnnnnnnnnnnnncttaaaagtacctctgcattgagcatattttcttacttttattattttaattaatatgacataagcaatcattttatgctgtttatgaattataaatgtgtttatatctcatttgtaatgtggaaatnnnnnnnnnnnnnnnnnnnnnnnnnnnnnnnnnnnnnnnnnnnntctagccttacctcagataatatgtttagttttacattttaaaatgtttaaattctctttcacagcaccaaaggctcagcttggatttgtatgtatgtgtatgtaaattcatgactttatgtggaatcctacacctttggtggctgggatatgatgggatatgagcaaggaaaaaatataaggactttt

SEQ ID NO: 28554 - DNA, 614 bp, Macaca Mulatta
  misc_feature (1)...(614): n = A,T,C or G
ccatgctgctctgctgggcactgctttgtctcctgggagcaggcccagtagaggctggagtcacccaaactccaagatctctgatcaaaatgagaggacagcaagcgacattgagctgctcccctatctctgggcataggagtgtgtactggtaccaacagaccccaggacagggccttcaggtcctcttcgaatacttcagtgagacacagagacaaaaaggaaacttctctaatcgattctcagggcgccagttctctaactctcgctctgagatgaatgtgagcaccttggagctgggggactcggccctttatctttgtgccagcagctctgactggggggatccgtcatgactactccttcggttcaggcaccaggctaactgttgtagaggacctgaaaaaggtgttcccacccaaggtcgctgtgtttgagccatcagaagcagagatctcccacacccaaaaggccacgctggtgtgcctggccacaggcttctaccccgaccacgtggagctgagctggtgggtgaacgggaaagaggtgcacagtggggtcagcacggacccacagnccctcaaggagcagccccgcctcgaggactccagata

SEQ ID NO: 28555 - DNA, 857 bp, Macaca Mulatta
  misc_feature (1)...(857): n = A,T,C or G
agcccgtggctccagcccctgcacttaagggcagagtctgaggcgatgactcctggtcccctatccgccacacaggccctggtcatccacataactcactgtctgcagctgcccatcttgtgtctgtctttggtgtcaggactttgggggccgggcccctccccacaataaagatactcctgcgaccctcctgcctgggcggctcccccaggcctgcctgtgtgttctctccaccctccggggactctgagcacacatccccgctcgccgggcctgccctgtgtgtgtggtggcccggccctggctctgtccctgccactgcgtccctcatggcctgcgtcactcggtgacagctgcttccctggtgggctctgcctgggcatgcagtgcgaggcagagctgcttccacagccccgaggcctgggaagcaggtccaccacctggccaggcgtggctcaactctggccacaggggaggctgaggctgcctgccatccctccccactcctcactgaagcccagggcaggaccaggtctgagtgcagtcaggtcccagcgcacccggccaggctgggctcaggcggtgcgcttcatgctgtcagctgctccacacccacctctcgtctctagtgactgcaccctggccgggactcctgacttactgcagctccagccagtgactcatcgggtgggagtttgtaagcccaccaccagggcctctccccaagtgcctcagcagagcccgagtcaaggccgggcctggtgnggaggcagtgggtggtggacaccgtccgttcacagcatgtgctgtacgccagccgctgcccccagggaaagcagcagaccacacaccacact

SEQ ID NO: 28556 - DNA, 1384 bp, Macaca Mulatta
  misc_feature (1)...(1384): n = A,T,C or G
gggagactcgcacttcccatggttgcttatagaccggaagccgagaccttagggctctttcccatcttgcaagatggcgggtgaaaaagttgagaagccagatactaaagagaagaaacccgaagccaagaaggctgatgctggtggcaaggtgaaaaagggtaacctcaaggctaagaagcccaagaaggggaagccccattgcagccgcaaccctgtccttgtcagaggaattggcaggtattcccgatctgccatgtattccagaaaggccatgtacaagaggaagtactcagccgctaaatccaaggttgaaaggaaaaagaaggagaaggttcttgcaactcttacaaaaccagttggtggtgacaagaacggcggtacccgggtggttaaacttcgcaaaatgcctagatattatcctactgaagatgtgcctcgaaagctgttgagccacggcaaaaaacccttcagtcagcacgtgagaaaactgcgagccagcattacccccgggaccattctgatcatcctcactggacgccacaggggcaagagggtggttttcctgaagcagctggctagtggcttgttacttgtgactggacctctggtcctcaatcgagttcctctacgaagaacacaccagaaatttgtcattgccacctcaaccaaaatcgatatcagcagtgtcaaaatcccaaaacatcttaccgatgcttacttcaagaagaagaagctgcggaagcccagacaccagggaaaggtggagatctttcgaccccgaaaaagagaaatacggagatttacagagccagcgccaagaattgatcagaaaagctgtggacctcacaaattctaccaaaaatcaaagctgtttcctcagctcccaggggctccctgcgaatctgttgtttgcccctgacaaaatgggaattttatccccccaccaaaattgggggtttcctaaatgggcctttaaaaaaaccctcctttttaaaataccctaaagttcccccncgatataaagaaacagataaaatannnnnnnnnnnnnnnnnnntttgtttggggcccgcccttttcgggcccctctagaaaaaaacttttttcaaaaacacaattttcttttttgggcgcgccgcggggcccccccttgaggggaaaaaatggaaaaacttggggccaaaaaaaatgtggttttccccnnnnnnnnnnnnnnnnnncggccaacaaaaaaaaagagggggggtggggaatttcccccccgcnnnnnnnnnnnnnnnnnnnnnnncggggggnnnnnnnnnnnnnnnnnnnnnnnnnnnnnnnntatcccccaaaggggagtgtttctttaaagaggcgcttttacacgggggggata

SEQ ID NO: 28557 - DNA, 140 bp, Macaca Mulatta
agacatctgccaccaaatcctggatctttactcacaaggaaaacaacagatgcctcatcacaccccccatcagctgcaacagcccccatctcttcagcctacaccacaagtgccgcaagtacagcagtcacagccgtctc

SEQ ID NO: 28558 - DNA, 763 bp, Macaca Mulatta
  misc_feature (1)...(763): n = A,T,C or G
atagtgatggttatattatcccaattaacaaagaagggtgtattccagaaggagatgttagagaaggacaaatgcagctggttacaagtctttaatcgtagagctaaggaattccaagggccacatgcaagtattaataaataaagactccattggcctgatgcagctccctcaaactctgcttgaagagatgactcttgacctgtggttctccagtgtaaaaaagatgactgaaccttgcagttctgtgaatttttataaaacatacaaaaactttgtatatacacagagtatactaaaatgaattatttgttacaaagaaaagagatgccaaccaggtattttaagattctgctgctgtttagagaaattgtgaaacaagcaaaacaaaactttccagccattttactgcagcagtctgtgaactaaatttgtaaatatggctgcaccatttttgtaggcctgcattgtattatatacaagacgtaggctttaaaatcctgtgggacaaatttactgtaccttactagtcctgacaagacttggaaaagcaggagagatattctgcatcagtttgcagttcactgcaaatcttttacattaaggcaaagattgaaaacatgcttaaccactagcaatcaagccacaggccttatttcatatgtttcctcaactgtacaatgaactattctcatganaaatggctaaagaaattatattttgttctattgctagggtaaaataaatacatttgtgtccaact

SEQ ID NO: 28559 - DNA, 765 bp, Macaca Mulatta
  misc_feature (1)...(765): n = A,T,C or G
ggaaagaaatatgttttgaacttaaatgatattctatatgtgtatcttcctaggcaaaagctgtaatttccagagagaccattaggaacaggtagtatctatttttctccattatttatttctagaaactcataaaatggacattttatatttttctataagaacaaaatattaattaaggtatagatgactgaccaagggcttaatcaaataaaatgactaacagtatctatcataaagccacacaagccttatgttctcatctcaaaaatgctgtgacagctttttgcctgctttaaccataagaaaagtgattggtggatgattttactagcccaggcttttaaaaactttcatctaggccaggcgcannnnnnnnnnnnnnnnnnnnnnnnnnnnnnnnnnnnntgagtggatnnnnnnnnnnnnnnnnnnnnnnnaggaccaacccggccaacatgatgaaaccctgtgtctactaaaaatagaaaaattagttgagtgttatggtgcagnnnnnnnnnnnnntnnnnnnnnnnnnnnnnnnnnnnnnnnnnnnnnnnnntcgggaggtggaggttgcggtaagccaagattgcnnnnnnnnnnnnnnnnnnntgtgatagcgcaagactctgtctccnnnnnnnnnnnnnnnnnnnnnnnnnnnnncatgtcggcccgcctcgggccctcggagaagcttttctaagccatttcgtttttggcccgcggggccccagttagggtaaagtgtaaccttga

SEQ ID NO: 28560 - DNA, 743 bp, Macaca Mulatta
  misc_feature (1)...(743): n = A,T,C or G
acacacctatgtactttttccttagaaacttgtcctttgctggtctctgtttttctactgccactgtccctcaggtggtgctaatccacctcctggtgaagaggaaaaccatttcctttgctggatgctcaacacagattgttgtcttactgctggttggaggtacagagtgtgcactgctggcagtgatgtcctgtgacgagtacgtggctgtctgcaagcccctgcactactccaccatcatgacacattgggtatgtgtccagctggccatagggtcctgggccagtggnnnnnnnnnnnnnnnnnnnnnnnnnnnnnnnnnnnnnnnnnnnnnnnnnnnnnnnnnnnnnnnnnnnnnnnnnnnnnnntgtgaacctcctgccctcctgaagctggcttcagcagacacttacagcacagaaatagccatctttgcaatggatgtggtaatcctcctggctcctggctcccccatccttgtctcatactagaatattatctccacagtgatctggatgcagtccagggaggggaggctgaaggtcttctctacctgtgcgtcccatgtcattgtcgttgttctcttctatggctcagcaatatttgcctacatgaggccaaactccaagataatgaatgaaaggaataaaatgatttctgtgttctactcagcagtgacacccatgctgaaccccatcatttatagtttaaggaacaagggtgtcaaaggagctctcagg

SEQ ID NO: 28561 - DNA, 464 bp, Macaca Mulatta
atgcaggggtcgtgaacaagacctgagtgatcagtcaagcctcatgttaccccagagacacacatgggaagtagaccctgtgtatgcagattgtgagtgaagttccagagatgtgtcgacctttatcaggcatgggagggacacgttcaggagaggagccttatgagtatacagtatgggcaactgtagccatcagtcagccttcagcatgcacaagaagacacacttaggagagaagtttacgtgtagggactgtgggaaggctttagcaataatcaaacatttaccaaacatccaatgaccgcctcaggggagggcacccttgtctggggagtgttggtgagcatcagcaaaagaatggacagtcaggcacaaggtggccctccggaaggaggtctttgtttgcaggatgtatgggcaaagcttttgtgatcacacaccacagggagactctgcatgtgggg

SEQ ID NO: 28562 - DNA, 818 bp, Macaca Mulatta
  misc_feature (1)...(818): n = A,T,C or G
ggggcctagtcttgcttctgtggcacccactttgtctcctcaggtagtgatgaattagttgctctgtcacaaaaggagggaagtagcatccaattaagttgcttaagagaggaaatgtacatcttgtataacttagggagtgaagaaaatgtaggcacgaaagtgaaaagtgaggcagctagttcttcctattccattcttgaccaacctgccctttcttaatatgactagtggtcttgatgctagagtcaacttactctgttgctggctttagcagagaataggaggaaccatatgaaaagatcagcctttctgacttcaatccccaaaacatatttaccagcatactccaaactgtttctgatgggttctgtgagaaaaggattgtttgctcaaaaagcttggaaaataccacacactccctttctccttctggagatcacccacattagagggtctgaggactctgagaattcgtgttacagtaaacaaaactaacaatctcccatttcctacactacttgagcatggaaatcatagtccccactctgtgaaaacttaacgctttttggaagacatttctgtagaatgtcagtttggagaaatgatgagctacgccttgatgaaagaaccgtgttggtgctgctaagtttacccattatggtttttcctttctctctctcaagccttattcttccactaanagatgaggattaagaagcagagntgggggggatgtgaaaaataatttatgaggttgtctaanataaagagtagtttcgtaaaananaaannnnaaaanaannnaaaaaacttgt

SEQ ID NO: 28563 - DNA, 2394 bp, Macaca Mulatta
  misc_feature (1)...(2394): n = A,T,C or G
cctctcgcgggaccggccaccatcctctcgcgagagcagcccgtgcgaccggaagcggggcggtgaccccggaagtccccgccgggtgcagcttggtcggttcgatcgcagccgggatctgacgccgcccggagtcgccgtcccttctctctctccgagtgctgcccctgtcattgtggccatggacgnnnnnnnnnnnnnnnnnnnnnnnnnnnnnnnnnnnnnnnnnnnnnnnnnnnnnnnnnnnnnnnnnnnnnnnnnnnnnnnnnnnnnnnnnnnnnnnnnnnnnnnnnnnnnnnnnnnnnnnnnnnnnnnnnnnnnnnnnnnnnnnnnnnnnnnnnnnnnnnnnnnnnnnnnnnnnnnnnnnnnnnnnnnnnnnnnnnnnnnnnnnnnnnnnnnnnnnnnnnnnnnnnnnnnnnnnnnnnnnnnnnggtgaccaagaacatggcccaggtgaccaaagctctggacaaggccctgagcaccatggacctacagaaggtctcctcagtgatggacaggttcgagcagcaggtgcagaacctggacgtccacacgtcggnnnnnnnnnnnnnnnnnnnnnnnnnnnnnnnnnnnnnnnnnnnnnnnnnnnnnnnnnnnnnnnnnnnnnnnnnnnnnnnnnnnnnnnnnnnnnnnnnnnnnnnnnnnnnnnnnnnnnnnnnnnnnnnnnnnnnnnnnnnnnnnnnnnnnnnnnnnnnnnnnnnnnnnnnnnnnnnnnnnnnnnnnnnnnnnnnnnnnnnnnnnnnnnnnnnnnnnnnnnnnnnnnnnnnnnnnnnnnnnnnnnnnnnnnnnnnnnnnnnnnnnnnnnnnnnnnnnnnnnnnnnnnnnnnnnnnnnnnnnnnnnnnnnnnnnnnnnnnnnnnnnnnnnnnnnnnnnnnnnnnnnnnnnnnnnnnnnnnnnnnnnnnnnnnnnnnnnnnnnnnnnnnnnnnnnnnnnnnnnnnnnnnnnnnnnnnnnnnnnnnnnnnnnnnnnnnnnnnnnnnnnnnnnnnnnnnnnnnnnnnnnnnnnnnnnnnnnnnnnnnnnnnnnnnnnnnnnnnnnnnnnnnnnnnnnnnnnnnnnnnnnnnnnnnnnnnnnnnnnnnnnnnnnnnnnnnnnnnnnnnnnnnnnnnnnnnnnnnnnnnnnnnnnnnnnnnnnnnnnnnnnnnnnnnnnnnnnnnnnnnnnnnnnnnnnnnnnnnnnnnnnnnnnnnnnnnnnnnnnnnnnnnnnnnnnnnnnnnnnnnnnnnnnnnnnnnnnnnnnnnnnnnnnnnnnnnnnnnnnnnnnnnnnnnnnnnnnnnnnnnnnnnnnnnnnnnnnnnnnnnnnnnnnnnnnnnnnnnnnnnnnnnnnnnnnnnnnnnnnnnnnnnnnnnnnnnnnnnnnnnnnnnnnnnnnnnnnnnnnnnnnnnnnnnnnnnnnnnnnnnnnnnnnnnnnnnnnnnnnnnnnnnnnnnnnnnnnnnnnnnnnnnnnnnnnnnnnnnnnnnnnnnnnnnnnnnnnnnnnnnnnnnnnnnnnnnnnnnnnnnnnnnnnnnnnnnnnnnnnnnnnnnnnnnnnnnnnnnnnnnnnnnnnnnnnnnnnnnnnnnnnnnnnnnnnnnnnnnnnnnnnnnnnnnnnnnnnnnnnnnnnnnnnnnnnnnnnnnnnnnnnnnnnnnnnnnnnnnnnnnnnnnnnnnnnnnnnnnnnnnnnnnnnnnnnnnnnnnnnnnnnnnnnnnnnnnnnnnnnnnnnnnnnnnnnnnnnnnnnnnnnnnnnnnnnnnnnnnnnnnnnnnnnnnnnnnnnnnnnnnnnnnnnnnnnnnnnnnnnnnnnnnnnnnnnnnnnnnnnnnnnnnnnnnnnnnnnnnnnnnnnnnnnnnnnnnnnnnnnnnnnnnnnnnnnnnnnnnnnnnnnnnnnnnnnnnnnnnnnnnnnnnnnnnnnnnnnnnnnnnnnnnnnnnnnnnnnnnnnnnnnnnnnnnnnnnnnnnnnnnnnnnnnnnnnnnnnnnnnnnnnnnnnnnnnnnnnnnnnnnnnnnnnnnnnnnnnnnnnnnnnctcagtcccgcccgtccctcgcagcccacacggaggccgcagcggcgtcgtggctgttacgtgcaggagcgtggagaccccgactttggctcactgcgtttggtnnnnnnnnagaacttgggagccccagggaggggctggtgttggtaggtcctggatgtggttccctccagcctccccaaaatcaaccctggcgttgagagaacgtcctgtccgtcgtgggtaacagccttggggagggctcagagctctgcagagccttggccgggtgggggctgcctcagtcctgtcctctgggcactggggagaggggcctgttcacctttttcctagaatgctgttgtaaataaacaaatggatccctggaaa

SEQ ID NO: 28564 - DNA, 1046 bp, Macaca Mulatta
  misc_feature (1)...(1046): n = A,T,C or G
ggactattattatttttgagatggagtatcgctgctctggtgcccaggctgtagtacagtggctcaatctctgctcactgcaacctctgacccccaagttgaagtgattcttgtgccacagcctcctgaaatctcagctgtgattataggcatgtgccaccacnnnnnnnnnnnnnnnnnnnnnnnnnnnnnnnnnnnnnnngcccaagggtgacgaaaggggtggaagaaagcaggaaggcagaagggcacgaagatcgccggcccagcgaaaggggccaacgcgaaacaaaagaaaagacacaaaagcgatccaagacgggcagaatacaaagcaaaaccgagaaaaaacagaaagcagaaaagaaaacgcaangcacgacgccnagacagagaacagaaaagggacacgacggacaacgccccagcacgacgcgcaaaaaacaacgcggaaaaacgcagaagacagaacaacaggaaaaaacagcgcgagaagagagagaagagacagagagaagcccggacgacggacagccgagaagcgacaaaaacagcggacgaagcaggagccgaaagacaccacgaaggagcagaccccacggcaaccgccgacacaacacgcacagagcagcgngcgnggcgacaccacgaaagaacaaaagcggaacagagcagggacaaaaagcaagagacggacaaacaaagagagaaagaccagacgagatacaagaagaaacatggaaggaatgcaagaagcaaacacgaagaacgaagacacaagangacaaagaagaaagagcaagcaccgaaaaaccgaagaagacgagtgacgaaacggcaaaacagggagagacaacgacaaccnagcccgaccggcaaccaacgacagcatgaaacgggacgacaacaaangaaacacccncgggaacgagggagaaaacnacgggacaaagganaacgaaacgccgaataacgacggacgacgagcanacgatagtgaagataagacgacagcaacaggcagacagaagataacacagaangag

SEQ ID NO: 28565 - DNA, 805 bp, Macaca Mulatta
  misc_feature (1)...(805): n = A,T,C or G
ggaggtcattttgaaattaagattaatttttttgttgtttaacttcaaagctagctctcttaactttatattttgggaaaaatacccaaaaacctgagcctacaaagactctcacaaatgccaaagattttcaaggaaattcatattatatatttcaaaaatgatttatcaatgttatctaccaaaagaaataattttatttttcccttttgggaagatattatcctctaatgtgagaatcagatccctagattctgtttctacctgtactattaaactcaaccttgaacctgagcttggttgtttctgtgccttagtttctctacttgtaaacaatttcctataaaaattgtttaaacaccaaccaaaatttaccatatgtattcattctcttgccttaaagatctgttgttaatttacatttggccctcaccctctaaaaatttgtagtttggagagtaactgaaaacacaattttaaagaacatgttttcctcacaaaatataatccttattttcctatcttggaatcctgcagaaaatttggagaaaatgggtattggtcttgcgccaattttgcaaccatgaaatttctccggagaaaaaatcccttttccaatgggaaaaaactttccttaaataaatcaaaaatgggggggtgagggaccttatccttatttaactttaaagacttgggttaacccttttgggggaaataaccttcttgggtttaaaaggaaagttgtnnnnnnnnnnnnnnnnnnggaatccccaactgggaattaatctgaaataaaaagctcacc

SEQ ID NO: 28566 - DNA, 3527 bp, Macaca Mulatta
  misc_feature (1)...(3527): n = A,T,C or G
gaatggctcttttcatttcttctggtactgtttctgtacctatttttctccaatttacatcaagttcatgactctcctcaaatgccttcaatggatctgggacgtgtagataattttaatgatactaattatgttattgcatttgcacctgaatccaaaactacccaagagataatgaacaaagtggcttcagccccattcctaaaaggnnnnnnnnnnnnnnnnnnnnnnnnnnnnnnnnnnnnnnnnnnnnnnnnnnnnnnnnnnnnnnnnnnnnnnnnnnnnnnnnnnnnnnnnnnnnnnnnnnnnnnnnnnnnnnnnnnnnnnnnnnnnnnnnnnnnnnnnnnnnnnnnnnnnnnnnnnnnnnnnnnnnnnnnnnnnnnnnnnnnnnnnnnnnnnnnnnnnnnnnnnnnnnnnnnnnnnnnnnnnnnnnnnnnnnnnnnnnnnnnnnnnnnnnnnnnnnnnnnnnnnnnnnnnnnnnnnnnnnnnnnnnnnnnnnnnnnnnnnnnnnnnnnnnnnnnnnnnnnnnnnnnnnnnnnnnnnnnnnnnnnnnnnnnnnnnnnnnnnnnnnnnnnnnnnnnnnnnnnnnnnnnnnnnnnnnnnnnnnnnnnnnnnnnnnnnnnnnnnnnnnnnnnnnnnnnnnnnnnnnnnnnnnnnnnnnnnnnnnnnnnnnnnnnnnnnnnnnnnnnnnnnnnnnnnnnnnnnnnnnnnnnnnnnnnnnnnnnnnnnnnnnnnnnnnnnnnnnnnnnnnnnnnnnnnnnnnnnnnnnnnnnnnnnnnnnnnnnnnnnnnnnnnnnnnnnnnnnnnnnnnnnnnnnnnnnnnnnnnnnnnnnnnnnnnnnnnnnnnnnnnnnnnnnnnnnnnnnnnnnnnnnnnnnnnnnnnnnnnnnnnnnnnnnnnnnnnnnnnnnnnnnnnnnnnnnnnnnnnnnnnnnnnnnnnnnnnnnnnnnnnnnnnnnnnnnnnnnnnnnnnnnnnnnnnnnnnnnnnnnnnnnnnnnnnnnnnnnnnnnnnnnnnnnnnnnnnnnnnnnnnnnnnnnnnnnnnnnnnnnnnnnnnnnnnnnnnnnnnnnnnnnnnnnnnnnnnnnnnnnnnnnnnnnnnnnnnnnnnnnnnnnnnnnnnnnnnnnnnnnnnnnnnnnnnnnnnnnnnnnnnnnnnnnnnnnnnnnnnnnnnnnnnnnnnnnnnnnnnnnnnnnnnnnnnnnnnnnnnnnnnnnnnnnnnnnnnnnnnnnnnnnnnnnnnnnnnnnnnnnnnnnnnnnnnnnnnnnnnnnnnnnnnnnnnnnnnnnnnnnnnnnnnnnnnnnnnnnnnnnnnnnnnnnnnnnnnnnnnnnnnnnnnnnnnnnnnnnnnnnnnnnnnnnnnnnnnnnnnnnnnnnnnnnnnnnnnnnnnnnnnnnnnnnnnnnnnnnnnnnnnnnnnnnnnnnnnnnnnnnnnnnnnnnnnnnnnnnnnnnnnnnnnnnnnnnnnnnnnnnnnnnnnnnnnnnnnnnnnnnnnnnnnnnnnnnnnnnnnnnnnnnnnnnnnnnnnnnnnnnnnnnnnnnnnnnnnnnnnnnnnnnnnnnnnnnnnnnnnnnnnnnnnnnnnnnnnnnnnnnnnnnnnnnnnnnnnnnnnnnnnnnnnnnnnnnnnnnnnnnnnnnnnnnnnnnnnnnnnnnnnnnnnnnnnnnnnnnnnnnnnnnnnnnnnnnnnnnnnnnnnnnnnnnnnnnnnnnnnnnnnnnnnnnnnnnnnnnnnnnnnnnnnnnnnnnnnnnnnnnnnnnnnnnnnnnnnnnnnnnnnnnnnnnnnnnnnnnnnnnnnnnnnnnnnnnnnnnnnnnnnnnnnnnnnnnnnnnnnnnnnnnnnnnnnnnnnnnnnnnnnnnnnnnnnnnnnnnnnnnnnnnnnnnnnnnnnnnnnnnnnnnnnnnnnnnnnnnnnnnnnnnnnnnnnnnnnnnnnnnnnnnnnnnnnnnnnnnnnnnnnnnnnnnnnnnnnnnnnnnnnnnnnnnnnnnnnnnnnnnnnnnnnnnnnnnnnnnnnnnnnnnnnnnnnnnnnnnnnnnnnnnnnnnnnnnnnnnnnnnnnnnnnnnnnnnnnnnnnnnnnnnnnnnnnnnnnnnnnnnnnnnnnnnnnnnnnnnnnnnnnnnnnnnnnnnnnnnnnnnnnnnnnnnnnnnnnnnnnnnnnnnnnnnnnnnnnnnnnnnnnnnnnnnnnnnnnnnnnnnnnnnnnnnnnnnnnnnnnnnnnnnnnnnnnnnnnnnnnnnnnnnnnnnnnnnnnnnnnnnnnnnnnnnnnnnnnnnnnnnnnnnnnnnnnnnnnnnnnnnnnnnnnnnnnnnnnnnnnnnnnnnnnnnnnnnnnnnnnnnnnnnnnnnnnnnnnnnnnnnnnnnnnnnnnnnnnnnnnnnnnnnnnnnnnnnnnnnnnnnnnnnnnnnnnnnnnnnnnnnnnnnnnnnnnnnnnnnnnnnnnnnnnnnnnnnnnnnnnnnnnnnnnnnnnnnnnnnnnnnnnnnnnnnnnnnnnnnnnnnnnnnnnnnnnnnnnnnnnnnnnnnnnnnnnnnnnnnnnnnnnnnnnnnnnnnnnnnnnnnnnnnnnnnnnnnnnnnnnnnnnnnnnnnnnnnnnnnnnnnnnnnnnnnnnnnnnnnnnnnnnnnnnnnnnnnnnnnnnnnnnnnnnnnnnnnnnnnnnnnnnnnnnnnnnnnnnnnnnnnnnnnnnnnnnnnnnnnnnnnnnnnnnnnnnnnnnnnnnnnnnnnnnnnnnnnnnnnnnnnnnnnnnnnnnnnnnnnnnnnnnnnnnnnnnnnnnnnnnnnnnnnnnnnnnnnnnnnnnnnnnnnnnnnnnnnnnnaggatcacagattttcagtagcatgtaacacaaaacggctgaattgctttcctgtcctcctggatgtcattagcaatgggctacttggaatttttaattcttcgggacacattcagactgacagaagcacattttttgaannnnnnnnnnnnnnnnnnnnnnnnnnnnnnnnnnnnnnnnnnnnnnnnnnnnnnnnnnnnnnnnnnnnnnnnnnnnnnnnnnnnnnnnnnnnnnnnnnnnnnnnnnnnnnnnnnnnnnnnnnnnnnnnnnnnnnnnnnnnnnnnnnnnnnnnnnnnnnnnnnnnnnnnnnnnnnnnnnnnnnnnnnnnnnnnnnnnnnnnnnnnnnnnnnnnnnnnnnnnnnnnnnnnnnnnnnnnnnnnnnnnnnnnnnnnnnnnnnnnnnnnnnnnnnnnnnnnnnnnnnnnnnnnnnnnnnnnnnnnnnnnnnnnnnnnnnnnnnnnnnnnnnnnnnnnnnnnnnnnnnnnnnnnnnnnnnnnnnnnnnnnnnnnnnnnnnnnnnnnnnnnnnnnnnnnnnnnnnnnnnnnnnnnnnnnnnnnnnnnnnnnnnnnnnnnnnnnnnnnnnnnnnnnnnnnnnnnnnnnnnnnnnnnnnnnnnnnnnnnnnnnnnnnnnnnnnnnnnnnnnnnnnnnnnnnnagatttctcctgactccatggattacttaggagcttcagaatctgaaattgtattcctggcactgctaat

SEQ ID NO: 28567 - DNA, 645 bp, Macaca Mulatta
  misc_feature (1)...(645): n = A,T,C or G
ggggacctggtggaggcccaaacacctgagtatgatgtggtgctctgcctcagcctcaccaagtgggtgcatctgaactggggagatgagggcctgaagcgcatgtttcgccggatctaccggcacctacgccctggaggcatcctggtcctagagccccaaccctggtcgtcgtatggcaagagaaagacccttacggaaacaatctacaagaactactaccgaatccaactgaagccagagcagttcagttcctacctgacatccccagacgtgggcttctccagctatgagcttgtggccacaccccacaacacctctaaaggcttccagcgtcctgtgtaccctgtccacaaggcccgatcccccagccacttagtggccccctgaaccagaagtgtgaagaggatgcccttgctgctctaaagacctggggaagaggaaagtgtcccaggtctttccggacccaaaaatattttccttctttgacttgcaagaaaactttttttccatgttgccttagccctctcctaccccttggaacttgtaaaaaaggggtttgttgaaaaccaattatttcttccccaaccccaagtgggaggcggaaattttttccccctttcctannnnnnnnnnnnnnnnnnn

SEQ ID NO: 28568 - DNA, 1218 bp, Macaca Mulatta
  misc_feature (1)...(1218): n = A,T,C or G
gagtgaaagcggcgccgcccgccggccgcaggtgcggcaaagccagtgtcatctgcaggttctcttagggctcccggaaagaaggagggcgagccgggtgcattcgcgccgcgcctccttgcgtttctgttccccaaatagggcctctccccccgccgcccaggcccctgcgtgggctggacgcgtcagccccacacattagcctcgctgcgccgctcagactctgccttgcctccccgtcccggtccctggcccctgccctgtcgcccgccgccggagcggtgaccgcccggcccgccgttcttctgctgccaccgctgccggcatcatgggcagtgagcagagctccgaggccgagagccgacccaacgatctgaactcctcagntcagtgactccttcaccagccaagcatagagccaagatggatgatattgtggttgtagctcagggctcccaggcctcacggaacgtcagcaacgatcccgatgtcatcaagttgcaagagattccaaccttccagccccttctgaaaggnnnnnnnnnnnnnnnnnnnnnnnnnnnnnnnnnnnnnnnnnnnnnnnnnnnnnnnnnnnnnnnnnnnnnnnnnnnnnnnnnnnnnnnnnnnnnnnnnnnnnnnnnnnnnnnnnnnnnnnnnnnnnnnnnnnnnnnnnnnnnnnnnnnnnnnnnnnnnnnnnnnnnnnnnnnnnnnnnnnnnnnnnnnnnnnnnnnnnnnnnnnnnnnnnnnnnnnnnnnnnnnnnnnnnnnnnnnnnnnnnnngaacgagaggtccgccatcctccgccgcatacagatgggcgtggaccacgaccgtgcccctgctggacaggctcaacagcctgctgcccgagagcgagcggctggagcccttcatcatgaagcccgagcgcaagctcacgctgtatctgccgcccggtctgcctggggccgggagccccagacaccgacaccctgaggaggtttggagcnnnnnnnnnnnnnnnnnnnnnnnnnnnnnnnnnnnnnnnnnnnnnnnnnnnnnnnnnnnnnnnnnnnnnnnnnnnnnnnnnnnnnnnnnnnnnnnnnnnnnnnnnnnnnnnnnnnnnnnnnnnnntgtgaaaggaaccgaaccagttctcggtgatagctgaagctggaacatgtgaattatctatcgaattctttgactaactctgcattgagaagtatttttatttag

SEQ ID NO: 28569 - DNA, 482 bp, Macaca Mulatta
  misc_feature (1)...(482): n = A,T,C or G
cttcttggacttgaaccgccagctcctggacaagcactcggcctgcggcggctcggaggaggtgctgcaggcggaacaggagttcttagccagcgccaaggagagcccccaggaggaggagatngatcccttcgatgtggattcagggagagagtctggaaaccccaacaggcctgtggccagcacccggnggctgccctcggacactgatgacagtgatgcgtctgaggacccgaggcctggtgccgagcacggaggaaccagcagcagctgctctgacgaggagcagactcagggacagggggctgaagccagggccccggccgaggtttggaaaggaatcaagaagcggcagagagactgagggttgcagacacgtatatatttgaggctgggtaacaagaagatctagagacacgagggacgtagatgggcctggcagtctcggctcctcgtggctgctggcaggactgagctgtccg

SEQ ID NO: 28570 - DNA, 639 bp, Macaca Mulatta
  misc_feature (1)...(639): n = A,T,C or G
ngtctccagaataagttcctggccagatatgtgtccctcccaaaccagaataagatctggacggtgactgtgagcnccgagcaaaaggaccgcacccccctggtgatggtgcacggttttgggggcggcgtgggcctctggatcctcaacatggactcactgagtgcccgccgcacactgcacaccttcgatctgcttggctttgggcgaagctcaaggccagcattcccgagggacccggagggggctgaggatgagtttgtgacatcgatagagacgtggcgggagaccatggggatccccagcatgatcctcctggggcacagtttgggaggattcctggccacttcttactcaatcaagtaccctgatannnnnnnnnnnnnnnnnnnnnnnnnnnnnnnnnnnnnnnnnnnnnnnnnnnnnnnnnnnnnnnnnnnnnnnnnnnnnnnnnnnnnnnnnnnnnnnnnnnnnnnnnnnnnnnnnnnnnnnnnnnnnnnnnnnnnnnnnnnnnnnnnnnnnnnnnngggcctggcctggtgcagcgattccggccggacttcaaacgcaagtttgcagacttctttgaagatgataccatatcagagtatatctaccactgcaatgcgcagaatccca

SEQ ID NO: 28571 - DNA, 802 bp, Macaca Mulatta
ctcccacagcttgtgactggcattccgagaggcacctctgattgcagctcttgtctgcggcctttatgagtctaacgctgttggcagctgagctcaatgcagggaggctcgttaggaagccgcaccgcacactgtgtagccggccgtggagacagacttgctgtgccaatcaccttgaaaacaagagctccccgtgctgtgctttggaactgatggaaatgctgcatagggcgtctttcagggactgggtggtcatggtccgtccctggacaaagggacaaatctggaaattgttttaatttgccttctcttctgtcctgattgcagctggctcacactgccgagataactcacgagatcattggctttcttgaccagaccttgtacagatgggatcgtctcggcattgaaagccctagatcaggaaaactggcccgagagctccttaaagagctgcgaactcaagtctagaaggcacgcaggccgtgtgggtgcccagcgtgcgggatcaggcttgccagggtcacaggacagaggatgacctatggccgcgcatttgtggagtaagtaggtgccctctttgggctgtgagaatgagccatacacgtcttgggaagatctgctagtatctattttgcaaaatgcagagccaggtccctcagcgcagactcagctggacatgttcaccaatgacttgaatgagccttcagcgctcctggtgcccgcccggccagaccgtcagctagagaattactaaagcaaaggcttgaggggagaacaggtttctagtttttacccaagt

SEQ ID NO: 28572 - DNA, 562 bp, Macaca Mulatta
ataaatgttttggttgattctgtatttgagtacccttgttaatattttaaattgttcaaacattctaattgttccttaagaactcattttcacatgtttatactctcaccacactgtagatatggcatgtactttacactatttataatgactgtagatacttgaatgttctacttgctaattttgcaagttgagtgtatttcatttatgcaaaatatcttggagtttgataactttcatcttatgataatatatactttgcatttgtaatattggtgaaagtagacataaaattagcaagtctgttgtgttcttgtaataaaataacttattctgttttcattgttgacttttcatgttaaggaaatatgaatctgaaagaaaaatgttaactccaccccttgaagtatcttaaataaagacttaattaaagtttacctgctctaaatttaacttttaaaggtctacggtaaagatatctgcaacacttttacattctgactacataatatgtttggggactatttgaaatcaacttagggcattgtattcaaaggtctgc

SEQ ID NO: 28573 - DNA, 424 bp, Macaca Mulatta
aacagaggttttaaaagactacatcaagccagatggggaatatttggaattgtttgctcgaaatttacagccaggttggactagttggggcaatgaagttctcaaatttcagcatgtggattattttattgctctggagtctggaagctgactatgatcttgattaaagtagtggtttcttcattgtttcctcaccacttttcccttcattctaactcacttttaaaattttgttactaacccatattcttagaatattaacaggacttgtttttttcagtaagtgaccagaagtgactagccttcatgcaattttgagatgaattttacttgagatgcactaacattctatgttattctagactatacaaattaagtggtaagcagcttacaagatgggcagaacatgctattgaaaaagttc

SEQ ID NO: 28574 - DNA, 609 bp, Macaca Mulatta
  misc_feature (1)...(609): n = A,T,C or G
cctcggcccccggcccggcgtccggcggctccggggaggtggatgagctgttcgacgtaaagaacgccttctacatcggcagctaccagcagtgcataaacgaggcgcagcgggtgaagctgtcaagcccggagagagacgtggagaaggacgtcttcctgtatagagcgtaccttgcgcagaggaagttcggcgtggtcctggacgagatcaagccctcctcggcccccgagctccaggccgtgcgcatgttcgctgactacctcgcccacgagagccggagggacagcatcgtggccgagctggaccgagagatgagcaggagcgtggacgtgaccaacactaccttcctgctcatggctgcctctgtctatctccacgaccagaacccagacgccgccctgcgtgcgctgcaccagggggacagcctggagtgcatggccatgacagtgcagatcctgctgaagctggaccgcctggatctcgcccggaaggaactgaagagaatgcaggacctggacgaggatgccaccctcacccagctcgccaccgcctgggtcagcctggccacgnggccggtgcagcaagctttgcagggggatgcctact

SEQ ID NO: 28575 - DNA, 377 bp, Macaca Mulatta
actcctcctcctgagttcctgggttattctgttacatttgaaaatgttgtcttgttagtttgcagttagccaaggagtgaatgggagaaacatagtatcgggtgaggctagttggagaactgcaacgcatacgcccccagtcgtgtcgcgtgtttttctcgtggttttttgggggcgctgaccgctccaagcggcgcggcagctaaagccaatgttaatttatagccaggtgtgcgtgtgtctcccgcctcgccgcccctggccgcgggacagcttctgtccagtcatgttgagttggtgatttctgccgtgatctgtttgatatttcgtcgcgctaatgtgttcagatttcgtttgggtagtggggaggggctact

SEQ ID NO: 28576 - DNA, 367 bp, Macaca Mulatta
  misc_feature (1)...(367): n = A,T,C or G
ggttttcttaaggaacgtctggacaccttctttgaccctccactgccagctgagaagggagaagccatcaggaagataggcttcgggaccaataataaaatcttcctggagtttgaggagcccttctgggagcccgactgccagctgatccagctggtgtgggacgacacgtcgcccctggaggacgctgcccctgcgctgcaggatgcctggatccggaagctcattggctttgtgnnnnnnnnnnnnnnnnngtctgtccacgttctctgtgggttcattgctgggcttgagtctgagttcatggagactctgtcggatgaagaagtacttctgtgtctcacccaagtgctccgaagaatgacag

SEQ ID NO: 28577 - DNA, 340 bp, Macaca Mulatta
accactataagcaatggggtctgctgtatggaaaacagggggcctcgctctgaacaaggggctgcccacagcctggggattattcccctgccattaccgctccctgccccaccgggcgcgctcccctatctgctgttgcaatcctgaaagaaggctgaaaagggcctgctgcaggtagtgaggctttaggcttcctcttcagctgcccgcgggcctctgtggaagggccacatttcgtgtacataaggaaggctcagcccctgcctctgtggcagccaggcctgtcatggacagggctgttggagaaaacgctccccgttcacgtagggagcagcaggca

SEQ ID NO: 28578 - DNA, 749 bp, Macaca Mulatta
  misc_feature (1)...(749): n = A,T,C or G
ctcatgttcttttccgtggggagccactactccaagtgtcacgctcaaggtaggtatccttggctgtactgtggaggggagggcttgatggtggagttctggctgtgttgtgtggcatcttggattcgtgaagaatcccttgtgtggccggggaatccaggtgctcttcccagaatccattgggaagggaagggctcatttttgtggcatgcgattgctcagagaggaaagggtagcagggaatagtaaatgggttaccttggaagacctgggctagggtgacatcctccctggaaccttcctggtggagtccgggcctaccaagagccccagtaatggactgtggttcatcagccccaggcaattcttttgcaggtctgaagatgctcgagcgtgtccgaagccagcccctgaccaacgacgacctggtcgcctccattagcctgccaccctacaccggagactgatctcccctgggaagcggggatgagaggagaagtcttggcttcacttttgctgagaaagacatgaaaaacaatgaagaaagtttgaatctgtggccagacctgcccctctcaggccttctaggcatgtgtctgaggcaaatctcctgaatgcaagaagtgttattggtaaagcaatccaataaaataagctacctatgatgcanagccttctatgtgctgtcctctttccttaggatgaactattcagtcctgaaggggattctctggacaagtgctgaggtc

SEQ ID NO: 28579 - DNA, 713 bp, Macaca Mulatta
ttgtgaggaagattaatgtggccaataaaacctttaaatgttaagtgtcaggaaaccgcactctcccttaagaactgcctaaagtctaaaatacattcaaatgcaatttttggaagattttttaatgttcgtttgtttattaaactaaccctaagtgatttcttcaaggaccgtaatcagggtatcgattcgctttcccaaaggctcttccaactcgtgggttttggggtccaccgccaccaccagagaggcttttgaacaggtgcctggctacgttcagaagaaagctggcttgtgtgcttctctccggtgggctcagccgacgtgtgagactcattctgttaccaaatgaactgggctgccacgctgtgacaggtgtttgtcctctgctttatttttattttgaagctaaaatgtgagtactaagtgttcacctcagcatacgaatcattggcctgtaaccctgtgggctgcttcacgagaattcaggacctgcattttcattttaaaaggaaatgaacagcttgtgaaggatttttttggctttgtagtttctattcatgaggtagtgttaacttctttatccccctaaagacaaaattaagataacgggggattgccaggaatgggtttaaaagcacaagtttggtagcttatcatctataccatggacagtgaacccttttacgaaatgaaagtcagaagagaccatc

SEQ ID NO: 28580 - DNA, 776 bp, Macaca Mulatta
gggccgccctgctcctcgctctgggcgtggaaagggctctggcgctacccgaggccaaactgggacttgagaagtctttgcagagagcataataaatatgtttgaatagtgatcttcagagatgaggaccttccctggctgatgtctggtactgaaagtgtctggagagctgattcggcgccggactctaggggaagacatggcatctcctagcctagcctgttacaaggatatgcactcaatgtccagggagtgtgcaaaatttgtcaaaagtggccctttattgtaaaacgacacgagaactaatgctgcatgcccgttgctgcctgaatcagaagggcaccatcttggggctggatctccagaactgttctctggaggaccctggtccaaactttcatcaggcatataccactgtcatcatagacctgcaagcaaaccccctcaaaggtgacttggccaacactttccatggctttactcagctccagactctgatactgccacaagatgtcaactgtcctggaggaattaatgcctggaatactatcacctcttatatagacaaccaaatctgtcaaggggcaaaagaacctttgcaataacactggggacccagaaatgtgtcctgaagaatggatcttgtgtacctggatggtccaggtcttttgcagtgtgttttgtgctgatggttttccacggatacaagtgtatgcgccaggggctcgtttctcaccggcttaagtttctttgggaattctggggattcaccccct

SEQ ID NO: 28581 - DNA, 744 bp, Macaca Mulatta
  misc_feature (1)...(744): n = A,T,C or G
agctgcagagatgaataaacaaagaggaaccttctcagaagtgagtctggcccaggatccaaagaggcagcgaaggaaacctaaagacaataaaagctccatttcaggaaccaaacaggaaatattccaagtagaattaaaccttcaaaatccttctctgaatcatcaagggattgatcaaatatatgactgccaaggtttactgccacctccagagaagttcactgctgaggtcctgggaatcatttgcattgtcctgatggccactgtgttaaaaacagtggttcttattcctttcctggagcagaacaattctttcccgaatacaagaacccagaaagtacgtcactgtggccattgtcctgaggagtggattacatattccaacagttgttattacattggcaaggaaaaaagaacttgggcagagagtttgctggcctgtacttcaaagaactccagtctgctttctatagataatgaagaagaaatgaaatttctgactgccatttcaccatccacatggactggtgtgtttcgtgacagcagtcatcatccatgggtgacaatcaacggtctgactttcaaacatgaagatgggatttcatcatgttgannnnnnnnnnnnnnnnnnnnnnnnagctcaagaaatctacacgtcttgctctcccaagttgctgggattactgacataagccaccgcacctgagtgctcatgtaccatttagcttgtgtttttaaaat

SEQ ID NO: 28582 - DNA, 391 bp, Macaca Mulatta
  misc_feature (1)...(391): n = A,T,C or G
ctcctggccttggctggagttgcccctgccacctcccctcgccacagtgccnnnaagcaccctccaaggcccgtcagtcagggctcccctagttactgtgcccgccacgccgtcttttctgcctgggcgctcctgaagcccatgtggcccacgatgcccttttgagcgctgagccattgtcggggcgtagccttgtgttggtctcatctccctcgactgacggnnnnnnnnnnnnnnnnnnnnnnnnnnnnnnnnnnnnnnnnnnnnnnnnnnnnnnnnnnnnagcaattgcttagaaattgactgaaaattcagaccagctgccctgacttctccagctgatggaaagtcgcagaaaggtctccaaacctctgcaaggctgatagcactt

SEQ ID NO: 28583 - DNA, 1577 bp, Macaca Mulatta
  misc_feature (1)...(1577): n = A,T,C or G
caggtgtcatggagcagtttgctatctctgaggccacactcatggcctggtcttccatggatggtgaggacatgagtgnnnnnnnnnnnnnnnnnnnnnnnnnnnnnnnnnnnnnnnnnnnnnnnnnnnnnnnnnnnnnnnnnnnnnnnnnnnnnnnnnnnnnnnnnnnnnnnnnnnnnnnnnnnnnnnnnnnnnnnnnnnnnnnnnnnnnnnnnnnnnnnnnnnnnnnnnnnnnnnnnnnnnnnnnnnnnnnnnnnnnnnnnnnnnnnnnnnnnnnnnnnnnnnnnnnnnnnnnnnnnnnnnnnnnnnnnnnnnnnnnnnnnnnnnnnnnnnnnnnnnnnnnnnnnnnnnnnnnnnnnnnnnnnnnnnnnnnnnnnnnnnnnnnnnnnnnnnnnnnnnnnnnnnnnnnnnnnnnnnnnnnnnnnnnnnnnnnnnnnnnnnnnnnnnnnnnnnnnnnnnnnnnnnnnnnnnnnnnnnnnnnnnnnnnnnnnnnnnnnnnnnnnnnnnnnnnnnnnnnnnnnnnnnnnnnnnnnnnnnnnnnnnnnnnnnnnnnnnnnnnnnnnnnnnnnnnnnnnnnnnnnnnnnnnnnnnnnnnnnnnnnnnnnnnnnnnnnnnnnnnnnnnnnnnnnnnnnnnnnnnnnnnnnnnnnnnnnnnnnnnnnnnnnnnnnnnnnnnnnnnnnnnnnnnnnnnnnnnnnnnnnnnnnnnnnnnnnnnnnnnnnnnnnnnnnnnnnnnnnnnnnnnnnnnnnnnnnnnnnnnnnnnnnnnnnnnnnnnnnnnnnnnnnnnnnnnnnnnnnnnnnnnnnnnnnnnnnnnnnnnnnnnnnnnnnnnnnnnnnnnnnnnnnnnnnnnnnnnnnnnnnnnnnnnnnnnnnnnnnnnnnnnnnnnnnnnnnnnnnnnnnnnnnnnnnnnnnnnnnnnnnnnnnnnnnnnnnnnnnnnnnnnnnnnnnnnnnnnnnnnnnnnnnnnnnnnnnnnnnnnnnnnnnnnnnnnnnnccaggagccgtaactgtgctgtctgaatgcctcctttctccatttcactcttgcttntcccaactctgttttctctggctgtggccccagatcatccttattgagagaacagaccttaggggctgttggacatggctggacgggcacaggggaggctgcctgaagggcacgtccatgtggagagtggagaggctgcctcagcgggtcatttggcttctgagatcaggagtcgaggaggaggtggacgtggcagctgagatctacagggggcacagacgtggttctttctatcaaggcctgcccagagacaagagtcactgaggagaccaagaacaaacacagccccttgctctgggatcttgaatatcccatggctgaaaggaggatcctaaggatctgggaaaagacccagctggggctggctgctccagctcttgcttccctttcagctttcttccatccctgctcccggagcctggccctgaggagggtgcggggacacccgtcttggatacaccaacgcaggatgcaggtgtcaccaacagcggggggagcatgagggctgtctccccctatccacccc

SEQ ID NO: 28584 - DNA, 1163 bp, Macaca Mulatta
  misc_feature (1)...(1163): n = A,T,C or G
cagcctgaatatccacagctgtgagctgcgccactctgcactgaggcctgtcgccagccagggcctgagtctcagcatctccgactccttcatccgggtccagggcaggtggaaggtgcgcaagtcattctnnnnnnnnnnnnnnnnnnnnnnnnnnnnnnnnnnnnnnnnnnnnnnnnnnnnnnnnnnnnnnnnnnnnnnnnnnnnnnnnnnnnnnnnnnnnnnnnnnnnnnnnnnnnnnnnnnnnnnnnnnnnnnnnnnnnnnnnnnnnnnnnnnnnnnnnnnnnnnnnnnnnnnnnnnnnnnnnnnnnnnnnnnnnnnnnnnnnnnnnnnnnnnnnnnnnnnnnnnngatttgcgaaatgatccagaaatcggtgtcctccgatctacagccttatctccaaactctgccannnnnnnnnnnnnnnnnnnnnnnnnnnnnnnnnnnnnnnnnnnnnnnnnnnnnnnnnnnnnnnnnnnnnnnnnnnnnnnnnnnnnnnnnnnnnnnnnnnnnnnnnnnnnnnnnnnnnnnnnnnnnnnnnnnnnnnnnnnnnnnnnnnnnnnnnnnnnnnnnnnnnnnnnnnnnnnnnnnnnnnnnnnnnnnnnnnnnnnnnnnnnnnnnnnnnnnnnnnnnnnnnnnnnnnnnnnnnnnnnnnnnnnnnnnnnnnnnnnnnnnnnnnnnnnnnnnnnnnnnnnnnnnnnnnnnnnnnnnnnnnnnnnnnnnnnnnnnnnnnnnnnnnnnnnnnnnnnnnnnnnnnnnnnnnnnnnnnnnnnnnnnnnnnnnnnnnnnnnnnnnnnnnnnnnnnnnnnnnnnnnnnnnnnnnnnnnnnnnnnnnnnnnnnnnnnnnnnnnnnnnnnnnnnnnnnnnnnnnnnnnnnnnnnnnnnnnnnnnnnnnnnnnnnnnnnnnnnggccactaatgtgtccgccatcttgaccttcaataccagcaagatcactgggttcctgcagccaggaaannnnnnnnnnnnnnnnnnnnnnnnnnnnnnnnnnnnnnnnnnnnnnnnnnnnnnnnnnnnnnnnnnnnnnnnnnnnnnnnnnnnnnnnnnnnnnnnnnnnnnnnnataagttggccgaaggcttcccccttcctctgccgaagcgtgttcagctctacgacctcggactccagatccataagg

SEQ ID NO: 28585 - DNA, 386 bp, Macaca Mulatta
ttccgccatcgtacagatcagtcagtgtttaaaatgatggtagtagcacagtggacagtctttgatcattatgtagcacatgcctatgaatcaggaaagatattagaatatttaataatgtatgtacagctggtggttagtttttttaaatccaaatttaattaccttattggatatttgatatttggttatttaatcacagtcatctttaacagctacaatgattggtgttttatctcctgtaatcctttgatggctttttcttgcctaccatttcacagaggttcagatagcagtagtagtttcctaagagagtttattgataaaggcagcttttgcaagattttaaaagtttcattcttttatagagtgattttaaaaaacaa

SEQ ID NO: 28586 - DNA, 684 bp, Macaca Mulatta
  misc_feature (1)...(684): n = A,T,C or G
ctcagatgcaacctggggtgggaggaaacttgtacagcctcacgnggaaggaaaaatacagtattcgttcccttggaaactcccaccagctctgcacgttttgctgcagaagagtctctttttcatgcaatactttctgatacgaggaggccgctcccggtcttgtcttccagctgcgactgctgtacgaatgcaaccccatggcctacgtcatggagaaggccgggggaatggccaccaccgggaaggaggccgtgctggacgtcgttcccacagacattcaccagagggcgccggtgatcctggggtcccccgacgacgtgctcgagttcttggaggtgtctaagcagcactctgcccagtgagcacctgccctgcctgcgtcccggagaactgcctcctcctggacctgttgtcacacacggcagcgccccgacctgctgtgtcccttacattcctagacagtggaaataaaacgcacggctgtttccaccgtcagacgctgtggaatgcccggccctccctgaccaaatgctgtctccgaaacgccactggtggcaagatgcagtttgagtggatggaggagaaataaacttatccctcccttanaaaaagcctctgttgctttgtgtcanataataatgatgatgacaataataactgctgatgcatataacattagat

SEQ ID NO: 28587 - DNA, 603 bp, Macaca Mulatta
caggtggcagtgcccaggtcccaggtgccatgtttactgcagcagtgggacctccgtgcccactccccgagctcagagcctttctcttttttcccaaaccaggcttctgatggctggctttcccccaccatcgcttgctctcagagtatattttactaaagagtaggtgatgcttccccaggatccccctggctggagagatcaagaatagggaagggacttgtagctcatttcttacgctccatgcttgctgtcctgctcacacctccctgctgaccacccatcctggcacagcctctctcttttcctccccacctgtggacactattctaataaatagcacatgccattggcttccctgtctctgtgtttttatcccatgaaaagactggcaagggtggaagtcacttccccaggaccaaaggattgggtagctctcagccaaaggtgatagagagcatgtagaaatgtgcagttgtcacaataactggaggccacggttggtgtttatgggcagtgccggatgctaagcacacaagtctctccctgtaaagaactgtgtggtgtgccctgtggtggagtgcctctagaggggctgagcca

SEQ ID NO: 28588 - DNA, 139 bp, Macaca Mulatta
aggactattggagaccagttgggggaagcgaaagctagtggtaatctgggaaacaccttaaaagttcttgggaattttgatgaagccatagtttgttgtcagcgacacctagatatttccagagagcttaatgacaagg

SEQ ID NO: 28589 - DNA, 2267 bp, Macaca Mulatta
  misc_feature (1)...(2267): n = A,T,C or G
aagaattactttaaggatttgcccaaagcccacaccgcctgtgagggggctctgaacgggatgacattttacgtggggctgcaggctgaggatgggcactggacgggtgactacggtggcccacttttcctcctgccagnnnnnnnnnnnnnnnnnnnnnnnnnnnnnnnnnnnnnnnnnnnnnnnnnnnnnnnnnnnnnnnnnnnnnnnnnnnnnnnnnnnnnnnnnnnnnnnnnnnnnnnnnnnnnnnnnnnnnnnnnnnnnnnnnnnnnnnnnnnnnnnnnnnnnnnnnnnnnnnnnnnnnnnnnnnnnnnnnnnnnnnnnnnnnnnnnnnnnnnnnnnnnnnnnnnnnnnnnnnnnnnnnnnnnnnnnnnnnnnnnnnnnnnnnnnnnnnnnnnnnnnnnnnnnnnnnnnnnnnnnnnnnnnnnnnnnnnnnnnnnnnnnnnnnnnnnnnnnnnnnnnnnnnnnnnntcctgactgggcaccggcacacccctccacactctggtgccactgccggcaggtgtacctgcccatgagctactgctatgccattcggctgagtgccacggaggacccgctggtccagagcctccgccaggnnnnnnnnnnnnnnnnnnnnnnnnnnnnnnnnnnnnnnnnnnnnnnnnnnnnnnnnnnnnnnnnnnnnnnnnnnnnnnnnnnnnnnnnnnnnnnnnnnnnnnnnnnnnnnnnnnnnnnnnnnnnnnnnnnnnnnnnnnnnnnnnnnnnnnnnnnnnnnnnnnnnnnnnnnnnnnnnnnnnnnnnnnnnnnnnnnnnnnnnnnnnnnnnnnnnnnnnnnnnnnnnnnatctcgaaaaccatcaacatgcttgtacgctggtatgtggacgggcccgcctccactgccttccaggagcacgtctccagaatcccggactatctctggnnnnnnnnnnnnnnnnnnnnnnnnnnnnnnnnnnnnnnnnnnnnnnnnnnnnnnnnnnnnnnnnnnnnnnnnnnnnnnnnnnnnnnnnnnnnnnnnnnnnnnnnnnnnnnnnnnnnnnnnnnnnnnnnnnnnnnnnnnnnnnnnnnnnnnnnnnnnnnnnnnnnnnnnnnnnnnnnnnnnnnnnnnnnnnnnnnnnnnnnnnnnnnnnnnnnnnnnnnnnnnnnnnnnnnnnnnnnnnnnnnnnnnnnnnnnnnnnnnnnnnnnnnnnnnnnnnnnnnnnnnnnnnnnnnnnnnnnnnnnnnnnnnnnnnnnnnnnnnnnnnnnnnnnnnnnnnnnnnnnnnnnnnnnnnnnnnnnnnnnnnnnnnnnnnnnnnnnnnnnnnnnnnnnnnnnnnnnnnnnnnnnnnnnnnnnnnnnnnnnnnnnnnnnnnnnnnnnnnnnnnnnnnnnnnnnnnnnnnnnnnnnnnnnnnnnnnnnnnnnnnnnnnnnnnnnnnnnnnnnnnnnnnnnnnnnnnnnnnnnnnnnnnnnnnnnnnnnnnnnnnnnnnnnnnnnnnnnnnnnnnnnnnnnnnnnnnnnnnnnnnnnnnnnnnnnnnnnnnnnnnnnnnnnnnnnnnnnnnnnnnnnngctcctggggggtttgcttcacctacggcacctggtttggcctggaggccttcgcctgcatggggcagacctaccgagnnnnnnnnnnnnnnnnnnnnnnnnnnnnnnnnnnnnnnnnnnnnnnnnnnnnnnnnnnnnnnnnnnnnnnnnnnnnnnnnnnnnnnnnnnnnnnnnnnnnnnnnnnnnnnnnnnnnnnnnnnnnnnnnnnnnnnnnnnnnnnnnnnnnnnnnnnnnnnnnnnnnnnnnnnnnnggcatcctgacatcgaggcacaggagagaggaatccggtgtctgcttgagaaacagctccccaatggcgactggccgcagnnggaaaacatctccggggtcttcaacaagtcctgtgccatctcctacacgagctacaggaatgtcttccccatctggaccctcgggcgcttctcccagctgtaccctgagagagcccttgctggccacccctgagaacatgcctgcctgctgggtgccctctgtgtgttccactgaggccacggggtcctggccgggtaggggagccctcccataagcctgtctcgggctccagcccctccacctctgcctcatggatgtgaatcctggggaccaggctggaggcagggatggggacagggtgggtggcttagactcttaattttcactgtaggttcatttctgagagtagcttgttgggcttgggtgaggaagggggcacag

SEQ ID NO: 28590 - DNA, 179 bp, Macaca Mulatta
  misc_feature (1)...(179): n = A,T,C or G
atggggctgctggagctntgcgaggaagtgttcggcaccgccgacctttaccgggtgctgggtgtgcgacgcgaggcttccgacggcgaggtccgacgaggctaccacaaggtgtccctgcaggtacacccggaccgggtgggcgagggcgacaaagaggacgccacccgtcgcttcca

SEQ ID NO: 28591 - DNA, 1492 bp, Macaca Mulatta
  misc_feature (1)...(1492): n = A,T,C or G
atacatggaagatttaaacagcattcattctttgtttttccacaaaggaccgtcctccttctaatatttggaagaaaatagatcaatccagggactataaaaatggcaatcaactcagggaatatcaactagaaggactcaactggctcttgttcaattggtacaatagnnnnnnnnnnnnnnnnnnnnnnnnnnnnnnnnnnnnnnnnnnnnnnnnnnnnnnnnnnnnnnnnnnnnnnnnnnnnnnnnnnnnnnnnnnnnnnnnnnnnnnnnnnnnnnnnnnnnnnnnnnnnnnnnnnnnnnnnnnnnnnnnnnnnnnnnnnnnnnnnnnnnnnnnnnnnnnnnnnnnnnnnnnnnnnnnnnnnnnnnnnnnnnnnnnnnnnnnnnnnnnnnnnnnnnnnnnnnnnnnnnaggggcgtatcattcgaggagcttacagaatgcaagctatcatcaccacttttgaaatgattcttggagaatgtggagagcttaatgcaattgaannnnnnnnnnnnnnnnnnnnnnnnnnnnnnnnnnnnnnnnnnnnnnnnnnnnnnnnnnnnnnnnnnnnnnnnnnnnnnnnnnnnnnnnnnnnnnnnnnnnnnnnnnnnnnnnnnnnnnnnnnnnnnnnnnnnnnnnnnnnnnnnnnnnnnnnnnnnnnnnnnnnnnnnnnnnnnnnnnnnnnnnnnnnnnnnnnnnnnnnnnnnnnnnnnnnnnnnnnnnnnnncaggtacagaaacttcaggctatcctgaaaccaatgatgttgagacgattaaaagaagatgtggaaaagaagttggcacctaaagaagaaaccatcattgaagtagaacttactaatattcaaaagaaatactaccgggctatcttggaaaagaacttttcttttttatccaaaggagcaggacaaactaatgtacctaacttggtcaataccatgatggagctcaggaaatgctgtaatcatccatatcttatcaaaggnnnaggtgctgaggagaaaatacttggagaatttagagatgcgtataatccagctgcttctgattttcatcttcaagcaatgattcagtctgctggtaaattggtccttattgataaattgcttcccaaaatgaaagccggaggtcataaagtgctcatcttctctcagatggttcgctgccttgacatcctagaggactatctcatacataaaaggtaaagcatactgtaatccactgaattatactatgaattatgctaagtttgtgctattaatatttgtgcagcactgtaatgtaaatgaactttactcatatctttcttttatcctatattagaataatgcattcaaatttgtaagtaaagattgtttaggattgtgtgttatgttttcctaacctgcatatgttgcaatattagatgtgcctgaggagtccaattaagaaaagcttgcaaataaatatttgatttgtagagcccaggaatgggtttaataatgtac

SEQ ID NO: 28592 - DNA, 268 bp, Macaca Mulatta
tcctgcagctccagctctgtgctctgcctctgaggagcccatggcccagcccctgtgcaccctgctgctcctgctggccgccctggctggggcccaggcctggagccccaaggaggaagatagggtgatcccaggtggcatctatgacgcagacctcaatgatgatgaagtacagcatgcccttcacttcgccatcagcgagtacaacaaggccaccgaagatgagtactacagacgcccactgcgggtgctgcgagccagagagcag

SEQ ID NO: 28593 - DNA, 139 bp, Macaca Mulatta
gatgatggggcgcttcttcagtggtttggcacagtcaggggcctggtgctgctttgatgaatttaatcgaattgacatagaagttctgtccgtcattgcgcagcaactcattaccattaggaacgccaaagcggcaaag

SEQ ID NO: 28594 - DNA, 241 bp, Macaca Mulatta
atcagttgttaccattattaggcagatgggagcaaaatgacaggagagaattggaaaagattccaactatgagcaggagggtaaagtccagtttgtgatcgacgcggtctatgctatggctcatgcccttcaccacatgaacaaggatctctgtgctgactaccggggtgtctgtccagagatggagcaagctggaggcaagaagttgctgaagtatatccgcaatgttaacttcaatggt

SEQ ID NO: 28595 - DNA, 208 bp, Macaca Mulatta
  misc_feature (1)...(208): n = A,T,C or G
aaagttcgtcgctgcttcctatgctccaggagcggacacctcctatattcctgtccagccccgctttgtgaatactgtcctgtgcctaagatgttggaccactcatgtcttttcagacattcctgggataaacaatgtgaccgatgtcatatgctcggccactatacagatgngcttgcacagaaatctggaggcagtatcacctaac

SEQ ID NO: 28596 - DNA, 765 bp, Macaca Mulatta
gggatgtacatctgtagcaaagctcttggaagaaaaggaagactgaagaaagcaaagcaaatactgtatagagagatttttcaaaagcagtgatccctcaattttaaaaaaggattgaaaattctaaatgtctttctgtgcatattttttgtgttaggaatcaaaaatattttataaaaggagaaagtacagcctcattttagatgtaatcctgttggattttttatgcctcctcagtaacgagaaatgttttaagaaactaagtgtttaggatttcaggacttaacattatacatggctctgaaatatctgacacaatgtaaacattgcaggcacctgcattttgtgtttttttttttcaacaaatgtgactaatttgaaacttttatgaacttctgagctgtccccttgcaatttaaccacagtttgaattaaccatatcaagtctgttttaattttttaaactgtacctcaaagtctatatttcaagggcatattttctccctactattttaatacattaaaggactaaataatcctttcagagatgctgggaaacaaatccttttgctttaaatgtttcaattagaacacccatgaaacacccaacttgaaaattaataataagtggtatttttaaaaaaccccatttctaattgggaaaatccctttatttcaaacaactttaaatgggggagtcacggatttaagtggcccttgaaggggaaattccaccttttgactaaataaatggagtctctcggg

SEQ ID NO: 28597 - DNA, 782 bp, Macaca Mulatta
  misc_feature (1)...(782): n = A,T,C or G
gggtatgggtttcttcagccctttttctgccactagcaaccagaatagcactttaccttttggttggctagataagtggctgactacctgtttttctcactgtggtgtgattggctaaacaatcttgcattaaaaattcaaatgtaaattgaattcacatgaaaaatcatgtttggttgtaaacctccaatgttttgattctctaatcatgttttcgtcacatgctgagtaaaagtgccttacaatgtaaaaattgtacagtacttatgttcccaagtagcatcatcatcttctgggtagtaattacattgtggtattaatatttagaaaaatggacctcagcagtgtatttactgtacatctcttaagtctttaactgtagttttaataagcatgacattatttgataagtatataacatttacatcatttcaaaaaatactgccgttactgtcttttttgcatattttagcctgaaattttgaagcgtcnnnnnnnnnnnnnnnnnnnnnnnnnnnnnnnnnnnnnnnnnnnnattgatattaaacagtgtaatctttgcaagcgtatattgaagattattctggagcatttattgccttaccaganatgttagtaggaaatgttctttagagtagaaagatagacttgagtttctatacttttaataagagctctttgttcctggcggggagggggggtaaaggggggtgaaatttttaacttttcatctccaaggttaataaaaaaccccacccactgaaggtaaattttttattttt

SEQ ID NO: 28598 - DNA, 331 bp, Macaca Mulatta
agatttcagaacttatatttccacctcttccaatgtggcatcctttgcccagaaaaaagccaggaatgtatcgagggaatggccatcagaatcactatcctcctcctgttccatttggttatccaaatcagggaaggaaaaataaaccatatcgcccaattccagtgacatgggtacctcctcctggaatgcattgtgaccggaatcactggattaatcctcacatgttagcacctcactaacttcttttttgattgtgttggtgtcatgttgagaaaaaggtagaataaaccttactacacattaaaagttagaagttcttactaatagt

SEQ ID NO: 28599 - DNA, 733 bp, Macaca Mulatta
  misc_feature (1)...(733): n = A,T,C or G
ctccagatacaaatgattccaacctgcctttctccctgacatcagttcatattttcaaatattacaaatatgtgccaatttagtacattcgtggtctaaacaaaatgctttcaatattgtatatgcagcataaggcagaaaattgtattagtgtgaaatttgagtgattttttctttaatatgacagccaagtagcatatgtacattgcatttaacacattgccatgtgtctttccaggatcagtctgagacagaagccaatgtgagtcttgcaagttgggatgttgagaagatggccatcttcgctttcaatatttcccacatcagtaacaaggttcgaatcctagaactccttccagctcttacaactctgacgaatcacaacagatacttgatcgaatctggaaatgaagatggcttctttaaaatcaaccaaaaggaagggatcagctacctccacttcacaaagaagaagccagtggctggaacctattcattacaaatcagtagtactccactttataaaaagaaagaacttaaccaactagaagacaaatatgacaaagactacctcagtggtgaactgggtgataatctgaagatgaaaatccaggttttgcttcattaattcaccatccagagaccaaataattannagaaaaacaaatatagataggtagaactatattttcccccaatcagaatcatcatatcataggtacaatctttcacc

SEQ ID NO: 28600 - DNA, 847 bp, Macaca Mulatta
tcttctcgtcccccttggcctagatttgggggaagggtcgacttcgtgcaggatgcccggtaatgaatgtggaggatgggctgggaggagggacggcagccctgcttctctttgcccagcttcaaggagcggttccacgctagcgtgcgcaggctgacgcccagctgcgagatcaccttcatcgagtcggaggagggcagtggccggggcgcggccctggtctcggcggtggcctgtaagaaggcctgcatgctgggccagtgagagcagtgaccgccagcacagggaggatgccacagccccacagcacccaggctccacggggaagtgctccccacacgtgctcgcagcctggcggggcaggagacctggccttgtcaggacctgggctgcctgccatcccgctggggaacccagcgggcctcttccctcagacattcggtgggacagccctagggccctaactggggtgcggcaggagcagggacagagactctggaagcccccacctttctcactggaatcaacttcctagaagggagttgctcactcaggactttgttgcatttccacactgtcagagctgttggcctcgcctgggcccaggctctgggaagggggcgccctctggatcctgctgtggcctctcttccctgggaactcatcctgtgtggggaggcagctccaacagcttgaccagacctacacctgggccaaaagggcagccaggggctgctcatcacccagtcctggccattttcttgcttgaggctcaagaggcccagggagcaatgggagagggctccatggaggaggtgtcccaagctgcaaatactcccagagacct

SEQ ID NO: 28601 - DNA, 104 bp, Macaca Mulatta
aggcaaaatatggtatttcaggggaaaaggatgtcagtcctgacttgtcatatgctgatgaaatatcagaatgttatcacaaacttgattctttaacttataag

SEQ ID NO: 28602 - DNA, 1232 bp, Macaca Mulatta
agaccactcagtgttccaaatttatacggtaggttgccagaaggaagatctcatcagctgcgtttggaacagatgaccaaactgaaatctgtaagcagattttgactaaaggagaagttcaactatcagataaagaaagacacacacaactggagcagatgtttagggacattgcaaccattgtggcagacaaatgtgtgaatcctgaaacaaagagaccgtacaccgtgatccttattgagagagccatgaaggacatccactattcagtgaaaaccaacaaaagtacaaaacagcaggctttggaagtgataaagcagctaaaagagaaaatgaagatagaacgtgctcacatgaggcttcgcttcatcctgccagtgaatgaaggcaagaagctgaaagaaaagctcaagccactgatcaaggtcatagaaagtgaagattatggccaacagttagaaatcgtatgtctgattgacccgggctgcttccgagaaattgatgagctaataaaaaaggaaaccaaaggcaaaggttctttggaagtactcaatttgaaagatgtggaagaaggagatgagaaatttgaatgacacccatcaatctcttcacctctaaaaacactaaagggtttttgtttccgacagcactgtttcatgtctgtgatctgccaaatacttgctcaaactatttgacattttctatctttgtgttaagagtggacaaggcaaggctttcctacataagtataataatgtggaaatgattaggttttaattataaactggagtctaaatccctaaagcaaaattgaaactccaagatgccaaattccagagtgggattttgctactctgtttcctgccctttgacaacttttccaaattgaaatttattttgaggccaactcttggtgagtgaaaaaggttatttcgtaccgttaaagtaaagaattatttggggaaaatgtcctattaccaccaaaagggggggaattccttttccctaaaaaaagaaaacactaggaaggcttcccatttccacctttatgggaaccttccctttattgaggggccatttaggccttgggaaggaagtttccccggaatatatcggaaaaaaccgaaatcttaaaaaaaaacctgtgccccggacattaaaaaaaattatttcacttggaacaaatggcgacccttaaagctacaaaaattaatctcctcccgttagagaaa

SEQ ID NO: 28603 - DNA, 192 bp, Macaca Mulatta
agaagtctggtggagagactctgtggacgtaaagaagggagtgaacacagagaaaccttcaggcagattcctgattgtcacctgaacaagaaaagtcatactggagtgaaaccatgcaaatgcagcgagtgtgggaaagtcttcctccgtcattcattcctggacagacacgtgagagctcatgctggacac

SEQ ID NO: 28604 - DNA, 212 bp, Macaca Mulatta
ttcccgacaagacacccatgtgtctcccccacttgtccaggtggtgccacaacatattcctaacagccatcagtatactcctggtctgctgggaggtaacgagattcagagggatccaggttatcccagagatttaatgccaccacctgatctggcaacttctcccaccaaaagccctttcaagataccaccggtaactttcatcaatgaag

SEQ ID NO: 28605 - DNA, 782 bp, Macaca Mulatta
  misc_feature (1)...(782): n = A,T,C or G
agacccacattcccagtgcatgtggacaggccataccaccctgaagccangcccttccccaaagcagcattcaacacacaggcctggccctcgtcctcccgacccccacttggtgccccaattgagtgtgcacctttgaacagggccaccagggataatgctttgacccagacagaagggcctcggtgtcaggcgttggaattgcgtgattgccttctctcggtctttatttcctattagaaatatttccacgttttttcataatttcgaagcaatgctccgctagttgtgcagcgattgagatacccaagccagaggagaagcggtttctcctggaagagcccctgcccttcttttacctcaagtgttgtaaaactcgctactgcaatttacaggggccggctatcaacacatcatcgttcaaagaatatgctgggagtgtgggtgacagctgtggtgggctggggctggccgtcctcctgctgctggtctccattgcagccggccttagcctgccttgagccacgggactgtcatggactgagccttctgaagcatggactcgctccagactattgtcacctgttgcattaaacttgttttctgttgattacctcttggtttgacttcccagggtcttgggatgggagagtggggatcagggtgaagttggctcttaaccctcaagggttcttcagctcacattgagaggaagtccagatctcctgggtagtgattttggtgacagggttttctgtttgaaatcaaaccttgtaactcat

SEQ ID NO: 28606 - DNA, 1471 bp, Macaca Mulatta
  misc_feature (1)...(1471): n = A,T,C or G
ggagcctgtctccttccatgtcatccggatcgcatccttttctaaccattcctggaaacgaaatctgatctcaggttatctgggtgatttgcagacccacacttcggacagaaattgcagcaccatcattttcctgtggccctggtccaggggaaacttcagcaacgaggagtggaaggaactggaaatgttattccatatacgctgcgttcggttccttgagggaatgcatagatactcccgtgaattgcagtnnnnnnnnnnnnnnnnnnnnnnnnnnnnnnnnnnnnnnnnnnnnnnnnnnnnnnnnnnnnnnnnnnnnnnnnnnnnnnnnnnnnnnnnnnnnnnnnnnnnnnnnnnnnnnnnnnnnnnnnnnnnnnnnnnnnnnnnnnnnnnnnnnnnnnnnnccaagcgtctctgcaaagtgctcaatcagaatcagcatgaaaatgacataatacacagtctcctcagtgacacctgcccacgtttcatcttgggtcttcttgatgcaggaaaggcacatctccagaggcaangtgaagcccgaggcctggctgtcccgtggcctcagtcctggccctggccgtctgcagcttctgtgccatgtctcaggattctacccaaaacctgtgtgggtgatgtggatgcggggtgagcaggagcagcagggcactcagcgaggggacatcctgcccaatgctgacaggacatggtatctccgagcaaccctggaggtggccgctggggaggcagctgacctgtcctgtcgggggaagcacagcagtctagagggccaggacatcatcccctactgggancatcacagttccatgggtttgatcatcttggcggtgatagtgcctttgcttcttctgataggtcttgcgctttggttcaggaaacgctgngtttccgttaagatacaccatgatcctccttgtcacccttctccttttgaggtgagagaccagcagtccaacagctcaggatacacctgaacacatcgtggtgatgacgtcctctaactctccttgtaaaacttttgtcagttttgcttgtttctgattaatgatcatttgtcaatataagctcaatttagttttgcaggatttgttgttctgacctgggttctgggactttaaaattcaaattttatctccaaatggaatgggatcctagcaatcttcacatgttcaactattaatggatcatcaggcttgttatagatgtcccttattcccgagggccttccctgactcacaagtgggaaacggactcttcctggtctgaactcccaccacatttcagccgtactttgctaactgtactcctcacttcctctccttcgttgcagctatttaggtcccccttttccttctaatttttctactccttcactgcaaagtatgtgtgtttttaatatatgcatacctggtgaaggatcttgctgaaacatgttctcaataaa

SEQ ID NO: 28607 - DNA, 1889 bp, Macaca Mulatta
  misc_feature (1)...(1889): n = A,T,C or G
ggatcttcagcatcctaatgaatttattcgaggatctactcttcgttttctttgcaaattgaaagaagcagaattgctagaacctttaatgccagctattcgtgcgtgtttggagcatcgacacagctatgttagaagaaatgctgttttggccatctataccatctatagnnnnnnnnnnnnnnnnnnnnnnnnnnnnnnnnnnnnnnnnnnnnnnnnnnnnnnnnnnnnnnnnnnnnnnnnnnnnnnnnnnnnnnnnnnnnnnnnnnnnnnnnnnnnnnnnnnnnnnnnnnnnnnnnnnnnnnnnnnnnnnnnnnnnnnnnnnnnnnnnnnnnnnnnnnnnnnnnnnnnnnnnnnnnnnnnnnnnnnnnnnnnnnggtctgtcatgctaatccatcagaaagagctcgttttattcgctgcatctataacttactacagtcatccagccctgctgtaaaatatgaagctgctgggacattagtgacactctctagtgcaccaactgcaatcaaggnnnnnnnnnnnnnnnnnnnnnnnnnnnnnnnnnnnnnnnnnnnnnnnnnnnnnnnnnnnnnnnnnnnnnnnnnnnnnnnnnnnnnnnnnnnnnnnnnnnnnnnnnnnnnnnnnnnnnnnnnnnnnnnnnnnnnnnnnnnnnnnnnnnnnnnnnnnnnnnnnnnnnnnnnnnnnnnnnnnnnnnnnnnnnnnnnnnnnnnnnnnnnnnnnnnnnnnnnnnnnnnnnnnnnnnnnnnnnnnnnnnnnnnnnnnnnnnnnnnnnnnnnnnnnnnnnnnnnnnnnnnnnnnnnnnnnnnnnnnnnnnnnnnnnnnnnnnnnnnnnnnnnnnnnnnnnnnnnnnnnnnnnnnnnnnnnnnnnnnnnnnnnnnnnnnnnnnnnnnnnnnnnnnnnnnnnnnnnnnnnnnnnnnnnnnnnnnnnnnnnnnnnnnnnnnnnnnnnnnnnnnnnnnnnnnnnnnnnnnnnnnnnnnnnnnnnnnnnnnnnnnnnnnnnnnnnnnnnnnnnnnnnnnnnnnnnnnnnnnnnnnnnnnnnnnnnnnnnnnnnnnnnnnnnnnnnnnnnnnnnnnnnnnnnnnnnnnnnnnnnnnnnnnnnnnnnnnnnnnnnnnnnnnnnnnnnnnnnnnnnnnnnnnnnnnnnnnnnnnnnnnnnnnnnnnnnnnnnnnnnnnnnnnnnnnnnnnnnnnnnnnnnnnnnnnnnnnnnnnnnnnnnnnnnnnnnnnnnnnnnnnnnnnnnnnnnnnnnnnnnnnnnnnnnnnnnnnnnnnnnnnnnnnnnnnnnnnnnnnnnnnnnnnnnnnnnnnnnnnnnnnnnnnnnnnnnnnnnnnnnnnnnnnnnnnnnnnnnnnnnnnnnnnnnnnnnnnnnnnnnnnnnnnnnnnnnnnnnnnnnnnnnnnnnnnnnnnnnnnnnnnnnnnnnnnnnnnnnnnnnnnnnnnnnnnnnnnnnnnnnnnnnnnnnnnnnnnnnnnnnnnnnnnnnnnnnnnnnnnnnnnnnnnnnnnnnnnnnnnnnnnnnnnnnnnnnnnnnnnnnnnnnnnnnnnnnnnnnnnnnnnnnnnnnnnnnnnnnnnnnnnnnnnnnnnnnnnnnnnnnnnnnnnnnnnnnnnnnnnnnnnnnnnnnnnnnnnnnnnnnnnnnagaaagaatctgaaaagaggaatgtgacagtacagcctgatgaccccatttccttcatgcaactaactgctaagaatgaaatgaactgcaaggaagatcagtttcagctgagtttgctggcagcaatgggtaacacacagaggaaagaggcagcagatcccctagcatctaaacttaacaaggnncggtcacccagttgacaggtttctcagatcctgtatatacaggagcttacgttcacgtcaac

SEQ ID NO: 28608 - DNA, 705 bp, Macaca Mulatta
  misc_feature (1)...(705): n = A,T,C or G
gggctttttacctcgttgcacttcggagagcaacatgggtcaccagcagctgtactggagccacccgcgaaaattcggccagggttctcgcgtcttgtcgcgtggtgttcaaaccggcacggtctgatccggaaatatggcctcaatatgtgccgccagtgtttccgtcagtacgcgacaggatatcgagtttcattaagttggactaaatgatcttccttcaaagcattatccaaggtcatctactcagtgaaaaactatgactagttctttgtacataaaataaacagtgcgnnnnnnnnnnnnnnccgttttatgaatgatcttcccttcttaggattgtatagatgagttcgtactccattgaaaagttcacatggataagtttcttttggtaccttaaaaattaaaagnnnnnnnnnnnnnnnnnncacttgattatttcggaataaaattttcagtattccatccaaaaacccccatggttactgaggatgtggcccaaattagcttacgacgataattattaatattcatcaattatactagaccaacccccaatactcatgcacacaataaaatgatactcccttaatagtccgaaggtagaacaacattaactctacctaggcaaaaatacaatcacaatatctaatnntccttttgtgtggggggggacaccctctgcgaatccctcacaaaaaa

SEQ ID NO: 28609 - DNA, 840 bp, Macaca Mulatta
agcagctgcactgtgccggcaaggccaagaggagtggcagccacgcgcccctagtgcgggagctgctgctggacgccctgagccccgagcagctggtgctcaccctcctggaggctgagccaccccatgtactgatcagccgccccagcgcgcccttcactgaggcctccatgatgatgtccctgaccaagctggccgacaaggagttggtacacatgatcagctgggccaagaagattcccggctttgtggagctcagcctgttcgaccaagtgcggctcttggagagctgttggatggaggtgttaatggtggggctgatgtggcgctcaattgaccaccccggcaagctcatctttgctccagatcttgttctggacagggatgaggggaaatgcgtagaaggaattctggaaatctttgacatgctcctggcaactacttcaaggtttcgagagttaaaactccaacacaaagagtatctctgtgtcaaggccatgatcctgctcaattccaatatgtaccctctggtcacagcgacccaggatgctgacagcagccggaagctggcccacttgctgaacgccgtgaccgacgctttggtctgggtgatcgccaagagcggcatctcctcccagcagcaatccatgcgcctggctaacctcctgatgctcctgtcccacgtcaggcatgcgagtaacaagggcatggaacatctgctcagcatgaagtgcaaaaacgtggtcccagtgtatgacctgctgctggagatgctgaatgcccacgtgcttcgcgggtgcaagtcctccatcacggggtccgagtgcagcccggcagagg

SEQ ID NO: 28610 - DNA, 502 bp, Macaca Mulatta
ttcgttaaagttttatgtaatttaaccctttgaagacagaagtagttggatgaaatgcacagtcaattattatagaaactgataacagggagtacttgttttcccttttgccttcttaagtacattggttaaaactagggaaaaagggtatgtgtatattgtaaactatggatgttcacactcaaagaggttaagtcagtgaagtaacctattcatcaccagtatcgctgtaccactaataaattgtttgccaaatccttgtaataacatcttaattttagacaatcatgtcactgttttttaatgtttatttttgtgtgtgtgttgcgtgtatcatgtatttatttgttggcaaactattgtttgttgattaaaatagcactgttccagtcagccactactttatgacgtctgaggcacacccctttctgaatttcaaggaccaaggtgacccgacctgtgtatgagagtgccaaatggtgtttggcttttcttaacattc

SEQ ID NO: 28611 - DNA, 609 bp, Macaca Mulatta
  misc_feature (1)...(609): n = A,T,C or G
nnnnnnnnnnnnnnnnnncagagaagtannnnnnnnnnnnnnnnnnnnnnnnnnggcagccttcagagcaagatggcgccgcaggcatcgcttcgccgttcccgtctgagggaaccctaagtactgtgtccggcgccgtgttccagctccgcgttgctccgcgagaaagcgagaggccgagccccggcgggtgcgatggccgcggtggtggccaagcgggaagggccgccgttcatcagcgaggcgggcgtgcggggcaacgccgccgtcctggattattgccggacctcggtgtcagcgctgtcgggggccacggccggcatcctcggcctcaccggcctctacggcttcatcttatacctgctcgcctccgtcctgctctccctgctcctcattctcaaagcgggaaggaggtggaacaaatatttcaaatcacggagacccctctttacaggaggcctcatcgggggcctcttcacctacgtcctattctggacgttcctctacggcatggtgcacgtctactgaaatgggggccggggggactttttttaaaaaccagatcgggaggactgtggacaggcattaacaccgtgtagacttccttag

SEQ ID NO: 28612 - DNA, 547 bp, Macaca Mulatta
  misc_feature (1)...(547): n = A,T,C or G
gatgtataacataaaccagtcaacagataccaaggaagcagcagccatcgaggccagaagaaatcgagaaaaagagcgacaaaaccgattcttcaatgtgcggaaccgagtcatgggggtnngtggatgtccaggccctgaacaaccaggtgggagaccgaaagcgtcgggaagcagcagaaagaagcaaggaggcagcttatggtanggtaccagccaggtgcagtatgatgtggtagtccagatgttagagaaggaagaggcagatcgaacacgtcggctggccaagaaagtccaggagtttcgggagcagaagcagcagctcaagaacgggcgtgaatttagtctttgggatccagaccaagtctggaaggggcttccaacctatcttagttacagtaatacctatcctggtccagccagcctgcagtacttctctggggaagacctagacagggccacacggctgagaatgcagcaagggcagttcaggtacaacttggaaaggcagcagcaggagcaacagcaagccaaggttgatgagaat

SEQ ID NO: 28613 - DNA, 783 bp, Macaca Mulatta
  misc_feature (1)...(783): n = A,T,C or G
ggttttggagaaaaaaggaataaaaagggtatgaancaaagtctccaaagaaatatgggactgtgtgaaaaaaccaaatctacatttgattggtgtacctgaaagtgaaggggagagtggaaccaagttggaaaacactcctcaggatcatgtgtgtaacatgtatacctatgtaacaaacatgtacattctgtacatgtaaccaagaacttaaaagtannnnnnnnnnnnnnnnnnnnnnngtagacagaaccagtaaaatactaagttgataactatgtcaatttactgttctaacaagtgttcatactatttcagtaattttgcttacagaaatagtttgtaaattctaaagaagtgaacgtaaattatgttccctcattatactatttcttctgtaatatatgatatgaacttgtttgttctgttctacattatgtctattcctttttctccttaaaaaataatttacttttaagtttcttaagacactagaactgagaatagaaccctagcttaaaaagtacttgagttcccttcatagcatactnnnnnnnnnnnnnnnnnnnnnnnnaaaaggaaataaaagtacttgagtttatatggcctcaactaaattaaattggtttagtgtccaatctgattgtttgcaatgagtatttcaatatgacacaaaaaccttttgaaatctattaggaaagttcaagttttatggctttatgtatatccaatctaagagttaatatcaagaaaaacattttggtccatttcatgcaactggcc

SEQ ID NO: 28614 - DNA, 383 bp, Macaca Mulatta
gtgtctggtgaaatggctggaagttcgctgtgtctgccccatgtgtaacaagcccattgctgggccttcagaggccacgcagaacattgggattctattggatgaactggtgtgagtgctgccactacaccgagacctggagaagacctcttgcctcatggatgcctggtccctctgcacagctccaaccaacaggactgtagggtgatgatgatcactttcccggtgatgggaagggtggtctagggctgggtttccaccctcagttccagaccagtgccagacgtgcccccacttcctgcctcctgaagccttcttccctgctactccatgctggtggcctctcccatcaagaccactgtctcccggtactggactatcta

SEQ ID NO: 28615 - DNA, 316 bp, Macaca Mulatta
  misc_feature (1)...(316): n = A,T,C or G
gactatctgtgccatgtctatgtccggaatgatagtcttgcaggtgtggtcattgccgacaatgaatacccatcccgggtggcctttaccttgctggagaaggtnnnnnnnnnnnnnnnnnnnnnnnnnnnnnnnnnnnnnnnnnnnnnnnnnnnnnnnnnnnnnnnnnnnnnnnnnnnnnnnnnnnnnnnnnnnnnnnnnnnnnnnnnnnnnnnnnnnnnnnnnnnnnnnnnnnnnnnnnnnnnnnnnnnnnnnnnnnnnnnnnnnnnnnngcacaacaccatggagactctgttagagcgaggtgagaagctag

SEQ ID NO: 28616 - DNA, 491 bp, Macaca Mulatta
taagaagagtgaatgttccagtgatgatagatactataagcgatgatcgttctgttgctatgggcacagcggtcagtctctgtcatccctacaaaggagtggccttgttaaatccaagtggcatgtatcttccctctgagcttcgtttcttcaagatgctctgggtggtgggatgggaggcccatcctaagctttcctcagaccttagccaattcattgagaaattggaaaagctgaaagcacctccggccgctcctgggagacagaccccttggtgagaaaataaaccagtgacttcagagcctgtggtctcaactgtgcttgaaaaacaccgtctctgaaaaccactttgtgattctccctgctccctgtggacaaaagcacataattctgctgttacgggtactctgctcattcgagctttcatgttcagcatgcaatggaatcatgcttgtccatgtgaaataaatatggctctctcatgtccttaa

SEQ ID NO: 28617 - DNA, 1100 bp, Macaca Mulatta
  misc_feature (1)...(1100): n = A,T,C or G
cgccgccaggccaaaccagttccgagtgtcgccgctgggtcggacctggaacctgggagagacggtggagctgaagtgccaggtgctgctgtccaacccgacgtcgggctgctcgtggctcttccagccgcgcggcaccgccgcccgccccaccttcctcctatacctctcccaaaacaagcccaaggcggcggaggggctggacacccagcggttctcgggcaagaggttgggggacaccttcgtcctcaccctacgtgacttccgccaagagaacgagggctactatttctgctcggccctgagcaactccatcatgtacttcagccacttcgtgccggtcttcctgccagnnnnnnnnnnnnnnnnnnnnnnnnnnnnnnnnnnnnnnnnnnnnnnnnnnnnnnnnnnnnnnnnnnnnnnnnnnnnnnnnnnnnnnnnnnnnnnnnnnnnnnnnnnnnnnnnnnnnnnnnnnnnnnnnnnnnnnnnnnnnnnnnnnnnnnnnnnnnnnnnnnnnnnnnnnnnnnnnnnnnnnnnnnnnnnnnnnnnnnnnnnnnnnnnnnnnnnnnnnnnnnnnnnnnnnnnnnnnnnnnnnnnnnnnnnnnngcctgtggtcaaatcgggaggcaagcccagcctttcggacagatacgtctaannnnnnnnnnnnnnnnnnnnnnnnnnnnnnnnnnnnnnnnnnnnnnnnnnnnnnnnnnnnnnnnnnnnnnnnnnnnntccagtcttcctccctatgtattcattctcatgattattgttttagtgggggtggggtgggaaagattactttttctatatgtgtttgacgggaaacaaaactaggtaaaatctacagtacaccgcaagggtcacaatactgttgtgcacacatcggggtagggtgtggaaaggggcaagtcggagctacccgcagagttctcagaatcatgctgacagagctggaggcacctgtgatatctcaacctcttccccacccattgtacaaagggggagggtcaagcccagagacagcgagatcaaaggcacacatcgaatcagggtaggatcagtaggtggaagggcattgtctcccagttcagggc

SEQ ID NO: 28618 - DNA, 636 bp, Macaca Mulatta
gggagccttttttccataaaaagggatgattcatcattgtgaaagaaatggttatctcattggggaagaaaaggtgggggagaaggcaagaatcactgaaaaatcttaaatctctgttttctggaataagaggtctagacagcctaaatctgattttagtctttataaaaataatgtcttgagttctcatacttttctgtcactgcaaggctgctcagtaggcagtgttttgcagactttggggagcggtctgtgtggccaaatatcgtgtgtataggcagactttgaaatcaggtcctgcttcatttacaagaattttggtgggcatctaatcctacataatgcaaaagaaaaacagaccatttaaaaactcagacacgattatatttaatatattaattactaaaaaggcacaagattacactgaacacattagctactaaaaaggcactgctaagacattcaagcaaatagctattatacactgcagcagattttacaggtttctaattccaacatatgtttgaaaaatctgtgagtgttccaaaatatatttaataatggaaggtctgcattaatataccatccatggtgttttaccatttgccttaatatgaatatactgtttacctcacc

SEQ ID NO: 28619 - DNA, 198 bp, Macaca Mulatta
tgaagaggaagttaaagtgatctcatttgagaaagttgtatcacttaattcagtctgatacttgaatgtgatttaccctaattaagtacaaaagcagaatcgcttttgccttttcaagtcaagaaaataagtgctctgtcaaaagaacaaaaacagactttcgggcactggagactggagttgattcaccctttcaga

SEQ ID NO: 28620 - DNA, 675 bp, Macaca Mulatta
gggagccatctgcaagccagagggccaggacagatccttctatcaagaccaccaaccctgctggcaccttcatcttgggcttccagaactttgagcaaataaacttctcttgtgcgagccacccagtctgtggtggtttgttgtggcggctctagcaagtgaatacagtaagcaataagcaaaaacgtttatagattgtccaaaagccttaatattcacatgcaaagccatgctggagagaaactatatgaatgtaagacatgggaaagccttcattgagtcttcagtcctttctacataccggaggaattacgtaggagagaaattgtatgaatgtaaggtgcatgaaaagcctgtgaatgttcactgtatttgtattttaatattcacatgcaagttgtctggatatagaccttatgaaaatagaggggaaaaaaggaaagaaagtttcttttactgtgaaagtaaggaatgtgacccaatacaccatattggaacttggagtggaccgaaaccccattaggattgtggaaaagcttacgttaatgttttctaccttctagaaggtgtaagaagtcaaactggagagaagccttctaccctgtatgcatgtaggaagccttacattattccacagaaattttttttaacatctaaaatacctcaaaccctggg

SEQ ID NO: 28621 - DNA, 783 bp, Macaca Mulatta
  misc_feature (1)...(783): n = A,T,C or G
gggtcctgggagttcagtggctgcaaagggcatcccggaacgtggtgccgctgggcgcacggacagcctcccgcatgaccaaggacatgttgccagggccctatcctaggaccccagaagaacgggccgccgccgccaagaagtataatatgcgtgtggaagactacgagccttacccggatgagggcatggggtatggcgactacccgaagctccctgaccgttcacagcatgagagggatccatggtatagctgggaccaaccggacctgaggttgaactggggtgaaccgatgcactggcacatagacatgtacaccaggaaccgtgtggatacatcccccacacctgtttcttggaatgtcatgtgtatgcacctcttcggtttcctggctttcatgacattcatgttctgggtgggggacgtgtacccttcctaccagcctgtgggaccaaagcagtatccttacaataatctgtacctggaacgaagtggcgatccctccaaaaaaacctgaactgggtggttcactatgaaatctgaagaagctttcctggggcttttttgtcccccctaaactaagaactccccttttttccttagaaaatttaattcctaatggaaaaannnnnnnnnnnnnnnnnnaaatggcttgggggtaaaanaataaacaaaacatgcaaaaacaaattataataaaattggttcgggcccgcccctccgaggccctctccaaaaaaaagccttcttttcaaaaacaccatattccgctttttggggga

SEQ ID NO: 28622 - DNA, 3906 bp, Macaca Mulatta
  misc_feature (1)...(3906): n = A,T,C or G
gcggacccaagatggcggcgtgtggacgtgtacggaggatgttccgcttgtcggcggcgctgcagctgctgctgctagccgcggccggggccgagaaactccccggccagggcgtccatagccagggccagggccccggcgccaactttgtgtccttcgtagggcagcccggaggcnnnnnnnnnnnnnnnnnnnnnnnnnnnnnnnnnnnnnnnnnnnnnnnnnnnnnnnnnnnnnnnnnnnnnnnnnnnnnnnnnnnnnnnnnnnnnnnnnnnnnnnnnnnnnnnnnnnnnnnnnnnnnnnnnnnnnnnnnnnnnnnnnnnnnnnnnnnnnnnnnnnnnnnnnnnnnnnnnnnnnnnnnnnnnnnnnnnnnnnnnnnnnnnnnnnnnnnnnnnnnnnnnnnnnnnnnnnnnnnnnnnnnnnnnnnnnnnnnnnnnnnnnnnnnnnnnnnnnnnnnnnnnnnnnnnnnnnnnnnnnnnnnnnnnnnnnnnnnnnnnnnnnnnnnnnnnnnnnnnnnnnnnnnnnnnnnnnnnnnnnnnnnnnnnnnnnnnnnnnnnnnnnnnnnngattaaagaatgtgctgatgaaccggttggaaaaggttacatggtttcctgcttggtggatcaccgaggcaacatcactgagtatcagtgtcaccagtacattaccaagatgacggccatcatttttagtgattaccgtttaatctgtggcttcatggatgactgcaaaaatgacatcaacattctgaaatgtggtagtattcggcttggagaaaaggnnnnnnnnnnnnnnnnnnnnnnnnnnnnnnnnnnnnnnnnnnnnnnnnnnnnnnnnnnnnnnnnnnnnnnnnnnnnnnnnnnnnnnnnnnnnnnnnnnnnnnnnnnnnnnnnnnnnnnnnnnnnnnnnnnnnnnnnnnnnnnnnnnnnnnnnnnnnnnnnnnnnnnnnnnnnnnnnnnnnnnnnnnnnnnnnnnnnnnnnnnnnnnnnnnnnnnnnnnnnnnnnnnnnnnnnnnnnnnnnnnnnnnnnnnnnnnnnnnnnnnnnnnnnnnnnnnnnnnnnnnnnnnnnnnnnnnnnnnnnnnnnnnnnnnnnnnnnnnnnnnnnnnnnnnnnnnnnnnnnnnnnnnnnnnnnnnnnnnnnnnnnnnnnnnnnnnnnnnnnnnnnnnnnnnnnnnnnnnnnnnnnnnnnnnnnnnnnnnnnnnnnnnnnnnnnnnnnnnnnnnnnnnnnnnnnnnnnnngggcgacaagtgagcagtgagtgccagggggagatgttggattaccgacgcatgttgatggaagacttttctctgagccctgagatcatcctaagctgtcggggggagattgaacaccattgttccggattacatcgaaaagggcggactctacactgtctgatgaaagtagttcgcggagagaaggggaaccttggaatgaactgccagcaggcgngcttcaaacactgattcaggagactgaccctggtgcagattaccgcattgatcgagctttgaatgaagcttgtgaatctgtaatccagacagcctgcaaacacataagatccggagacccaatgnnnnnnnnnnnnnnnnnnnnnnnnnnnnnnnnnnnnnnnnnnnnnnnnnnnnnnnnnnnnnnnnnnnnnnnnnnnnnnnnnnnnnnnnnnnnnnnnnnnnnnnnnnnnnnnnnnnnnnnnnnnnnnnnnnnnnnnnnnnnnnnnnnnnnnnnnnnnnnnnnnnnnnnnnnnnnnnnnnnnnnnnnnnnnnnnnnnnnnnnnnnnnnnnnnnnnnnnnnnnnnnnnnnnnnnnnnnnnnnnnnnnnnnnnnnnnnnnnnnnnnnnnnnnnnnnnnnnnnnnnnnnnnnnnnnnnnnnnnnnnnnnnnnnnnnnnnnnnnnnnnnnnnnnnnnnnnnnnnnnnnnnnnnnnnnnnnnnnnnnnnnnnnnnnnnnnnnnnnnnnnnnnnnnnnnnnnnnnnnnnnnnnnnnnnnnnnnnnnnnnnnnnnnnnnnnnnnnnnnnnnnnnnnnnnnnnnnnnnnnnnnnnnnnnnnnnnnnnnnnnnnnnnnnnnnnnnnnnnnnnnnnnnnnnnnnnnnnnnnnnnnnnnnnnnnnnnnnnnnnnnnnnnnnnnnnnnnnnnnnnnnnnnnnnnnnnnnnnnnnnnnnnnnnnnnnnnnnnnnnnnnnnnnnnnnnnnnnnnnnnnnnnnnnnnnnnnnnnnnnnnnnnnnnnnnnnnnnnnnnnnnnnnnnnnnnnnnnnnnnnnnnnnnnnnnnnnnnnnnnnnnnnnnnnnnnnnnnnnnnnnnnnnnnnnnnnnnnnnnnnnnnnnngtggacgtggtgatctgcctgagcacgaccgtgcgccacgacactctgcaggaagccaaggagcacagggtgtccctgaagtgccgcaggcagctccgcgtggaggagctggagatgngacggaggacatccgcctggagccagacctatatgaagcctgcaagagtgacatcaaaaactactgttccactgtgcaatatggcaatgctcagnagattattgaatgtctgaaagaaaacaagaagcagctaagcacccgctgccaccagaaagtatttaagctgcaggagacagagatgatggacccagagctagactacaccctcatgagggtctgcaagcagatgataaagnnnnnnnnnnnnnnnnnnnnnnnnnnnnnnnnnnnnnnnnnnnnnnnnnnnnnnnnnnnnnnnnnnnnnnnnnnnnnnnnnnnnnnnnnnnnnnnnnnnnnnnnnnnnnnnnnnnnnnnnnngattaccgcttaaaccccatgctaagaaaagcctgtaaagctgacattcctaaattctgtcacggtatcctgactaaggccaaggatgattcagaattagaaggacaagtcatctcttgcctcaagctgagatatgctgaccagncagcgcctgtcttcagactgtgaagaccagatccgaatcattatccaggagtcggccctggactaccgcctggatcctcagctccagctgcactgctcagacgagnagatctccagtctatgtgctgaagaagcagcagcccaagagcaaacaggtcaggtggaagagtgcctcaaagtcaacctgctcaagatcaaaacagaattgtgtaaaaaggnaggaagttttaaacatgctgaaggaaagcaaagcacacatctttgttgacccggtacttcatactgcttgcgccctggacattaaacaccactgtgcagccatcacccctggccgcgggcgtcnaaatgtcctgtctcatggaagcgctggaggataagcgggtgaggttacaacccgagtgcaaaaagcgcctcaatgaccggattgaaatgtggagttatgcagcaaaggtnaggtggccccagcagatggcttctctgatcttgccatgcaagtaatgacatctccgtctaagaactacattctctctgtgatcagtgggagcatctgtatattgttcctgattggtctgatgtgtggacggatcaccaagcgagtgacacgagagctcaaggacaggtagagccaccttgaccaccaaaggaactacctatccagtgcccagtttgtacagccctcttgtatagcatccccactcacctcactcttctcagaggtgacaccaaccccgtgttagagcatcagcaggtgtccactgcgttgtcccgtccagcctccactcatgtccatggtgtcctcctcctcctcaccgttcgtgcagcagcagcagctggccgctggggttactgcctttgttggcaaacttgggttaacctgcctgtagacaagtctctctcataccaacagaacttccggtacttccagaaccaactcacctgacctgcaactcaaaggct

SEQ ID NO: 28623 - DNA, 7047 bp, Macaca Mulatta
  misc_feature (1)...(7047): n = A,T,C or G
gaaaggccatttaaatgtagtgaatgtggaaaagcttttaaccagaagggggcactgcagacccacatgatcaagcacacaggtgaaaagccccacgcctgtgccttctgtcctgccgccttctctcagaaagggaatcttcagtcgcatgtgcagcgagtccactcagaggnnnnnnnnnnnnnnnnnnnnnnnnnnnnnnnnnnnnnnnnnnnnnnnnnnnnnnnnnnnnnnnnnnnnnnnnnnnnnnnnnnnnnnnnnnnnnnnnnnnnnnnnnnnnnnnnnnnnnnnnnnnnnnnnnnnnnnnnnnnnnnnnnnnnnnnnnnnnnnnnnnnnnnnnnnnnnnnnnnnnnnnnnnnnnnnnnnnnnnnnnnnnnnnnnnnnnnnnnnnnnnnnnnnnnnnnnnnnnnnnnnnnnnnnnnnnnnnnnnnnnnnnnnnnnnnnnnnnnnnnnnnnnnnnnnnnnnnnnnnnnnnnnnnnnnnnnnnnnnnnnnnnnnnnnnnnnnnnnnnnnnnnnnnnnnnnnnnnnnnnnnnnnnnnnnnnnnnnnnnnnnnnnnnnnnnnnnnnnnnnnnnnnnnnnnnnnnnnnnnnnnnnnnnnnnnnnnnnnnnnnnnnnnnnnnnnnnnnnnnnnnnnnnnnnnnnnnnnnnnnnnnnnnnnnnnnnnnnnnnnnnnnnnnnnnnnnnnnnnnnnnnnnnnnnnnnnnnnnnnnnnnnnnnnnnnnnnnnnnnnnnnnnnnnnnnnnnnnnnnnnnnnnnnnnnnnnnnnnnnnnnnnnnnnnnnnnnnnnnnnnnnnnnnnnnnnnnnnnnnnnnnnnnnnnnnnnnnnnnnnnnnnnnnnnnnnnnnnnnnnnnnnnnnnnnnnnnnnnnnnnnnnnnnnnnnnnnnnnnnnnnnnnnnnnnnnnnnnnnnnnnnnnnnnnnnnnnnnnnnnnnnnnnnnnnnnnnnnnnnnnnnnnnnnnnnnnnnnnnnnnnnnnnnnnnnnnnnnnnnnnnnnnnnnnnnnnnnnnnnnnnnnnnnnnnnnnnnnnnnnnnnnnnnnnnnnnnnnnnnnnnnnnnnnnnnnnnnnnnnnnnnnnnnnnnnnnnnnnnnnnnnnnnnnnnnnnnnnnnnnnnnnnnnnnnnnnnnnnnnnnnnnnnnnnnnnnnnnnnnnnnnnnnnnnnnnnnnnnnnnnnnnnnnnnnnnnnnnnnnnnnnnnnnnnnnnnnnnnnnnnnnnnnnnnnnnnnnnnnnnnnnnnnnnnnnnnnnnnnnnnnnnnnnnnnnnnnnnnnnnnnnnnnnnnnnnnnnnnnnnnnnnnnnnnnnnnnnnnnnnnnnnnnnnnnnnnnnnnnnnnnnnnnnnnnnnnnnnnnnnnnnnnnnnnnnnnnnnnnnnnnnnnnnnnnnnnnnnnnnnnnnnnnnnnnnnnnnnnnnnnnnnnnnnnnnnnnnnnnnnnnnnnnnnnnnnnnnnnnnnnnnnnnnnnnnnnnnnnnnnnnnnnnnnnnnnnnnnnnnnnnnnnnnnnnnnnnnnnnnnnnnnnnnnnnnnnnnnnnnnnnnnnnnnnnnnnnnnnnnnnnnnnnnnnnnnnnnnnnnnnnnnnnnnnnnnnnnnnnnnnnnnnnnnnnnnnnnnnnnnnnnnnnnnnnnnnnnnnnnnnnnnnnnnnnnnnnnnnnnnnnnnnnnnnnnnnnnnnnnnnnnnnnnnnnnnnnnnnnnnnnnnnnnnnnnnnnnnnnnnnnnnnnnnnnnnnnnnnnnnnnnnnnnnnnnnnnnnnnnnnnnnnnnnnnnnnnnnnnnnnnnnnnnnnnnnnnnnnnnnnnnnnnnnnnnnnnnnnnnnnnnnnnnnnnnnnnnnnnnnnnnnnnnnnnnnnnnnnnnnnnnnnnnnnnnnnnnnnnnnnnnnnnnnnnnnnnnnnnnnnnnnnnnnnnnnnnnnnnnnnnnnnnnnnnnnnnnnnnnnnnnnnnnnnnnnnnnnnnnnnnnnnnnnnnnnnnnnnnnnnnnnnnnnnnnnnnnnnnnnnnnnnnnnnnnnnnnnnnnnnnnnnnnnnnnnnnnnnnnnnnnnnnnnnnnnnnnnnnnnnnnnnnnnnnnnnnnnnnnnnnnnnnnnnnnnnnnnnnnnnnnnnnnnnnnnnnnnnnnnnnnnnnnnnnnnnnnnnnnnnnnnnnnnnnnnnnnnnnnnnnnnnnnnnnnnnnnnnnnnnnnnnnnnnnnnnnnnnnnnnnnnnnnnnnnnnnnnnnnnnnnnnnnnnnnnnnnnnnnnnnnnnnnnnnnnnnnnnnnnnnnnnnnnnnnnnnnnnnnnnnnnnnnnnnnnnnnnnnnnnnnnnnnnnnnnnnnnnnnnnnnnnnnnnnnnnnnnnnnnnnnnnnnnnnnnnnnnnnnnnnnnnnnnnnnnnnnnnnnnnnnnnnnnnnnnnnnnnnnnnnnnnnnnnnnnnnnnnnnnnnnnnnnnnnnnnnnnnnnnnnnnnnnnnnnnnnnnnnnnnnnnnnnnnnnnnnnnnnnnnnnnnnnnnnnnnnnnnnnnnnnnnnnnnnnnnnnnnnnnnnnnnnnnnnnnnnnnnnnnnnnnnnnnnnnnnnnnnnnnnnnnnnnnnnnnnnnnnnnnnnnnnnnnnnnnnnnnnnnnnnnnnnnnnnnnnnnnnnnnnnnnnnnnnnnnnnnnnnnnnnnnnnnnnnnnnnnnnnnnnnnnnnnnnnnnnnnnnnnnnnnnnnnnnnnnnnnnnnnnnnnnnnnnnnnnnnnnnnnnnnnnnnnnnnnnnnnnnnnnnnnnnnnnnnnnnnnnnnnnnnnnnnnnnnnnnnnnnnnnnnnnnnnnnnnnnnnnnnnnnnnnnnnnnnnnnnnnnnnnnnnnnnnnnnnnnnnnnnnnnnnnnnnnnnnnnnnnnnnnnnnnnnnnnnnnnnnnnnnnnnnnnnnnnnnnnnnnnnnnnnnnnnnnnnnnnnnnnnnnnnnnnnnnnnnnnnnnnnnnnnnnnnnnnnnnnnnnnnnnnnnnnnnnnnnnnnnnnnnnnnnnnnnnnnnnnnnnnnnnnnnnnnnnnnnnnnnnnnnnnnnnnnnnnnnnnnnnnnnnnnnnnnnnnnnnnnnnnnnnnnnnnnnnnnnnnnnnnnnnnnnnnnnnnnnnnnnnnnnnnnnnnnnnnnnnnnnnnnnnnnnnnnnnnnnnnnnnnnnnnnnnnnnnnnnnnnnnnnnnnnnnnnnnnnnnnnnnnnnnnnnnnnnnnnnnnnnnnnnnnnnnnnnnnnnnnnnnnnnnnnnnnnnnnnnnnnnnnnnnnnnnnnnnnnnnnnnnnnnnnnnnnnnnnnnnnnnnnnnnnnnnnnnnnnnnnnnnnnnnnnnnnnnnnnnnnnnnnnnnnnnnnnnnnnnnnnnnnnnnnnnnnnnnnnnnnnnnnnnnnnnnnnnnnnnnnnnnnnnnnnnnnnnnnnnnnnnnnnnnnnnnnnnnnnnnnnnnnnnnnnnnnnnnnnnnnnnnnnnnnnnnnnnnnnnnnnnnnnnnnnnnnnnnnnnnnnnnnnnnnnnnnnnnnnnnnnnnnnnnnnnnnnnnnnnnnnnnnnnnnnnnnnnnnnnnnnnnnnnnnnnnnnnnnnnnnnnnnnnnnnnnnnnnnnnnnnnnnnnnnnnnnnnnnnnnnnnnnnnnnnnnnnnnnnnnnnnnnnnnnnnnnnnnnnnnnnnnnnnnnnnnnnnnnnnnnnnnnnnnnnnnnnnnnnnnnnnnnnnnnnnnnnnnnnnnnnnnnnnnnnnnnnnnnnnnnnnnnnnnnnnnnnnnnnnnnnnnnnnnnnnnnnnnnnnnnnnnnnnnnnnnnnnnnnnnnnnnnnnnnnnnnnnnnnnnnnnnnnnnnnnnnnnnnnnnnnnnnnnnnnnnnnnnnnnnnnnnnnnnnnnnnnnnnnnnnnnnnnnnnnnnnnnnnnnnnnnnnnnnnnnnnnnnnnnnnnnnnnnnnnnnnnnnnnnnnnnnnnnnnnnnnnnnnnnnnnnnnnnnnnnnnnnnnnnnnnnnnnnnnnnnnnnnnnnnnnnnnnnnnnnnnnnnnnnnnnnnnnnnnnnnnnnnnnnnnnnnnnnnnnnnnnnnnnnnnnnnnnnnnnnnnnnnnnnnnnnnnnnnnnnnnnnnnnnnnnnnnnnnnnnnnnnnnnnnnnnnnnnnnnnnnnnnnnnnnnnnnnnnnnnnnnnnnnnnnnnnnnnnnnnnnnnnnnnnnnnnnnnnnnnnnnnnnnnnnnnnnnnnnnnnnnnnnnnnnnnnnnnnnnnnnnnnnnnnnnnnnnnnnnnnnnnnnnnnnnnnnnnnnnnnnnnnnnnnnnnnnnnnnnnnnnnnnnnnnnnnnnnnnnnnnnnnnnnnnnnnnnnnnnnnnnnnnnnnnnnnnnnnnnnnnnnnnnnnnnnnnnnnnnnnnnnnnnnnnnnnnnnnnnnnnnnnnnnnnnnnnnnnnnnnnnnnnnnnnnnnnnnnnnnnnnnnnnnnnnnnnnnnnnnnnnnnnnnnnnnnnnnnnnnnnnnnnnnnnnnnnnnnnnnnnnnnnnnnnnnnnnnnnnnnnnnnnnnnnnnnnnnnnnnnnnnnnnnnnnnnnnnnnnnnnnnnnnnnnnnnnngagcacatgcagacacaccaggccgtcccctctttgagctcccagaagccaagagtgtttaaatgtgacacttgtgagaaggcgtttgccaaaccaagccagctggagcgccacagccgcatccacacaggnnnnnnnnnnnnnnnnnnnnnnnnnnnnnnnnnnnnnnnnnnnnnnnnnnnnnnnnnnnnnnnnnnnnnnnnnnnnnnnnnnnnnnnnnnnnnnnnnnnnnnnnnnnnnnnnnnnnnnnnnnnnnnnnnnnnnnnnnnnnnnnnnnnnnnnnnnnnnnnnnnnnnnnnnnnnnnnnngagctctgcaggagtccgcaggtcacccagagcaggacggggaggagctgagccggaccctccacctggaggaggtggtgcaggaggccgccggcgagtggcagaccctcacccatgtcttctgacgtgagtcggaagtacacctttaagaatgtttctgaagttacattttgtgaatagcaaagcacttgaaatctctgttttaaaacttcaagtgttaaaaatgttaccacaatagttttttagctataaagttatctaaagaatcattgtctttcagagactcataggaaaaaaactgggaaaagtgtcaccgcgttgttctcttctgtctacaaatcactgaactcaggtactacggcaggcaatttcctccttggtctcctccgtggctagtgcgtctagttcacaaagcaattaactgggtcttactatcattgtggtgtgatttctttgtattagcaaagacgaaaaagctaacatggaaaaagtacgtcagatttcccttcatgcttccggttataagaagcatagcttgaaagcaagtttaagattggggcatgaagttcagnnnnnnnnnnnnnnnnnnnnnnnnnnnnnnnnnnnnnnnnnnnnnnnnnnnnnnnnnnnnnnnnnnnnnnnnnnnnnnnnnnnnnnnnnnnnnnnnnnnnnnnnnnnnnnnnnnnnnnnnnnnnnnnnnnnnnnnnnnnnnnnnnnnnnnnnnnnnnnnnnnnnnnnnnnnnnnnnnnnnnnnnnnnnnnnnnnnnnnnnnnnnnnnnnnnnnnnnnnnnnnnnnnnnnnnnnnnnnnnnnnnnnnnnnnnnnnnnnnnnnnnnnnnnnnnnnnnnnnnnnnnnnnnnnnnnnnnnnnnnnnnnnnnnnnnnnnnnnnnnnnnnnnnnnnnnnnnnnnnnnnnnnnnnnnnnnnnnnnnnnnnnnnnnnnnnnnnnnnnnnnnnnnnnnnnnnnnnnnnnnnnnnnnnnnnnnnnnnnnnnnnnnnnnnnnnnnnnnnnnnnnnnnnnnnnnnnnnnnnnnnnnnnnnnnnnnnnnnnnnnnnnnnnnnnnnnnnnnnnnnnnnnnnnnnnnnnnnnnnnnnnnnnnnnnnnnnnnnnnnnnnnnnnnnnnnnnnnnnnnnnnnnnnnnnnnnnnnnnnnnnnnnnnnnnnnnnnnnnnnnnnnnnnnnnnnnnnnnnnnnnnnnnnnnnnnnnnnnnnnnnnnnnnnnnnnnnnnnnnnnnnnnnnnnnnnnnnnnnnnnnnnnnnnnnnnnnnnnnnnnnnnnnnnnnnnnnnnnnnnnnnnnnnnnnnnnnnnnnnnnnnnnnnnnnnnnnnnnnnnnnnnnnnnnnnnnnnnnnnnnnnnnnnnnnnnnnnnnnnnnnnnnnnnnnnnnnnnnnnnnnnnnnnnnnnnnnnnnnnnnnnnnnnnnnnnnnnnnnnnnnnnnnnnnnnnnnnnnnnnnnnnnnnnnnnnagagagtagttttattataaatattgtatggactttgtatattaagagaggagctcatttcagattcctaaaggaacagacattttactgttattttgaaagggcatcttttgattttgttgttgttgttcactttcggcatatgtatataagtaatattgatggtgatatgaaaacttttgttatgtgaaaatatttaagtcagaaaattgttaaataatattacttcttttccaaactgctttgtgtattgtatatttttttaagaaaaagaaaagccttatttgacttattcttgtgatactggacttcttaccaagcccgaggtttccttccttgaatgtcagcgtgtaaacctgacgcatatttagaataattgtaattgtgctagagttttaaaggttctgcttttaatgcactttttattttataattttgtattgaaatattttagaaatgttgattaattttggtgaacgaatatccccaaagttgaaattattggaattttaaacttttgttcttgctcggttatttattttgattttagcattaaatgtcatctcaggacatctctaaaaggggttgtttaattcctaattgtatagaaagctagtttggtgaactgtattggtcaattgactgtttaaggccttaacaggtgaatctagagcctacttttattttggttaaagaaaaagaaaatatcagtaattcaattttgtgtctattctccatttattagc

SEQ ID NO: 28624 - DNA, 102 bp, Macaca Mulatta
tagaccttagctggatctccaaaatacaagtgaatcacccggcagttctgaggcgtgcggaacaaatccaggctcgcagaacggtgaaaaaggagtggcagg

SEQ ID NO: 28625 - DNA, 130 bp, Macaca Mulatta
caagtctcctggcttgtgaaggcctagcaggtgtgagtttggttcccactgcagccagcaagaagatgatgctgagccagattgtcggcaagcaggccgagaatggcgagcgggcaggtagccctgatgt

SEQ ID NO: 28626 - DNA, 775 bp, Macaca Mulatta
  misc_feature (1)...(775): n = A,T,C or G
agagccttactaagtccatgcggtggagtggggcagccatgtctacttcttcatcggggagatcgcgatggagtttaannnnnnnnnnnnnnnnnnnnnnnnnnnnnnnnnnnnnnnnnnnnnnnnnnnnnnnnnnnnnnnnnnnnnnnnnnnnnnnnnnnnnnnnnnnnnnnnnnnnnnnnnnnnnnnnnnnnnnnnnnnnnnnnnnnnnnnnnnnnnnnnnnnnnnnnnnnnnnnnnnnnnnnnnnnnnnnnnnnnnnnnnnnnnnnnnnnnnnnnnnnnnnnnnnnnnnnnnnnnnnnnnnnnnnnnnnnnnnnnnnnnnnnnnnnnnnnnnnnnnnnnnnnnnnnnnnnnnnnnnnnnnnnnnnnnnnnnnnnnnnnnnnnnnnnnnnnnnnnnnnnnnnnnnnnnnnnnnnnnnnnnnnnnnnnnnnnnnnnnnnnnnnnnnnnnnnnnnnnnnnnnnnnnnnnnnnnnnnnnnnnnnnnnnnnnnnnnnnnnnnnnnnnnnnnnnnnnnnnnnnnnnnnnnnnnnnnnnnnnnnnnnnnnnnnnnnnnnnnnnnnnnnnnnnnnnnnnnnnnnnnnnnnnnnaggcaccagctgactcgagtggctgtggacgtgggagccggcccctggggcaaccagactgttgtcttcctgggttctgaggcagggaccgtcctcaagttcctcgtccggcccaacgccagtacctcagggacatctgggctcagtgtcttcctggaagagtttgagacctaccggccagacaggt

SEQ ID NO: 28627 - DNA, 693 bp, Macaca Mulatta
cacgaggctcacaacgactagtgcaaccagtaagttgatccatccagatgaggatatatccctgcgaagagagaagggcacagttacctaaatatcaacgtaatcttcctcggccaggacaggcccccatcggtaatccaccagttggaccaattggaggtatgatgccaccacagccaggcatcccacagcaacaaggaatgagacccccaatgccacctcatggtcagtatggtggtcatcatcaaggcatgccaggataccttcctggtgctatgcccccgtatgggcagggaccgccaatggtgcccccttaccagggtgggcctcctcgacctccgatgggaatgagacctcctgtaatgtcgcaaggtggccgttactgatcttacttcatccagtctaataggtttggagattaaaccttttctcaacttgtgctgtttatatagccaagcttccgtcaataaggcttcattgtgactttaacaaacattatcttcccacataccaggaactattggacatttattttacatgggaaaaattatttggaataataaagcaggaacttttcctgaagttgcaatttatactgtatggcttctttttcatgtttcatctaggttttcagaagtgaagtatagtaacattggttcgttcaattgtgaaggcgctggaattacatgaaca

SEQ ID NO: 28628 - DNA, 532 bp, Macaca Mulatta
  misc_feature (1)...(532): n = A,T,C or G
tgtggactgaatctgctgcctcgatcatatgaagaaagtgcaaaaggaacttttatatatttgacagtctaggaaattgtctattcctggatatgatgactgtagtactcttgcttaaggcaagagtttcaaatttactgtcgaaataaacccaactcttcnnnnnnnnnnnnnnnnnnnnnnnnnnnnnnnnnnnnnnnnnnnnnnnnnnnnnnnnnnnnnnnnnnnnnnnnnnnnnnnnnnnnnnnngnnnnnnnnnnnnnnnnnnannnnnnnnnnnnnnnnnnnnnnnnnnnnnnnnnnnnnnnnnnnnnnnnnnnnnnnnnnnnnnnnnnnnnnnnnnnnnnnnnnnnnnnnnnnnnnnnnnnnnnnnnnnnnnnnnnnnnnnnnnnnnnnnnnnnnnnnnnnnnnnnnnnnnnnnnnnnnnnnnnnnnnnnnnnnnnnnnnnnnnnnnnnnnnnnnnnnnnnnnnnnnnnnnnnnnnnnnnnnnnnnnnnnnnnnnnnnnnnnnnnnnnnnnnnnnnnnnnnnnnn

SEQ ID NO: 28629 - DNA, 1071 bp, Macaca Mulatta
  misc_feature (1)...(1071): n = A,T,C or G
gaagccgatgccagtggatgattcagattgcagctctgatgataccagcatctctgccttctcatccaccttgctgaaccccatcaaattagctgtgacccagcccaacagcagcttctttgcagggatgctggagggggagctgaacaaactcagcttctccccgatggccaagaatacagaaaaggaggacctggccctcggcccctgcccatgcccatctaagtgccaaatggccacgaggggcctgctggaccttgacaaccctgagctggagacagaaacctcctcaacgcactcggaatcttctgtggttgtggacctgccggacacccccttcatcttcgagcacactgtcagcaattccacagctgtgnnnnnnnnnnnnnnnnnnnnnnnnnnnnnnnnnnnnnnnnnnnnnnnnnnnntgttgcaggaggcggccgagacacaggagaatgagttgcccaaggcaaagaatcgtccatggatcttcaacaagatcttgggcaccactgtcaagctgatggagctgaagcctaacacatgttactgcctcactgtccgtgcagccaacacagctggggtggggaagtggtgcaagccctacaaantttgcaaccctggccactgacttcagcagctttcctgagaacaaccccatcccagatcacgtgcgggcgcaaggaaccccagcgaaagatcgtgtccatcgggctggaggagatgcggaggctggaggatctggaatacctatttccctattaacagggagggccccaggacacccctcaccaactttcagctttggccccgggcccttaggaaccagaactgtgagacttaccgtaccaccagcaccatgcaggcccaagggcctggcagagtggtatgggaaccccacccctgggctggggccaaggctagatagataggggccccattcacccggagacatcccaggccaggccatgctaggctcagccactgcccacagctgctagactccgtcctcccacaaatctgggctgggtccaggtccctcattaaagaactgcaggccatctagca

SEQ ID NO: 28630 - DNA, 2738 bp, Macaca Mulatta
  misc_feature (1)...(2738): n = A,T,C or G
gaggggctaggcatggccgtaggggatggggaagggaacatcctccccatcatgcagcttattatgcagaacctactctccaaggatgtgctgtacccatcactgaaggagatcacagaaaagnnnnnnnnnnnnnnnnnnnnnnnnnnnnnnnnnnnnnnnnnnnnnnnnnnnnnnnnnnnnnnnnnnnnnnnnnnnnnnnnnnnnnnnnnnnnnnnnnnnnnnnnnnnnnnnnnnnnnnnnnnnnnnnnnnnnnnnnnnnnnnnnnnnnnnnnnnnnnnnnnnnnnnnnnnnnnnnnnnnnnnnnnnnnnnnnnnnnnnnnnnnnnnnnnnnnnnnnnnnnnnnnnnnnnnnnnnnnnnnnnnnnnnnnnnnnnnnnnnnnnnnnnnnnnnnnnnnnnnnnnnnnnnnnnnnnnnnnnnnnnnnnnnnnnnnnnnnnnnnnnnnnnnnnnnnnnnnnnnnnnnnnnnnnnnnnnnnnnnnnnnnnnnnnnnnnnnnnnnnnnnnnnnnnnnnnnnnnnnnnnnnnnnnnnnnnnnnnnnnnnnnnnnnnnnnnnnnnnnnnnnnnnnnnnnnnnnnnnnnnnnnnnnnnnnnnnnnnnnnnnnnnnnnnnnnnnnnnnnnnnnnnnnnnnnnnnnnnnnnnnnnnnnnnnnnnnnnnnnnnnnnnnnnnnnnnnnnnnnnnnnnnnnnnnnnnnnnnnnnnnnnnnnnnnnnnnnnnnnnnnnnnnnnnnnnnnnnnnnnnnnnnnnnnnnnnnnnnnnnnnnnnnnnnnnnnnnnnnnnnnnnnnnnnnnnnnnnnnnnnnnnnnnnnnnnnnnnnnnnnnnnnnnnnnnnnnnnnnnnnnnnnnnnnnnnnnnnnnnnnnnnnnnnnnnnnnnnnnnnnnnnnnnnnnnnnnnnnnnnnnnnnnnnnnnnnnnnnnnnnnnnnnnnnnnnnnnnnnnnnnnnnnnnnnnnnnnnnnnnnnnnnnnnnnnnnnnnnnnnnnnnnnnnnnnnnnnnnnnnnnnnnnnnnnnnnnnnnnnnnnnnnnnnnnnnnnnnnnnnnnnnnnnnnnnnnnnnnnnnnnnnnnnnnnnnnnnnnnnnnnnnnnnnnnnnnnnnnnnnnnnnnnnnnnnnnnnnnnnnnnnnnnnnnnnnnnnnnnnnnnnnnnnnnnnnnnnnnnnnnnnnnnnnnnnnnnnnnnnnnnnnnnnnnnnnnnnnnnnnnnnnnnnnnnnnnnnnnnnnnnnnnnnnnnnnnnnnnnnnnnnnnnnnnnnnnnnnnnnnnnnnnnnnnnnnnnnnnnnnnnnnnnnnnnnnnnnnnnnnnnnnnnnnnnnnnnnnnnnnnnnnnnnnnnnnnnnnnnnnnnnnnnnnnnnnnnnnnnnnnnnnnnnnnnnnnnnnnnnnnnnnnnnnnnnnnnnnnnnnnnnnnnnnnnnnnnnnnnnnnnnnnnnnnnnnnnnnnnnnnnnnnnnnnnnnnnnnnnnnnnnnnnnnnnnnnnnnnnnnnnnnnnnnnnnnnnnnnnnnnnnnnnnnnnnnnnnnnnnnnnnnnnnnnnnnnnnnnnnnnnnnnnnnnnnnnnnnnnnnnnnnnnnnnnnnnnnnnnnnnnnnnnnnnnnnnnnnnnnnnnnnnnnnnnnnnnnnnnnnnnnnnnnnnnnnnnnnnnnnnnnnnnnnnnnnnnnnnnnnnnnnnnnnnnnnnnnnnnnnnnnnnnnnnnnnnnnnnnnnnnnnnnnnnnnnnnnnnnnnnnnnnnnnnnnnnnnnnnnnnnnnnnnnnnnnnnnnnnnnnnnnnnnnnnnnnnnnnnnnnnnnnnnnnnnnnnnnnnnnnnnnnnnnnnnnnnnnnnnnnnnnnnnnnnnnnnnnnnnnnnnnnnnnnnnnnnnnnnnnnnnnnnnnnnnnnnnnnnnnnnnnnnnnnnnnnnnnnnnnnnnnnnnnnnnnnnnnnnnnnnnnnnnnnnnnnnnnnnnnnnnnnnnnnnnntcacttacccctaggttaaaacttttcaccccttgaagaccatacatgttttatggtattaactaggaaggaaatgttcttaaggcctcaggctatttgggaaattccaactcttataccttaccagagcatggaagagccaggatctgaatgtgaaacttctctgttctgcaagagatggagaaagtacaggtagacttgtgatatagtcatgtggccttagtgtcactattttctccttaaagctccagccaaaaactggacaaggatagagaggaggagggaagaacaaaagagcccttctctatgaaccttgtgcctcctgtcctaccagttttcttttacagattctcacttctgctagcctagccagggattactccaggaatctaaatagatgccctagtccactttagctttattcccaaggtactcatttttattttgatttgatagaatgtgagcaagttgacctcaggtcacactttgttccaaaaacttttggaattattccaggacttgtggtggaagtatggtactctagggcagtctttctcaaactatatatggtaaaggaccaggttttttgttttccagtccttcatttatcaatatgcattcctattgcctatgacaagtatggagttcacactgtgtgctgcccaccaggcaagtttgacagcacccaaactggccagactgttctgtaggttaagtccattgatcatgtacttggatatcacagcaacattaaaacgctaaaaagtttttaaacactttcaat

SEQ ID NO: 28631 - DNA, 918 bp, Macaca Mulatta
ggaagagtagctaagtaccaagattgagaagtaagttgggttacactcaggtgaaagcttaagtccattttatttctagaacccacatgctttgagcactttttctatgttaagctgcaagtaggtcttcagtgtcagtgaacatggtgaacgtatttggcagtgttcagactatagctggccctgaaagcagatggctgccacacctttgctggtgcgctagaaccacttgggtaaacagtaggatcgtttcaagaatgctggctcttccttctagaaccagtgggtcctctatcacctgccggaccctttcgtgaaaaatgtgaagatgatctttttactgatgagaattcattaaaaaaaataacttttgggtactttgcttggttgcaggatgaatttgacaagctgaggcctctctgctataccaacacggacatcttcctcctctgctttagtgtcgtgagcccctcatccttccagaatgtcagcgagaaatgggtgccggagattcgatgccactgtcccaaagcccccatcatcctagttggaacgcagtcagatctcagagaagacgtcaaaatcctcattgagttggacaaatgcaaagaaaagccagtgcctgaagaggcggctaagctgtgcgccgaggaaatcaaagccgcctcctacatcgagtgttcagccttgactcaaaaaaacctcaaagaggtctttgatgcagccatcgtcgctggcattcaatactcggacactcagcaacagccaaagaagtctaaaagcaggactccagataaaatgaaaaacctctccaagtcctggtggaagaagtactaatgtttcgtatgatgctggcaagacacccagaaaggctatatgagagaaatcgatattagtggctatattagctgaaacaac

SEQ ID NO: 28632 - DNA, 175 bp, Macaca Mulatta
cagacttgcttctctgctaggcagctggtggagatatttctacagaagagcctctcacccatttctaaggaggactttaagcaaatgagtccagggatcatccagcaactcctcagctgctcctgccacttgcccaaggaccaacaagcaaagctgccacccaccactctggaga

SEQ ID NO: 28633 - DNA, 645 bp, Macaca Mulatta
  misc_feature (1)...(645): n = A,T,C or G
aggtctgtaactggttcatcaacgcccgccgcaggctcctccctgacatgctgagaaaggatggcaaagatccaaatcagttcacaatttcccgccgtggggccaagatttctgacacgagctctgtggagtccgtgatgggcatcaaaaacttcatgccagctctagaggagaccccttttcattcctgtacagctgggccaaacccaaccctcgggaggccactgtctcctaagccgtcatccccgggatcagttttggctcgtccgtcggtgatctgccataccactgtgactgcattgaaagatgnnnnnnnnnnnnnnnnnnnnnnnnnnnnnnnnnnnnnnnnnnnnnnnnnnnnnnnnnnnnnnnnnnnnnnnnnnnnnnnnnnnnnnnnnnnnnnnnnnnnnnnnnnnnnnnnnnnnnnnnnnnnnnnnnnnnnnnnnnnnnnnnnnnnnnnnnnnnnnnnnnnnctccaccggacctcaaccagtactttagtggatttcagcttctagtggatgttgcactcaaacgggctgcagagatggagcttcaggcaaaacttacagcttaacccattttcaagcaaaacagttctcagaaatgtcatgattgccggggtgaaggcaagagatgaattgc

SEQ ID NO: 28634 - DNA, 704 bp, Macaca Mulatta
aggtgggtggcggtggcgctgttttccagtagcccccgacacaggccgacccctcccggtcttgccctcccggaggccgcgtctagtttgcacccccctacccacagcgagcagtgcctgctggcgcccccggggcagccctgggccagcgggaggaggccagaactacccgagattcgctcccgagggagctcctctgtgcctgccccagggcacagccacttggggtactggggtcagagttcgcccccagagccgggccctgtttccttggacggggcaggggaggacactctgagccccttgtgacctgcttcactatgtcctggccgtctcggctgcccatggggaaacaggctgggagacgagttgggtaactgtcccgggctggagagccggcaactcctagtcacaccccaccaccccaccccaagccacagtgagcttggtgcactccgccactcccaagctgccctgtgtctgctgtacagtttacaaaggactgtcctttttattctgtctttggtcgtttctaaactcaggccccagcctcttgtatttctgttcttggtgatcttgactttccagagttcagttattctgagattgaggtcgggggcggagggctggtctgggagtctcggagtcctcctggaggctctctgagagtggggaagagccgagaccttactctgcggttcaag

SEQ ID NO: 28635 - DNA, 499 bp, Macaca Mulatta
tgtctttgtctcctacatgttcatcatttctgccatcctgaggatgcattcagctgagggaagacagaagtctttctcgacgtgtggctcccacatgctggcagtcaccatattctatgggacccttatttttatgtacttacagcctaactctaaccatgccctggacacagacaagatggcctctgtcttctacacagtggtcattcccatgttgaatcccttaatctatagcctccggaataaggaggtgaaagaagctctgaagaaagtcattatcaataaaacccagacttttgtgtttataaaattaagaaagtaacttgaggaaaggaaaaacggacttctttcatggtatgatttttttttcccagtataagttatcaagattcctgtttcttaatatgtgatcgatgcatatatttttgctgtgtaatacaattttctagagaatttctcttagaatgttaggtataaaagtaactataagaatttacac

SEQ ID NO: 28636 - DNA, 542 bp, Macaca Mulatta
  misc_feature (1)...(542): n = A,T,C or G
aggtaaatgaatataaagaaaatcaaaacatcgcttatgtgtctctgagaccagtacagactacagttttaataaaaacagctaaggtctatctagcccccttttcactcagtaattaccagctagaccagcttatgtgccccaaatccctattagaaaagaattctaacaatgaagttgcgtgtaagaagactaaaataaagaaaacttgcagaaggattatacctccaaagaagaaaaccacatctaagtctgaatccgtgctgcaaaattcagcctcagctgttcatactgaaagtaacaagctacaatccaagagaacggcagatgcgatgaatctcagtgttgatgtnnnnnnnnnnnnnnnnnnnnnnnnnnnnnnnnnnnnnnnnnnnnnnnnnnnnnnnnnnnnnnnnnnnnnnnnnnnnnnnnnnnnnnnnnnnnnnnnnnnnnnnnnnnnnnnnnnnnnnnnnnnnnnnnnnnnnnnnagtctgctgcaagactccgtgaaatcatagagaagagacagcctcctaaatcca

SEQ ID NO: 28637 - DNA, 925 bp, Macaca Mulatta
  misc_feature (1)...(925): n = A,T,C or G
aatggacaagcaggcaaagccgtgtgatctccagactgcaaccgcggggtccttcgcctctccttttgctgcgctggctctctgccccactgagcttgtgaagtgccggctacagaccatgtatgaaatggagatgtcagggaagatagcaaaaagccataatacaatttggtctgtcgtgaagggtatccttaaaaaggatggccccttgggcttctaccatggactctcgagtactctacttcaagaagtaccgggttatttcttttactttggtggctatgaactgagccgatcgtttttcgcatcagggagatcaaaagatgaactaggccctgtccatttgatgttaagtggtggagttgctggaatttgcctctggcttgtcgtgttcccagtggattgtattaaatccagaattcaagttctttccatgtatggaaaacaggcaggatttattggtactctcttaagtgttgtgagaaatgaaggaatagtagccttatattctggactgaaagctactatgattcgagcaatccctgccaatggggcactgtttgtggcctatgaatacagcaggaagatgatgatgagccagttggaagcatactgaagtgtcttggtgaacctggatctgagtctgtgagtttgagtactacagttcatcacaggtttcaacagaatacaagaccaatgctgaattttgacttcatgggaattttggttctatcttcccttcttctaccctaaatcttaactttatgaaagggcctctattttacatcatataatttctgcccataattgtattgaaataggaaagttgctgctcttgcacttgctggaatgtacaggatgngctggttggccctatgtacctaatccgaaaaactaaatatcacgctgtcagggcctttgcata

SEQ ID NO: 28638 - DNA, 767 bp, Macaca Mulatta
  misc_feature (1)...(767): n = A,T,C or G
ggattctcaatcaggaggatgactcaaaagagaaaaccaaaatcctaatgaactccagtagagacaattcccacccgtttgtaggcctggcttttaaactggaggtaggtcgatttggacaattaacttacgttcgcatttaccagggagagctaaagaagggtgacaccatctataacacaaggacaagaaagaaagtacgattgcaacggctgactcgcatgcatgccgacatgatggaggatgttgaggaagtatatgctggagacatctgtgcattgtttggcattgactgtgctagtggagacacgttcacaaacaaagccaacagtgacctttccatggagtcaattcatgttcctgatcctgtcatttcaatagcaatgaagccttctaacaagaacgatctggaaaagttttcaaaaggtattggcaggtttacaagagaagatcccacatttaaagtacactttgacactgagaacaaagagacaattgtatctggaatgggagaattacacctggaaatctatgctcagaggatggaaagagaatatggctgtccttgtatcacaggaaagccaaaagttgcctttcgagagaccattactgcccctgtccccgtttgagtttacacataaaaaacaatcaggtggtgcaggccagtatgggaaaagtaataggtggtcctggaagcctctggnacccggagggactacactaaatttggagtttttcagatgaaacattccggaatcaaaataatc

SEQ ID NO: 28639 - DNA, 1993 bp, Macaca Mulatta
  misc_feature (1)...(1993): n = A,T,C or G
cggatcctagacgcttttgacggctgttcctccccagannnnnnnnnnnnnnnnnnnnnnnnnnnnnnnnnnnnnnnnnnnnnnnnnnnnnnnnnnnnnnnnnnnnnnnnnnnnnnnnnnnnnnnnnnnnnnnnnnnnnnnnnnnnnnnnnnnnnnnnnnnnnnnnnnnnnnnnnnnnnnnnnnnnnnnnnnnnnnnnnnnnnnnnnnnnnnnnnnnnnnnnnnnnnnnnnnnnnnnnnnnnnnnnnnnnnnnnnnnnnnnnnnnnnnnnnnnnnnnnnnnnnnnnnnnnnnnnnnnnnnnnnnnnnnnnnnnnnnnnnnnnnnnnnnnnnnnnnnnnnnnnnnnnnnnnnnnnnnnnnnnnnnnnnnnnnnnnnnnnnnnnnnnnnnnnnnnnnnnnnnnnnnnnnnnnnnnnnnnnnnnnnnnnnnnnnnnnnnnnnnnnnnnnnnnnnnnnnnnnnnnnnnnnnnnnnnnnnnnnnnnnnnnnnnnnnnnnnnnnnnnnnnnnnnnnnnnnnnnnnnnnnnnnnnnnnnnnnnnnnnnnnnnnnnnnnnnnnnnnnnnnnnnnnnnnnnnnnnnnnnnnnnnnnnnnnnnnnnnnnnnnnnnnnnnnnnnnnnnnnnnnnnnnnnnnnnnnnnnnnnnnnnnnnnnnnnnnnnnngagcgcgaacaaaggggtgtccaagatggacgccgtgaggagctaggtggccagagtgaggagctgaaaaaggaagtgggcggcatggagcgcgaacaaaggggtgtccaagatggacgccatgaggggctacgcggccagagtgaggannnnnnnnnnnnnnnnnnnnnnnnnnnnnnnnnnnnnnnnnnnnnnnnnnnnnnnnnnnnnnnnnnnnnnnnnnnnnnnnnnnnnnnnnnnnnnnnnnnnnnnnnnnnnnnnnnnnnnnnnnnnnnnnnnnnnnnnnnnnnnnnnnnnnnnnnnnnnnnnnnnnnnnnnnnnnnnnnnnnnnnnnnnnnnnnnnnnnnnnnnnnnnnnnnnnnnnnnnnnnnnnnnnnnnnnnnnnnnnnnnnnnnnnnnnnnnnnnnnnnnnnnnnnnnnnnnnnnnnnnnnnnnnnnnnnnnnnnnnnnnnnnnnnnnnnnnnnnnnnnnnnntccagtgacggcctcttgggaggctgaggccccagccccttttctcttcaaggcggattcactaataccccaacacaacagaggggagcgggactctgtcctaaacactaaagtccaaaagcccccactggaacacagggcctaccaagttcatgttttgagggagaccaagctttccgtgatgatagtgcggtgaaacaattgatgggtcagaacacagcagctgagaaacaatggagcaggtgctgtcaaaatcccagccccagaaaggctcacctaaggccgggcaacccaaatgttctcgggactgttcgtacttaaccctggtttctgcttaggggatgttggtgggacaatatgcatatggatgtctatgtgggatttgctgcaagagcacaacacagcccttgacctatgcaagtgccagagtgtctgaacccagcttctactcctgttaatgatcacgggggcctcaatgcacaaccattgtgcatggcagctggagtatggaatagtgaatggtatccagagaggcaggtctacagtggcatatgggatttcctggtacttcttccttaatagaaagtcttttcacagatcatgacatcaggtcagctccagttctcattgggaccaataaaacaatagaagcaacaaccataaagacttaagaggacaaaggaaacagacctcactgtgtgtcttcaagatctgttcacatagttgcaggaagttgttatagacaaagtacattactaaaaaatgaagcccacccaggacatcacagcgatgaaagaactatttctggtaactggaccaggcgagagctacactggagaagagccagtgctgccctctctt

SEQ ID NO: 28640 - DNA, 607 bp, Macaca Mulatta
tcttctttccaattcttctccattcttccacttggaaccattcctggtaaggacaggcaggtgccctctttccatcagaggacacctgtgctggagagcaacacagataggatggtctctgccatgaacttgaggccaggaacctcctcactgaaaattacagtatgataactttgcaaatggtggttgttcttccaagactccagccctgattgcgcagaactgagaggcatgtgaagggaaggaagaggaagagtgtgaaacattgaagagagagctgagtgaactgaagagtgaggatatgggtagccctaacccaaacctggagatggggagaaacctacagaatactagccagagctccaccttgtcttggcagcctactagggaactggggaagcaagaaatgaaagctgggcaacatgcctgctttagaatgtcttccttctacttacacatcttccacaggtctcagaatttccttcctctcatcctttttctcctgtcttcatatctaccagagtatccactgtttattcaacaactactacttgatggtcagatacaaacaaacaagctaggtgctaattaataatgataagagttt

SEQ ID NO: 28641 - DNA, 319 bp, Macaca Mulatta
catttgttgtgtaatcacatctgtgatgcttctaattcctcatatactgtgattcgcataaaattgtgtttgtatttactgtgtggtgtaaatctagagatagtttgtatgtgaaaaggggatcacaaaagagataaagcatctcttatgctattttcttaaaaataaaccttcacagaatggctgcccttttccattcatctctattccattgtagctgaatctgtgcagttgaaacgaaaatgtttcggagtcagcgagtacaaagcactgtgtaaggatctggggtacactgcttcccttactgggtcaacactta

SEQ ID NO: 28642 - DNA, 775 bp, Macaca Mulatta
ggggttgcccaggtttttctatctgaaatacctagtgacccaaagctcttcagacatcataataaactgcgactctgctttaaagattttactaaaaggtgtgaagatgccttaagaaaaaataagagcttaattgggccggatcaaaaggagtatcaaagggaactggagagaaattatcatcgccttaaagaggccttacagccactgatcaacagaaagatccctcagttatacaaggcagtattgcctgtcacctgccacagagattccttcagtcgaatgagccttcgcaaaatggatctctaaactgaatgcacttgttttattcatctgcaaagagccatgtattcaacatcgagtttgaaaagatctattggaaaacaacatggaatggaattctggaattattattcattgaagaatgcagtggccaagaaaatatcaaatgtagattgttaacgcttgagaatcatggctatagtttctaatgttctggtaacaagctgttgtcttttaagacattttaatgactcaaaggtacactatacatttaccattatttataccatagctaacgttaaatttatttactttaagttcgtattttttaaatttatattaccatttatagattcattttggaaccatttttaaatgtagtaatgctttatttttaaggtactatttaaatatgtgaattgtttacactaatttttactgagtggggaactttcaaaatttttatttattggaccattgcagagaaacaact

SEQ ID NO: 28643 - DNA, 453 bp, Macaca Mulatta
agaatcttatgcgcaagggccttatatgacaatgtcccagagtgtgccgaggaactggcctttcgcaagggagacatcctgaccgtcatagagcagaatacagggggactggaaggatggtggctgtgctccttacatggtcgacaaggcattgtcccaggcaaccgggtgaagcttctgattggtcctgtgcaggagaccacctccagtcacgaccagcctgcctctggactgatgcagcagacctttggccaacagaagctctatcaagtgccaaacccacaggctgctccccgagacaccatctaccaagtgccaccttcctaccaaaatcagggaatttaccaagtccccactggccatggcacccaagaacaagaggtatatcaggtgccaccatcagtgcagagaagcattgggggaaccagtgggccccacgtgggtaaaaaggtg

SEQ ID NO: 28644 - DNA, 1104 bp, Macaca Mulatta
atgacagccaccccaacacgtgatgtcatggccagtagggaagatgagctgaggaactgtgtggtatgtggggaccaggccacaggctaccacttcaacgcgctgacttgtgagggctgcaagggtttcttcaggagaacagtcagcaaaagcattggtcccacctgcccctttgctggaagctgtgaagtcagcaagattcagaggcgccactgcccagcctgcaggttgcagaagtgcttagatgctggcatgaggaaagacatgatactgtcggcagaagccctggcattgcggcgagcaaagcaggcccagcggcgggcacagcaaacacctatgcaactgagtaatgagcaagaagagttgatccagacactcctgggggcccacacccgccacatgggcaccatgtttgaacagtttgtgcagtttaggcctccagctcatctgttcatccatcaccagcccttgcccaccctggcgcctgtgctgcctctggtcacacacttcgcagacgtcaacacgttcatggtacagcaagtcatcaagtttaccaaggacctgcctgtcttccgttctctgcccattgaagaccagatctcccttctcaagggagcagctgtggaaatctgtcatatcgtactcaataccactttctgtctccaaacacaaaacttcctctgcgggcctcttcgctacacaattgaagacgcagcccgtgtatctcccgcagtggggttccaggtagagtttttggagttgctctttcacttccatggaacactacgaaaactgcagctccaggagcctgagtatgtgctcttggctgccatggccctcttctctcctgaccgacctggagttacccagagacatgagattgatcagctgcaagaggagatggcactgactctgcaaagctacatcaagggccagcagcaaaggccccgggatcggtttctgtatgcgaagttgctgggcctgctggctgagctccggagcattaatgaggcctacgggtaccaaatccagcacatccagggcctgtctgccatgatgccattgctccaggagatctgcagctgaggccatgctcacttcctt

SEQ ID NO: 28645 - DNA, 258 bp, Macaca Mulatta
gtctcgacacaggcgattttcttatagccagtctaaatctcgttccaaatcattaccaaggcggtctacctcagcaaggcagtcaagaactccaagaaggaattttggctctagaggacggtcaaggtccaagtccttacaaaaaaggtccaagtcaataggaaaatcacagtcaagttcacctcaaaagcagactagctcaggaacaaaatcaagatcacatggaagacattctgactcaatagcaagatccccgtg

SEQ ID NO: 28646 - DNA, 634 bp, Macaca Mulatta
gaacagccggttctttcctggccggatccggcgggtgattggggactttggggtgcccatcgccatcctcatcatggtgcttgtggattacagtattgaggacacctatacccagaagctgagcgttcccagtggattctcggtgactgccccagaaaagaggggctgggtcatcaaccctctgggggagaagagccccttccctgtgtggatgatggttgccagcctgctgcctgccatcctggtcttcatcctcattttcatggagacacagatcaccacgctcatcatctccaagaaggagcgcatgctgcagaagggctccggcttccacctggacctgctgctcattgtggccatgggcggcatctgtgccctctttggcctgccctggttggctgctgccactgtccgctccgtcactcacgccaacgcgctcactgtcatgagcaaggctgtggcacctggggacaagcccaagattcaggaggtcaaggaacagcgggtgacagggctgctggttgccctgcttgtgggcctctccatagttatcggggatctgctccggcagatccccctggctgtgctctttggaattttcctgtacatgggagtcacctcccttaatgggatc

SEQ ID NO: 28647 - DNA, 386 bp, Macaca Mulatta
gtgctgagtgcgtgtgcccctgatgtcatgattgggtttgacttcttggctcattcttttactcttcaacttcagagttttagaaatgacagcaggctctgattaccgtggttctctgaatgcagtatccagcagtgatgagaatgttatttcttgaatgccactgtgatttccattgtgggattccaggggttgtgtggttttgttaagagcctttctttccttccaggcagccagaggctaggctatttgataggaggatatcctctcttctcattctgtcctaatgccaattctggaatatttgccagatgattatatgttttgtggattatctatacattagatatgaatctttttcttttctcttcaaagaagagaacttt

SEQ ID NO: 28648 - DNA, 1855 bp, Macaca Mulatta
  misc_feature (1)...(1855): n = A,T,C or G
ttatatcatctcagtgctgtggaatggcttcctgctttggtgcctttctcaatctctgttcctgggagcaccttttccaagctggcttcatggtttgctcagaattctcggggcggcacagttccagggnnnnnnnnnnnnnnnnnnnnnnnnnnnnnnnnnnnnnnnnnnnnnnnnnnnnnnnnnnnnnnnnnnnnnnnnnnnnnnnnnnnnnnnnnnnnnnnnnnnnnnnnnnnnnnnnnnnnnnnnnnnnnnnnnnnnnnnnnnnnnnnnnnnnnnnnnnnnnnnnnnnnnnnnnnnnnnnnnnnnnnnnnnnnnnnnnnnnnnnnnnnnnnnnnnnnnnnnnnnnnnnnnnnnnnnnnnnnnnnnnnnnnnnnnnnnnnnnnnnnnnnnnnnnnnnnnnnnnnnnnnnnnnnnnnnnnnnnnnnnnnnnnnnnnnnnnnnnnnnnnnnnnnnnnnnnnnnnnnnnnnnnnnnnnnnnnnnnnnnnnnnnnnnnnnnnnnnnnnnnnnnnnnnnnnnnnnnnnnnnnnnnnnnnnnnnnnnnnnnnnnnnnnnnnnnnnnnnnnnnnnnnnnnnnnnnnnnnnnnnnnnnnnnnnnnnnnnnnnnnnnnnnnnnnnnnnnnnnnnnnnnnnnnnnnnnnnnnnnnnnnnnnnnnnnnnnnnnnnnnnnnnnnnnnnnnnnnnnnnnnnnnnnnnnnnnnnnnnnnnnnnnnnnnnnnnnnnnnnnnnnnnnnnnnnnnnnnnnnnnnnnnnnnnnnnnnnnnnnnnnnnnnnnnnnnnnnnnnnnnnnnnnnnnnnnnnnnnnnnnnnnnnnnnnnnnnnnnnnnnnnnnnnnnnnnnnnnnnnnnnnnnnnnnnnnnnnnnnnnnnnnnnnnnnnnnnnnnnnnnnnnnnnnnnnnnnnnnnnnnnnnnnnnnnnnnnnnnnnnnnnnnnnnnnnnnnnnnnnnnnnnnnnnnnnnnnnnnnnnnnnnnnnnnnnnnnnnnnnnnnnnnnnnnnnnnnnnnnnnnnnnnnnnnnnnnnnnnnnnnnnnnnnnnnnnnnnnnnnnnnnnnnnnnnnnnnnnnnnnnnnnnnnnnnnnnnnnnnnnnnnnnnnnnnnnnnnnnnnnnnnnnnnnnnnnnnnnnnnngcctagtaggaatggactatataataatatagtaggtgctcaataaccgtttgttgcatttcagtaaaggcagaataacctttcaaaataataggctgggtgcaatggctcacatctgtaatccagcactttgggaggccaagatgggcagattgcgtgggtccaagaattcgagaccagcctgggcaacatggtgaaaccctatctccacgaaaaaatataaaaattagccaagagtggtggtacatgtctgtagtcccagatatttgggagtgggctgaaatgggaaaatcgcttgagcccaggaggtcaagggtacagtgagccgaggtcatgccactgcctccagcctggcgtgggcaacagagcaagaccctgtctcaaaataatatataattttccaccaaaagtttcagggaaaaatgagtttggttggagttcgtttatactttcgcatgttaccacaaatatctccagttaaataactatcattagccatttccattcatctccccctcaaatcatagcctaacagaacactttgaaagctctttnnnnnnnnnnnnnnnnnnnnnnnnnnngggagtacttcaaaagtgaaagcatcagaagaaaaaatatttttatatttatgcatagcaagccttcatgaacggaagtgacacactccggattgaataatactgtagcctcattcatatgtagttattcaaattggattaatgtc

SEQ ID NO: 28649 - DNA, 690 bp, Macaca Mulatta
  misc_feature (1)...(690): n = A,T,C or G
gggggccaaaatagcagcctatggtcatgaagtggggaagcgtccttggattacaggagatgagagtattgtaggccttatgaaggacattgtaggagccaatgagaaagaaatagccctaatgaatgctttgactgtaaatttacatcttctattgttatcattttttaagcctacgccaaaacgatacaaaattcttctagaagccaaagccttcccttctgatcattatgctattgagtcacaactacaacttcacggacttaacattgaagaaagtatgcggatgataaagccaagagagggggaagaaaccttaagaatagaggatatccttgaagtaattgagaaggaaggagactcaattgcagtgatcctgttcagtggggtacatttttacactggacagcactttaatattcctgccatcacaaaagctggacaagcgaagggttgttacgttggctttgatctagcacatgccgttggaaatgttgaactctatttacatgactggggagttgattttgcctgctggtgttcctacnagtatctaaatgcaggcgcaggaggaatttgcggtgcctttatttcatgaaagcatgcccnatacantaannctgcattagtgggatggttggnncatgactcagcacagaatttagatggatacaactgcagttatccctg

SEQ ID NO: 28650 - DNA, 838 bp, Macaca Mulatta
caacaaccagatagtgacaagtggcagtctggattgtcaataaataatgttttcaaaatgagtagtgtacagaagatgatgcaagctggcaaaaaattcaaagactctctgttggaacctgctcatgcatcagtggtaatccataaggaggccactgtctttgatcttcctaaatttagtgtttgtggtagttctcaagagagtgacccattatctaactcagctcatgatcaagataggacccaggacttcccagagaacaatcctttgaaactccttcagagtgcccagccacctatggtgactaacactgctaagacttgtcctacattttcagcacctgtaggtgactcagccactgcaaaattccatgtcacaccgttgtttggaaatgtcaaaaaggaaaatcacagctctccaaaagaaaacataggactaaatatgttcttatctaatcagtcttgttttcctgctgcctgtgagaatccacaaaggaagtctttttatgattctggcaccattgatgcactttccaacccaatactaaataaggcttgtagtaaaacagaagataatggcccaaaggaggatagcagcctgcctacatttaaaacggcaaaagaacaattatgggtagatcagcaaaaaaaataccaccaacctcagcgtgcatcagggtcttcatatggtggtgtaaaaaagtctctaggagctagtagatcccgaggaatacttggaaagtttgttcctcctatacccaagcaagatgggggagagcagaatggaggaacgcagtataagccttatggggcagggcctacagagccagcacatccag

SEQ ID NO: 28651 - DNA, 715 bp, Macaca Mulatta
ctctgattaatattttccagaaagtagaggttagctgatttttttttattcctttagaatacctgaatccagtggaggagaacccttttgtttctcggagaaaaaatggagaccttcaagcattggataatcccgaatatcacagtgcatccaatggtccacccaaggccgaggatgagtatgtgaatgagccgctgtacctcaacacctttgccaacgccttgggaaaagctgattacctgaagaacaatgtactgtctgtgccagagaaggccaagaaagcgtttgacaaccctgactactggaaccacagcctgccacctcggagcacccttcagcacccagactacctgcaggagtacagcacaaaatatttttataaacagaatgggcggatccggcctattgtggcagagaatccggaatacctctctgagttctccctgaagccaggcactgtgctgccgcctccaccttacagacaccgaaatactgtagtgtaagctcagttgtggtttttaggtggagagacacatccgctccaatttccccaccccctgtctttctctggtggtcttccttctaccccaaggccagtagttttgacacttcccagtggaagatagagatgccatgatagttatgtgcttatctaacttgaacattagagggaaagactgaaagagaaagataggcagaaccacaatgtttcttc

SEQ ID NO: 28652 - DNA, 199 bp, Macaca Mulatta
agttaatgtcagttttagtagtccttctgtttgtttctatttttaagttgaatttttaattctacctgaaatcagttaagataccttgacaaaaactgcaatgagaggaggtaacctatcctttttcaggaagagactgatatctctggctaagtacttctccttttattatggtttataaatcagttattttcttcag

SEQ ID NO: 28653 - DNA, 259 bp, Macaca Mulatta
cagggttcctgtgttcaatattgtcattatcgtggctggtggattcctgagtaagagcctggtcttctctgtcctgtttgctgtcacgctgaggtcatttggaccctagacccacgaacccacgagaacgtcctctgacttccagccatatccatctggcagttgtgccaagggaggagggaggaggtaaaaggcggggagttaataacatgaattaaatctgtaatcacaggctacttctaaagtcagcatctcacct

SEQ ID NO: 28654 - DNA, 897 bp, Macaca Mulatta
  misc_feature (1)...(897): n = A,T,C or G
ngactccagcgggaggaagaagaggcctttgccagcagtcagagcagccaaggggcccaatccctcacattctccaagttgaagaaaagaaaaccaacgagaagacccgcgaggttaccacagtgaagaaattcttcagtgcgtcttcccagggtcggatcaaagannnnnnnnnnnnnnnnnnnnnnnnnnnnnnnnnnnnnnnnnnnnnnnnnnnnnnnnnnnnnnnnnnnnnnnnnnnnnnnnnnnnnnnnnnnnnnnnnnnnnnnnnnnnnnnnnnnnnnnnnnnnnnnnnnnnnnnnnnnnnnnnnnnnnnnnnnnnnnnnnnnnnnnngatctgagcattgaagaacagtcagagtgtgctcaggatttctaccacaatgtggccgaaaggatgcagactcgcgggaaagnnnnnnnnnnnnnnnnnnnnnnnnnnnnnnnnnnnnnnnnnnnnnnnnnnnnnnnnnnnnnnnnnnnnnnnnnnnnnnnnnnnnnnnnnnnnnnnnnnnnnnnnnnnnnnnnnnnnnnnnnnnnnnnnnnnnnnnnnnnnnnnnnnnnnnnnnnnnnnnnnnnnnnnnnnnnnnnnnnnnnnnnnnnnnnnnnnnnnnnnnnnnnnnnnnnnnnnnnnnnnnnagatatcattgaaatggattccaagcgtgtgcctcgagacaagttggcctgcatcaccaagtgcagcaagcacatcttcaatgccatcaagatcaccaagaacgagccggcgtcagcggatgacttcctccccaccctcatctacatcgttttgaagggcaaccccccacgccttcagtctaatatccagtatatcacgcgcttctgcaatccaagccgactgatgactggagaggatggctactatttcaccaatct

SEQ ID NO: 28655 - DNA, 996 bp, Macaca Mulatta
  misc_feature (1)...(996): n = A,T,C or G
agggagacgcctagaagatggaggcccagattcttgagacatttctctttctgatctagcaggagggacaaagacctccactccctcattccccaagaagcccccaagcctacccagtttccgtgcccattctgccctgggaaagcggcttcccaggnnnnnnnnnnnnnnnnnnnnnnnnnnnnnnnnnnnnnnnnnnnnnnnnnnnnnnnnnnnnnnnnnnnnnnnnnnnnnnnnnnnnnnnnnnnnnnnnnnnnnnnnnnnnnnnnnnnnnnnnnnnnnnnnnnnnnnnnnnnnnnnnnnnnnnnnnnnnnnnnnnnnnnnnnnnnnnnnnnnnnnnnnnnnnnnnnnnnnaggtgcatcaggataaacaacaatcagaataaagatcccattctagaaagggcatgtgtggagagtaatgtggatttttctcacctgggacttccgaaggagatgaccatatgggtagatccctttgaagtgtgctgtaggtnnnnnnnnnnnnnnnnnnnnnnnnnnnnnnnnnnnnnnnnnnnnnnnnnnnnnnnnnnnnnnnnnnnnnnnnnnnnnnnnnnnnnnnnnnnnnnnnnnnnnnnnnnnnnnnnnnnnnnnnnnnnnnnnnnnnnnnnnnnnnnnnnnnnnnnnnnnnnnnnnnnnnnnnnnnnnnnnnnnnnnnnnnnnnnnnnnnnnnnnnnnnnnnnnnnnnnnnnnnnnnnnnnnnnnnnnnnnnnnnnnnnnnnnnnnnnnnnnnnnnnnnnnnnnnnnnnnnnnnnnnnnnnnnnnnnnnnnnnnnnnnnnnnnnnnnnnnnnnnnnnnnnnnnnnnnnnnnnnnnnnnnnnnagaattttataacccacatttgggaatgaatttgcggcacctgatagaagaaggcaccttggaaggcgctgccttgggcttccgtggcaggaagatgagaagcaaccttcagggtgatttctggagcctgaaaagaataaaaacaaaaccaaa

SEQ ID NO: 28656 - DNA, 4728 bp, Macaca Mulatta
  misc_feature (1)...(4728): n = A,T,C or G
gaagcctgctacgaaggagaaggagaccccccactctatgtcaacgtgaacatgttcagtgggcagctgatgaacacctggattgactctctgcaggcctttttccctggactgcaggtnnnnnnnnnnnnnnnnnnnnnnnnnnnnnnnnnnnnnnnnnnnnnnnnnnnnnnnnnnnnnnnnnnnnnnnnnnnnnnnnnnnnnnnnnnnnnnnnnnnnnnnnnnnnnnnnnnnnnnnnnnnnnnnnnnnnnnnnnnnnnnnnnnnnnnnnnnnnnnnnnnnnnnnnnnnnnnnnnnnnnnnnnnnnnnnnnnnnnnnnnnnnnnnnnnnnnnnnnnnnnnnnnnnnnnnnnnnnnnnnnnnnnnnnnnnnnnnnnnnnnnnnnnnnnnnnnnnnnnnnnnnnnnnnnnnnnnnnnnnnnnnnnnnnnnnnnnnnnnnnnnnnnnnnnnnnnnnnnnnnnnnnnnnnnnnnnnnnnnnnnnnnnnnnnnnnnnnnnnnnnnnnnnnnnnnnnnnnnnnnnnnnnnnnnnnnnnnnnnnnnnnnnnnnnnnnnnnnnnnnnnnnnnnnnnnnnnnnnnnnnnnnnnnnnnnnnnnnnnnnnnnnnnnnnnnnnnnnnnnnnnnnnnnnnnnnnnnnnnnnnnnnnnnnnnnnnnnnnnnnnnnnnnnnnnnnnnnnnnnnnnnnnnnnnnnnnnnnnnnnnnnnnnnnnnnnnnnnnnnnnnnnnnnnnnnnnnnnnnnnnnnnnnnnnnnnnnnnnnnnnnnnnnnnnnnnnnnnnnnnnnnnnnnnnnnnnnnnnnnnnnnnnnnnnnnnnnnnnnnnnnnnnnnnnnnnnnnnnnnnnnnnnnnnnnnnnnnnnnnnnnnnnnnnnnnnnnnnnnnnnnnnnnnnnnnnnnnnnnnnnnnnnnnnnnnnnnnnnnnnnnnnnnnnnnnnnnnnnnnnnnnnnnnnnnnnnnnnnnnnnnnnnnnnnnnnnnnnnnnnnnnnnnnnnnnnnnnnnnnnnnnnnnnnnnnnnnnnnnnnnnnnnnnnnnnnnnnnnnnnnnnnnnnnnnnnnnnnnnnnnnnnnnnnnnnnnnnnnnnnnnnnnnnnnnnnnnnnnnnnnnnnnnnnnnnnnnnnnnnnnnnnnnnnnnnnnnnnnnnnnnnnnnnnnnnnnnnnnnnnnnnnnnnnnnnnnnnnnnnnnnnnnnnnnnnnnnnnnnnnnnnnnnnnnnnnnnnnnnnnnnnnnnnnnnnnnnnnnnnnnnnnnnnnnnnnnnnnnnnnnnnnnnnnnnnnnnnnnnnnnnnnnnnnnnnnnnnnnnnnnnnnnnnnnnnnnnnnnnnnnnnnnnnnnnnnnnnnnnnnnnnnnnnnnnnnnnnnnnnnnnnnnnnnnnnnnnnnnnnnnnnnnnnnnnnnnnnnnnnnnnnnnnnnnnnnnnnnnnnnnnnnnnnnnnnnnnnnnnnnnnnnnnnnnnnnnnnnnnnnnnnnnnnnnnnnnnnnnnnnnnnnnnnnnnnnnnnnnnnnnnnnnnnnnnnnnnnnnnnnnnnnnnnnnnnnnnnnnnnnnnnnnnnnnnnnnnnnnnnnnnnnnnnnnnnnnnnnnnnnnnnnnnnnnnnnnnnnnnnnnnnnnnnnnnnnnnnnnnnnnnnnnnnnnnnnnnnnnnnnnnnnnnnnnnnnnnnnnnnnnnnnnnnnnnnnnnnnnnnnnnnnnnnnnnnnnnnnnnnnnnnnnnnnnnnnnnnnnnnnnnnnnnnnnnnnnnnnnnnnnnnnnnnnnnnnnnnnnnnnnnnnnnnnnnnnnnnnnnnnnnnnnnnnnnnnnnnnnnnnnnnnnnnnnnnnnnnnnnnnnnnnnnnnnnnnnnnnnnnnnnnnnnnnnnnnnnnnnnnnnnnnnnnnnnnnnnnnnnnnnnnnnnnnnnnnnnnnnnnnnnnnnnnnnnnnnnnnnnnnnnnnnnnnnnnnnnnnnnnnnnnnnnnnnnnnnnnnnnnnnnnnnnnnnnnnnnnnnnnnnnnnnnnnnnnnnnnnnnnnnnnnnnnnnnnnnnnnnnnnnnnnnnnnnnnnnnnnnnnnnnnnnnnnnnnnnnnnnnnnnnnnnnnnnnnnnnnnnnnnnnnnnnnnnnnnnnnnnnnnnnnnnnnnnnnnnnnnnnnnnnnnnnnnnnnnnnnnnnnnnnnnnnnnnnnnnnnnnnnnnnnnnnnnnnnnnnnnnnnnnnnnnnnnnnnnnnnnnnnnnnnnnnnnnnnnnnnnnnnnnnnnnnnnnnnnnnnnnnnnnnnnnnnnnnnnnnnnnnnnnnnnnnnnnnnnnnnnnnnnnnnnnnnnnnnnnnnnnnnnnnnnnnnnnnnnnnnnnnnnnnnnnnnnnnnnnnnnnnnnnnnnnnnnnnnnnnnnnnnnnnnnnnnnnnnnnnnnnnnnnnnnnnnnnnnnnnnnnnnnnnnnnnnnnnnnnnnnnnnnnnnnnnnnnnnnnnnnnnnnnnnnnnnnnnnnnnnnnnnnnnnnnnnnnnnnnnnnnnnnnnnnnnnnnnnnnnnnnnnnnnnnnnnnnnnnnnnnnnnnnnnnnnnnnnnnnnnnnnnnnnnnnnnnnnnnnnnnnnnnnnnnnnnnnnnnnnnnnnnnnnnnnnnnnnnnnnnnnnnnnnnnnnnnnnnnnnnnnnnnnnnnnnnnnnnnnnnnnnnnnnnnnnnnnnnnnnnnnnnnnnnnnnnnnnnnnnnnnnnnnnnnnnnnnnnnnnnnnnnnnnnnnnnnnnnnnnnnnnnnnnnnnnnnnnnnnnnnnnnnnnnnnnnnnnnnnnngcctgtgatttctcttggcgctcccctcctctcccgctctggcttctgtggtggcagtggtgggtaagcactccagtgttctcttaatgaggcattttacctgtcactcgagcaagcccgggtgttccttcctcctcatgctcctggaatagggaatggggatctcatgctttcagagtacagagtgctgcaggtgcttctcaggggccacaggctgtcaggatacgtgttttatgttaagtcccaaaccctcttgacttctgggtactggaattaataccagtaggtgagactgagggtgagtgagttagtacatattcatcctggttgttgagcttccagactacccagtccgaagtttgatgctatgtagtcagtggtttgtgcggctggatgccagaaggttctttgagccagtttcaaaggttacttgttttctttttgaaagtcagaatgttaacaactgtgatatatcctgccgggcttttgcagtttcttctgttctatgttctgaaatactgggtagagaatggatgaggaggagattaccagagaagttgctttgcttagtgctttgccccaggaatgcctcanatctgagtggacttcatcctttgtggcagctctgagcctggcccatcttcctgttccacgtgtagctagtgtctcgtgtcagctttgctcagtnnnnnnnnnnnnnnnnnnnnnnnnnnnnnnnnnnnnnnnnnnnnnnnnnnnnnnnnnnnnnnnnnnnnnnnnnnnnnnnnnnnnnnnnnnnnnnnnnnnnnnnnnnnnnnnnnnnnnnnnnnnnnnnnnnnnnnnnnnnnnnnnnnnnnnnnnnnnnnnnnnnnnnnnnnnnnnnnnnnnnnnnnnnnnnnnnnnnnnnnnnnnnnnnnnnnnnnnnnnnnnnnnnnnnnnnnnnnnnnnnnnnnnnnnnnnnnnnnnnnnnnnnnnnnnnnnnnnnnnnnnnnnnnnnnnnnnnnnnnnnnnnnnnnnnnnnnnnnnnnnnnnnnnnnnnnnnnnnnnnnnnnnnnnnnnnnnnnnnnnnnnnnnnnnnnnnnnnnnnnnnnnnnnnnnnnnnnnnnnnnnnnnnnnnnnnnnnnnnnnnnnnnnnnnnnnnnnnnnnnnnnnnnnnnnnnnnnnnnnnnnnnnnnnnnnnnnnnnnnnnnnnnnnnnnnnnnnnnnnnnnnnnnnnnnnnnnnnnnnnnnnnnnnnnnnnnnnnnnnnnnnnnnnnnnnnnnnnnnnnnnnnnnnnnnnnnnnnnnnnnnnnnnnnnnnnnnnnnnnnnnnnnnnnnnnnnnnnnnnnnnnnnnnnnnnnnnnnnnnnnnnnnnnnnnnnnnnnnnnnnnnnnnnnnnnnnnnnnnnnnnnnnnnnnnnnnnnnnnnnnnnnnnnnnnnnnnnnnnnnnnnnnnnnnnnnnnnnnnnnnnnnnnnnnnnnnnnnnnnnnnnnnnnnnnnnnnnnnnnnnnnnnnnnnnnnnnnnnnnnnnnnnnnnnnnnnnnnnnnnnnnnnnnnnnnnnnnnnnnnnnnnnnnnnnnnnnnnnnnnnnnnnnnnnnnnnnnnnnnnnnnnnnnnnnnnnnnnnnnnnnnnnnnnnnnnnnnnnnnnnnnnnnnnnnnnnnnnnnnnnnnnnnnnnnnnnnnnnnnnnnnnnnnnnnnnnnnnnnnnnnnnnnnnnnnnnnnnnnnnnnnnnnnnnnnnnnnnnnnnnnnnnnnnnnnnnnnnnnnnnnnnnnnnnnnnnnnnnnnnnnnnnnnnnnnnnnnnnnnnnnnnnnnnnnnnaagtatagagtggaagctcggggaaaacttactgaaatacacaaatgcttctctctctgtaatgtgcaatatgctttgcaacttagatgatattttatgtttaatctgtaaataagaaatgtatttaaattaaaagggatctttttgtaaaaggaccaaatgttcttttataaatgtaataaggaatatcttgct

SEQ ID NO: 28657 - DNA, 378 bp, Macaca Mulatta
atgtgttttctagtgagagtaatggatgcagttagctttgctgcagcagtgactgcatcttcttctatcctggcaaaggcttttccaaataacgtggctacagtattggtatgtattttataagtatttcccactttcctttgagcgtaggccaaaatctttgcctttccaagttaaagctgggatccattcttctatacttgcatttctgtactctctgtattattgttgcctttcaccccgagttcgactagcagcaagcctgtcaataaatgtaacactggtgttacttgggtgctcttcctggttttagaattccctgaatgggcagtttgacaggtaaatgtggtccaaatcagtcattctttttaccactta

SEQ ID NO: 28658 - DNA, 1138 bp, Macaca Mulatta
  misc_feature (1)...(1138): n = A,T,C or G
ggatggtttattattgccagttttggcctcctcagtgccctcacactctgctacatgatcatcagagccacagctagcttgaatgctaatgaggtagaatggttttgaagaagaaaaaaactgctttctgactgattgccttgaaggaaaaaagaacctatttttgtgcatcatttaccaatcatgccacacaagcatttatttttagtacattttattttttcataaaaattgctaatgccaaagctttgtattaaaagaaataaataatagaatacaacatataaaggaataaacaagaaaaagaagaaatttaacaaaaagaaagnnnnnnnnnnnnnnnnnnnnnttggccgaccttaggacccctgagaaacctttttcaaatcagtttcttttggggcgccggacgccccagcatgtgaaattggaaacagtgggccaaaacccgtttttttccaaaagagaatattccgtggggcacaagaaaccaaaaggtcgctggtgaaactcttccccacccacaagtaataaaaaaatgtatcctctctgatggtcgagaaatacctaaaataaagtgtctcttctttggatatccaacaaacccatctcaatgaagaaggagagcaattctctctctcacaaagggaggtttctattatatcctgagctcggggagagaacgacacctaaaaaaagaccagacaactcaaaaagagaaattttccaccactattacatgtggagaaaccactccgcgacgaatataagttctcaaaatatatgtatatttgtgagctacacgcgtgtaggatgagacgagacngaaggatcaaatgaggtatgncagaggtgggatcgtgcgtgggcgggggggaatagatgttttccttttccaaatggcacacggtttgtcggcgcgtaccgcaacaacgacatgtgggaggtagagcccccatctctgtagaaatagagacgcgttcctctgagatcaaaaacacacgcgtgaatctaagtcacggatgtctcaggggtagattgcaggaaccccctcgttgagtatccacgctcagttaggattgagtatacaatcatttctgctccccccctgggtggtgagtaataaaanggtagggtg

SEQ ID NO: 28659 - DNA, 2489 bp, Macaca Mulatta
  misc_feature (1)...(2489): n = A,T,C or G
gcgagggccacccacctccaagtctccagccatgacgacctccgcgctccggcgccaggtgaagaacatcgtgcacaactattccgaggcggaaatcaaggtgcgcgaggccaccagcaatgacccctggggcccccccagttcgcttatgtccgagatcgctgacctgaccttcaacacagtggctttcaccgaggtcatgggcatgctgtggcggcggctcaatgacagcggcaagaactggcggcacgtgtacaaggctctgacattgctggactacctgctcaagacaggctctgagcgggtggcccaccagtgccgcgagaacctctacaccatccagacactcaaggacttccagtacattgaccgcgatggcaaggaccagggcgtcaacgtgcgcgagaaggtcaagcaagtgatggccctgctcaaggatgaggagcggctgcggcaggagcgaacccatgccctcaagaccaaggagcgcatggcactggagggcatcggcattggcagtgggcagctgggcttcagccgccgctacggcgaggactacggccgctcccggggctccccgtcctcttacaacnnnnnnnnnnnnnnnnnnnnnnnnnnnnnnnnnnnnnnnnnnnnnnnnnnnnnnnnnnnnnnnnnnnnnnnnnnnnnnnnnnnnnnnnnnnnnnnnnnnnnnnnnnnnnnnnnnnnnnnnnnnnnnnnnnnnnnnnnnnnnnnnnnnnnnnnnnnnnnnnnnnnnnnnnnnnnnnnnnnnnnnnnnnnnnnnnnnnnnnnnnnnnnnnnnnnnnnnnnnnnnnnnnnnnnnnnnnnnnnnnnnnnnnnnnnnnnnnnnnnnnnnnnnnnnnnnnnnnnnnnnnnnnnnnnnnnnnnnnnnnnnnnnnnnnnnnnnnnnnnnnnnnncagtcctccatcctggacttggctgacatcttcgtacctgccctggccccgccctccacacattgctctgctgacccatgggacatcccaggnnnnnnnnnnnnnnnnnnnnnnnnnnnnnnnnnnnnnnnnnnnnnnnnnnnnnnnnnnnnnnnnnnnnnnnnnnnnnnnnnnnnnnnnnnnnnnnnnnnnnnnnnnnnnnnnnnnnnnnnnnnnnnnnnnnnnnnnnnnnnnnnnnnnnnnnnnnnnnnnnnnnncccccaccacagacccgtgggcactgaattctccccaccacaaactccccagcactggcttctaacccttggggagcctccattgagacctccgacacacctggtnggtgctgcctcggcctttgactcatttgccaaacctccagaatccacagagatcaaggaggggatggagcaggccctgccctctgggaagcccagcagccctgtggngagctggacctgtttggagatcccagccccagttccaagcaaaatggcacgaaggagccagatgccctggacctgggcatactaggggaagcactaacccagccaagcaaagaggcccgagcttgccggactcccgagtccttcctgggcccctcggcctcttccttggtcaaccttgactcgttggtcaaggcaccccaggctgcaaagacccggaacccctttctgacaggtnnnnnnnnnnnnnnnnnnnnnnnnnnnnnnnnnnnnnnnnnnnnnnnnnnnnnnnnnnnnnnnnnnnnnnnnnnnnnnnnnnnnnnnnnnnnnnnnnnnnnnnnnnnnnnnnnnnnnnnnnnnnnnnnnnnnnnnnnnnnnnnnnnnnnnnnnnnnnnnnnnnnnnnnnnnnnnnnnnnnnnnnnnnnnnnnnnnnnnnnnnnnnnnnnnnnnnnnnnnnnnnnnnnnnnnnnncagccgctgctgcccacgccgagctcagccgggccgctgcccccgcccccgcagaccggcacgaaccccttcctctgagcgacaccccgccgcgggccggcctgcgcatgcgccaggcgccccgcggccccgcctccggacccggggctggggcggggcgccggtgctagtgggtcgctgaaccagtggcggctggaatcacgcggcggctccggaagctggacatggaccacggcccgggagctagagactgaacgcccgcataataaagactggaaccctagttctcagctctcaccaagtggactttttgcgaggtgtggcggccgggtctcgaccacagcgtggatcaccggctgtctaggaaactgcagctgcacaacgcggggtgcaaaactgcccccgcttcctttacagctcctctcaaccctcacctccatcccccgtcacccaggcaccttcgcttccagacgctcccaggctgtcactcaattttgtgaattcattcatttatcacacatgggcactggggctgagctaacagcaagagacaataggcctttgttcttatatgttgggtactgcttatgtgctaagcagatcagcttatttaagccttgcaacgacgctctg

SEQ ID NO: 28660 - DNA, 1143 bp, Macaca Mulatta
  misc_feature (1)...(1143): n = A,T,C or G
gggaagaacacttgtaatagacaaggaaagaaaagacactgttgaatagtcagttagaaatggaaagaatgaaagttgaacaagaaaggaagaaagccatttttactcaagaaataataaaagaaaaggaacgcaagccattttctgtttctagcactcccaccatgtcacgctcaagttcaataagtggtgttgatatggaaggactacagacatcttttctgtctcaggatgaatctcatgatcactcatttggaccaatgtctgtatcagcaaatggaagcaatctttatgatgctgtaaggatgggagcaggatcaagcattattgaaaacctacagtctcagctaaaaacaaaggaaggggaaaattaccccttttacagctttgaaatttggcaattctagtaaaaaacaccgattcaataaatggcctgtaaaaaacctagtttataattttatcaaaattcaaaaaatgaatcaaacctatgataagaaacaaaggtagaaaaggggtgaaattatcctcaaaaaacttttattaaaacattctatcacaataaaggaacgaaatttttcgacggaatgtcaccaaacatatataccgtagaaggcgagctattaactattaccataagaacacaaagaaaaaagaggagataatttaggggggannnnnnnnnnnnnnnnnnncagcgccttcatggataaataacacagtgggtgcccgggctaaaaactatagaaaaacactgttgctcgcggagatgattttataganggactttcaccttaccgcgaaaaagagaaaaataggagtcgtaaagtaaataaaatcgtaaggggagtcgtagttgaacaagacatcgtgttctcaaaaaaatttatatgaagagagagaaaacaacgcttttgttatgaaagcgcaacactatgaagggtgcccgccaaggttgctagcacaccgagtgcgtccgggaagagaagtgtgaggacaatattcctcccacttatatacaaatagaacattagagacagtgattncacaatcacgcactacgaaataaaacacgctcaaagagcaccttttctataaatagagttcggaaacctttttctgaaatacaaatactgtaacacactn

SEQ ID NO: 28661 - DNA, 498 bp, Macaca Mulatta
tttgccagctcgctggccatataatttattcttcccttaaaaatgctaagcagctatacccgtacatgttttgatcttgctatttattgttgaagaaaagcattgtatagttaattttacttgcttctagattaattctagagcattctaatgagtttttttgtttgtttgatttggttttgtcttatcagcacatataaaatccaaatcccacttgaagcaactgaagagaagaagaaggttggattcagatgctgccaacaccatagaaagtcagagcatttccccagaccatgacaaagaacctaaagagaagagatcctcagggcagaatgagcaagagttgaaatgcagcatttaagagacatgtccagtggcctttggaaaggtggtggggatccacttctgaagggaggggtatgtctgtctcccagtctgggcagaggagtgctatgcagaattttgtgcatagcagaaaagctcccaccattttctttc

SEQ ID NO: 28662 - DNA, 929 bp, Macaca Mulatta
  misc_feature (1)...(929): n = A,T,C or G
ttctggacaaaacactgtcagtaaacgatgttgcgtgcatggcaggtttactagaaatcattgtgattctctggaaaagtattgacagaagtatggaaaataataaagaggccaaactttacaccattaacaagtttgcctctgtgcttccagagtatttgaaagtatttaaggnnnnnnnnnnnnnnnnnnnnnnnnnnnnnnnnnnnnnnnnnnnnnnnnnnnnnnnnnnnnnnnnnnnnnnnnnnnnnnnnnnnnnnnnnnnnnnnnnnnnnnnnnnnnnnnnnnnnnnnnnnnnnnnnnnnnnnnnnnnnnnnnnnnnnnnnnnnnnnnnnnnnnnnnnnnnnnnnnnnnnnnnnnnnnnnnnnnnnnnnnnnnnnnnnnnnnnnnnnnnnnnnnnnnnnnnnnnnnnnnnnnnnnnnnnnnnnnnnnnnnnnnnnnnnnnnnnnnnnnnnnnnnnnnnnnnnnnnnnnnnnnnnnnnnnnnnnnnnnnnnnnnnnnnnnnnnnnnnnnnnnnnnnnnnnnnnnnnnnnnnnnnnnnnnnnnnnnnnnnnnnnnnnnnnnnnnnnnnnnnnnnnnnnnnnnnnnnnnnnnnnnnnnnnnnnnnnnnnnnnnnnnnnnnnnnnnnnnnnnnnnnnnnnnnnnnnnnnnnnnnnnnnnnnnnnnnnnnnnnnnnnnnnnnnnnnnnnnnnnnnnnnnnnnnnnnnnnnnnnnnnnnnnnnnnnnnnnnnnnnnnnnnnnnnnnnnnnnnnnnnnnnnnnnnnnnnnnnnnnnnnnnnnnnnnnnnnnnnnnnnnnnnnnnnnnnnnnnnnnnnnnnnnnnnnnnnagacctacctgactgtgtgtaaagatgttgttatggtaggccttggtgaccatcagtttcagatgcaacttttacagcggagtcttggaatcatgcaaacag

SEQ ID NO: 28663 - DNA, 251 bp, Macaca Mulatta
gtcctatcaaggttatgtgtttaatgtttgctttggggtaaaagtactaaaaaggtggaaatcaaatagtattctctaattgttagagtttattttttaagaatttacaactcagaaaagatttgtaaaatcaccaaaataataatgttctttattttacaggtagtgattattagtgctacatccccatttaaaaaaatacagtactaatgggtaacacatatggaggtttattgccatatatattgcat

SEQ ID NO: 28664 - DNA, 2116 bp, Macaca Mulatta
  misc_feature (1)...(2116): n = A,T,C or G
attttgatagtttacctgtgcaaattacagttccggagaaaatacggtcaataataaaggaagaaattgaatcgcagnnnnnnnnnnnnnnnnnnnnnnnnnnnnnnnnnnnnnnnnnnnnnnnnnnnnnnnnnnnnnnnnnnnnnnnnnnnnnnnnnnnnnnnnnnnnnnnnnnnnnnnnnnnnnnnnnnnnnnnnnnnnnnnnnnnnnnnnnnnnnnnnnnnnnnnnnnnnnnnnnnnnnnnnnnnnnnnnnnnnnnnnnnnnnnnnnnnnnnnnnnnnnnnnnnnnnnnnnnnnnnnnnnnnnnnnnnnnnnnnnnnnnnnnnnnnnnnnnnnnnnnnnnnnnnnnnnnnnnnnnnnnnnnnnnnnnnnnnnnnnnnnnnnnnnnnnnnnnnnnnnnnnnnnnnnnnnnnnnnnnnnnnnnnnnnnnnnnnnnnnnnnnnnnnnnnnnnnnnagccccagaaagattttgcaaagtatatagaaatgcatgttgtagttgaaaaacaattnnnnnnnnnnnnnnnnnnnnnnnnnnnnnnnnnnnnnnnnnnnnnnnnnnnnnnnnnnnnnnnnnnnnnnnnnnnnnnnnnnnnnnnnnnnnnnnnnnnnnnnnnnnnnnnnnnnnnnnnnnnnnnnnnnnnnnnnnnnnnnnnnnnnnnnnnnnnnnnnnnnnnnnnnnnnnnnnnnnnnnnnnnnnnnnnnnnnnnnnnnnnnnnnnnnnnnnnnnnnnnnnnnnnnnnnnnnnnnnnnnnnnnnnnnnnnnnnnnnnnnnnnnnnnnnnnnnnnnnnnnnnnnnnnnnnnnnnnnnnnnnnnnnnnnnnnnnnnnnnnnnnnnnnnnnnnnnnnnnnnnnnnnnnnnnnnnnnnnnnnnnnnnnnnnnnnnnnnnnnnnnnnnnnnnnnnnnnnnnnnnnnnnnnnnnnnnnnnnnnnnnnnnnnnnnnnnnnnnnnnnnnnnnnnnnnnnnnnnnnnnnnnnnnnnnnnnnnnnnnnnnnnnnnnnnnnnnnnnnnnnnnnnnnnnnnnnnnnnnnnnnnnnnnnnnnnnnnnnnnnnnnnnnnnnnnnnnnnnnnnnnnnnnnnnnnnnnnnnnnnnnnnnnnnnnnnnnnnnnnnnnnnnnnnnnnnnnnnnnnnnnnnnnnnnnnnnnnnnnnnnnnnnnnnnnnnnnnnnnnnnnnnnnnnnnnnnnnnnnnnnnnnnnnnnnnnnnnnnnnnnnnnnnnnnnnnnnnnnnnnnnnnnnnnnnnnnnnnnnnnnnnnnnnnnnnnnnnnnnnnnnnnnnnnnnnnnnnnnnnnnnnnnnnnnnnnnnnnnnnnnnnnnnnnnnnnnnnnnnnnnnnnnnnnnnnnnnnnnnnnnnnnnnnnnnnnnnnnnnnnnnnnnnnnnnnnnnnnnnnnnnnnnnnnnnnnnnnnnnnnnnnnnnnnnnnnnnnnnnnnnnnnnnnnnnnnnnagaagcagagtttggtcctacagaatgttattcttaccttaattcaaagactgatgtatctggaaactgtggtataggtgattcaggatacacacagtgtgaagctgnnnnnnnnnnnnnnnnnnnnnnnnnnnnnnnnnnnnnnnnnnnnnnnnnnnnnnnnnnnnnnnnnnnnnnnnnnnnnnnnnnnnnnnnnnnnnnnnnnnnnnnnnnnnnnnnnnnnnnnnnnnnnnnnnnnnnnnnnnnnnnnnnnnnnnnnnnnnnnnnnnnnnnnnnnnnnnnnnnnnnnnnnnnnnnnnnnnnnnnnnnnnnnnnnnnnnnnnnnnnnnnnnnnnnnnnnnnnnnnnnnnnnnnnnnnnnnnnnnnnnnnnnnnnnnnnnnnnnnnnnnnnnnnnnnnnnnnnnnnnnnnnnnnnnnnnnnnnnnnnnnnnnnnnnnnnnnnnnnnnnnnnnnnnnnnnnnnnnnnnnnnnnnnnnnnnnnnnnnnnnnnnnnnnnnnnnnnnnnnnnnnnnnnnnnnnnnnnnnnnnnnnnnnnnnnnnnnnnnnnnnnnnnnnnnnnnnnnnnnnnnnnnnnnnnnnnnnnnnnnnnnnnnnnnnnnnnnnnnnnnnnggtgaaagttcatttccaaaggaaaaaatggagaactgaggactattcaaccgatgag

SEQ ID NO: 28665 - DNA, 85 bp, Macaca Mulatta
cagtttgtgaccagggtttttacaatggacctgtcagcaaattctgggcttatgcatttgtgctaagcaaagcacccgaactagg

SEQ ID NO: 28666 - DNA, 198 bp, Macaca Mulatta
gatctcgaggaatttcgaagctacctggagaagcgttttgattttgagcaagttactgtgaagaaattcaggacttgggctgagcggcggcaattcaatcgggaaatgaagcggaagcaggcggagtctgagaggcccattttgccggccaatcagaagctcattactttatcagtgcaagatgcacccacaaagaaa

SEQ ID NO: 28667 - DNA, 3912 bp, Macaca Mulatta
  misc_feature (1)...(3912): n = A,T,C or G
gcggattttagcggcggaaacatggcggtcgcggccgggccggtaacggagaaagtttccacgaacaccggcctgtattagcgcgtatgacctcgggccctcgttccccaaggcgtgccgcctccctgttttccgttgcaggctgaagccttgtctgccctcctcctttttggtttggttttggaactgattccgaggtttgggagagcgcgttggtggcgacggccgagtcagnnnnnnnnnnnnnnnnnnnnnnnnnnnnnnnnnnnnnnnnnnnnnnnnnnnnnnnnnnnnnnnnnnnnnnnnnnnnnnnnnnnnnnnnnnnnnnnnnnnnnnnnnnnnnnnnnnnnnnnnnnnnnnnnnnnnnnnnnnnnnnnnnnnnnnnnnnnnnnnnnnnnnnnnnnnnnnnnnnnnnnnnnnnnnnnnnnnnnnnnnnnnnnnnnnnnnnnnnnnnnnnnnnnnnnnnnnnnnnnnnnnnnnnnnnnnnnnnnnnnnnnnnnnnnnnnnnnnnnnnnnnnnnnnnnnnnnnnnnnnnnnnnnnnnnnnnnnnnnnnnnnnnnnnnnnnnnnnnnnnnnnnnnnnnnnnnnnnnnnnnnnnnnnnnnnnnnnnnnnnnnnnnnnnnnnnnnnnnnnnnnnnnnnnnnnnnnnnnnnnnnnnnnnnnnnnnnnnnnnnnnnnnnnnnnnnnnnnnnnnnnnnnnnnnnnnnnnnnnnnnnnnnnnnnnnnnnnnnnnnnnnnnnnnnnnnnnnnnnnnnnnnnnnnnnnnnnnnnnnnnnnnnnnnnnnnnnnnnnnnnnnnnnnnnnnnnnnnnnnnnnnnnnnnnnnnnnnnnnnnnnnnnnnnnnnnnnnnnnnnnnnnnnnnnnnnnnnnnnnnnnnnnnnnnnnnnnnnnnnnnnnnnnnnnnnnnnnnnnnnnnnnnnnnnnnnnnnnnnnnnnnnnnnnnnnnnnnnnnnnnnnnnnnnnnnnnnnnnnnnnnnnnnnnnnnnnnnnnnnnnnnnnnnnnnnnnnnnnnnnnnnnnnnnnnnnnnnnnnnnnnnnnnnnnnnnnnnnnnnnnnnnnnnnnnnnnnnnnnnnnnnnnnnnnnnnnnnnnnnnnnnnnnnnnnnnnnnnnnnnnnnnnnnnnnnnnnnnnnnnnnnnnnnnnnnnnnnnnnnnnnnnnnnnnnnnnnnnnnnnnnnnnnnnnnnnnnnnnnnnnnnnnnnnnnnnnnnnnnnnnnnnnnnnnnnnnnnnnnnnnnnnnnnnnnnnnnnnnnnnnnnnnnnnnnnnnnnnnnnnnnnnnnnnnnnnnnnnnnnnnnnnnnnnnnnnnnnnnnnnnnnnnnnnnnnnnnnnnnnnnnnnnnnnnnnnnnnnnnnnnnnnnnnnnnnnnnnnnnnnnnnnnnnnnnnnnnnnnnnnnnnnnnnnnnnnnnnnnnnnnnnnnnnnnnnnnnnnnnnnnnnnnnnnnnnnnnnnnnnnnnnnnnnnnnnnnnnnnnnnnnnnnnnnnnnnnnnnnnnnnnnnnnnnnnnnnnnnnnnnnnnnnnnnnnnnnnnnnnnnnnnnnnnnnnnnnnnnnnnnnnnnnnnnnnnnnnnnnnnnnnnnnnnnnnnnnnnnnnnnnnnnnnnnnnnnnnnnnnnnnnnnnnnnnnnnnnnnnnnnnnnnnnnnnnnnnnnnnnnnnnnnnnnnnnnnnnnnnnnnnnnnnnnnnnnnnnnnnnnnnnnnnnnnnnnnnnnnnnnnnnnnnnnnnnnnnnnnnnnnnnnnnnnnnnnnnnnnnnnnnnnnnnnnnnnnnnnnnnnnnnnnnnnnnnnnnnnnnnnnnnnnnnnnnnnnnnnnnnnnnnnnnnnnnnnnnnnnnnnnnnnnnnnnnnnnnnnnnnnnnnnnnnnnnnnnnnnnnnnnnnnnnnnnnnnnnnnnnnnnnnnnnnnnnnnnnnnnnnnnnnnnnnnnnnnnnnnnnnnnnnnnnnnnnnnnnnnnnnnnnnnnnnnnnnnnnnnnnnnnnnnnnnnnnnnnnnnnnnnnnnnnnnnnnnnnnnnnnnnnnnnnnnnnnnnnnnnnnnnnnnnnnnnnnnnnnnnnnnnnnnnnnnnnnnnnnnnnnnnnnnnnnnnnnnnnnnnnnnnnnnnnnnnnnnnnnnnnnnnnnnnnnnnnnnnnnnnnnnnnnnnnnnnnnnnnnnnnnnnnnnnnnnnnnnnnnnnnnnnnnnnnnnnnnnnnnnnnnnnnnnnnnnnnnnnnnnnnnnnnnnnnnnnnnnnnnnnnnnnnnnnnnnnnnnnnnnnnnnnnnnnnnnnnnnnnnnnnnnnnnnnnnnnnnnnnnnnnnnnnnnnnnnnnnnnnnnnnnnnnnnnnnnnnnnnnnnnnnnnnnnnnnnnnnnnnnnnnnnnnnnnnnnnnnnnnnnnnnnnnnnnnnnnnnnnnnnnnnnnnnnnnnnnnnnnnnnnnnnnnnnnnnnnnnnnnnnnnnnnnnnnnnnnnnnnnnnnnnnnnnnnnnnnnnnnnnnnnnnnnnnnnnnnnnnnnnnnnnnnnnnnnnnnnnnnnnnnnnnnnnnnnnnnnnnnnnnnnnnnnnnnnnnnnnnnnnnnnnnnnnnnnnnnnnnnnnnnnnnnnnnnnnnnnnnnnnnnnnnnnnnnnnnnnnnnnnnnnnnnnnnnnnnnnnnnnnnnnnnnnnnnnnnnnnnnnnnnnnnnnnnnnnnnnnnnnnnnnnnnnnnnnnnnnnnnnnnnnnnnnnnnnnnnnnnnnnnnnnnnnnnnnnnnnnnnnnnnnnnnnnnnnnnnnnnnnnnnnnnnnnnnnnnnnnnnnnnnnnnnnnnnnnnnnnnnnnnnnnnnnnnnnnnnnnnnnnnnnnnnnnnnnnnnnnnnnnnnnnnnnnnnnnnnnnnnnnnnnnnnnnnnnnnnnnnnnnnnnnnnnnnnnnnnnnnnnnnnnnnnnnnnnnnnnnnnnnnnnnnnnnnnnnnnnnnnnnnnnnnnnnnnnnnnnnnnnnnnnnnnnnnnnnnnnnnnnnnnnnnnnnnnnnnnnnnnnnnnnnnnnnnnnnnnnnnnnnnnnnnnnnnnnnnnnnnnnnnnnnnnnnnnnnnnnnnnnnnnnnnnnnnnnnnnnnnnnnnnnnnnnnnnnnnnnnnnnnnnnnnnnnnnnnnnnnnnnnnnnnnnnnnnnnnnnnnnnnnnnnnnnnnnnnnnnnnnnnnnnnnnnnnnnnnnnnnnnnnnnnnnnnnnnnnnnnnnnnnnnnnnnnnnnnnnnnnnnnnnnnnnnnnnnnnnnnnnnnnnnnnnnnnnnnnnnnnnnnnnnnnnnnnnnnnnnnnnnnnnnnnnnnnnnnnnnnnnnnnnnnnnnnnnnnnnnnnnnnnnnnnnnaaagattttgatccctatgagttaaatgctctgccatgaaaattatttttctgatccttgttagtgataacattttttttctactgaaggtcaaaggataggaaacaagtcatttctcctcttgtatacatgtaatgtattatgtaaaaaagtattcatattggcaattttagttaggcataatagtgtggttgtaatttttaaaacttagtgtttgtctgattaaagcaggcactgatcagggtatctcctaagaggtaattcacttctaattcctttccaataattattacattctaaattttcatctatgagaaataacaagaagggaacagaattaaattggagaataatctaatcttcattgtttaaatggtttgacttctcaccattgaagccattttttctagcctcagaaagaggaaataatgcctccaccattttctacctggtgacttgaaaattgaacttttcagttaggaagaagagtcggggaacttgtataccactatctatgcagcattgttatagtctgattatttctgtgttttgagtatgattttcctaatgctctaaataaaattttgttaaaaattaa

SEQ ID NO: 28668 - DNA, 221 bp, Macaca Mulatta
caggaccctgcggcgcggtgtgcggacagccgggcatgccccgggacccctgggacttgccagtggggcagcggcgcaccctggtgcgccacatcctcgtaagtgaccgttaccgcttcctctactgctacgtccccaaggtggcctgctctaaatggaagcgggtgctaaaggtgctggcgggtgtcctggacagcgtggacgtccgcctcaagatggac

SEQ ID NO: 28669 - DNA, 419 bp, Macaca Mulatta
  misc_feature (1)...(419): n = A,T,C or G
ggattttatattggaagacatggatcttgctgccaacgaggtcagcatttatgacaaactttcagagactgttgatttggtgagacagacaggccatcagtgtggcatgtcagagaaggcaattgaaaaatttatcagacaactgctggaaaagaatgaacctcagannnnnnnnnnnnnnatcctctccttatagttgtgtataaggnnnnnnnnnnnnnnnnnnnnnnnnnnnnnnnnnnnnnnnngtgattcaacctttcagcccattagcacctgagccagtgctttctggagctcacacctggcgctcactcatccatcacattagactgatgtccttgcccattacgaagaagtacatgtcagaaaacaagggagttcctctgcatgggggtgatgaagacagaccctttcca

SEQ ID NO: 28670 - DNA, 105 bp, Macaca Mulatta
  misc_feature (1)...(105): n = A,T,C or G
agaattgtcaattcattaatgaaatatgngacgtgtgttgaacaagacaagctgggtcaagcatttgaggatgcttttgaggttctgaggcaacattcaactgga

SEQ ID NO: 28671 - DNA, 973 bp, Macaca Mulatta
  misc_feature (1)...(973): n = A,T,C or G
ggggcttttcctccctgacaccgccgaggttgcacgcgtgaggcctctccgccgccgccgcagacgccgccgcaatgcgctacgtcgcctcctatctgctggctgccctcgggggtaactcctcccccagcgccaaggacatcaagaagatcttggacagcgtgggcatcgaggcggacgacgaccgactcaacaaggttattagtgagctgaatggaaaaaacattgaagacgtcattgcccagggtattggcaagcttgccagtgtacctgccggtggggctgtggccgtctccgctgccccaggctctgcagcacctgctgctggttccgcgcctgctgcagcagaggagaagaaagatgagaagaaggaggagtctgaagagtcagacgatgacatgggatttggcctctttgattaaattcctgctcccctgcaaataaagccttttacacatnnnnnnnnnnnnnnnnnnnnnnnnnnnnnnnngtggctagtggtataaaacacaaaaaaaagatataaaaatattcatgtgcggccgccttcggcccctcaagaagcttttctaaaaccattctttttggccccccggggccccgttaggtaaatgaaaaatggttcataacttgttttccaagaaaaaaacccggggccagaaacaaggggccttggatttcccaccaaatataaaaacacccccgggggggtaaacaaaaagcgttctgatcaaaaatcccaaaatgagagtttcgaagggttcttttacgggggttcttttccaccggggagtcccccagccgagacttnnnnnnnnnnnnnnnnnnnnnnnnncatttctgggcacacaaaattagaaattaaagggatgggaaatttctaattaaaaacttttccgggtcgccaactgggataaaaccctctccatcatatgtgggccattcgataaacaacacctgtgatatcccgccg

SEQ ID NO: 28672 - DNA, 615 bp, Macaca Mulatta
ttgaggtaactggattcttgatctgagcgcaggcgtccttcctaacctcactgcatttggaggacctggagggagggtgggtgaagggcaaggaaagaggcaggatgagaggttggccgcggtggcgtctgaggggcctgaatgtttcaaggccagaacctggcgatcaggtggctcgcttagtcctaaaccagtcatccttctccaggcctcctctgtaaaatggaaactctgtccccctgcttcccttaggacctcatggatcccagggggaccaagagaggagctgataagacagaggtagctgagcctcggaacaaactaccccgtccagcaccttctctgcccacaaaccctgccctctactctgggccctttcctttctaccggcgcccttcggaactgggctgcttctccctggatgctcaacgccagtaccatggagatgcccgagccctgcgctactatagcccaccccccactaacggtccaggccccaactttgacctcagagacggatacccggatcgataccagccccgggacgaggaggtccaagaaaggctgaaccacctgctgtgctggctcctggaacaccgaggccggttggagggg

SEQ ID NO: 28673 - DNA, 1573 bp, Macaca Mulatta
  misc_feature (1)...(1573): n = A,T,C or G
aggactgctcagtaactgccccaaccactaccacctacccgagcgcaacgggatccacggannnnnnnnnnnnnnnngagctcaggagctgcacggaatggtggcagtcaaaaaaacagtgcagcaggcatggatcagactgcaagctaggggcacaaggcatcagttgggaagagggaacgcacagctaggctcgaggcctcttcatcggnnnnnnnnnnnnnnnnnnnnnnnnnnnnnnnnnnnnnnnnnnnnnnnnnnnnnnnnnnnnnnnnnnnnnnnnnnnnnnnnnnnnnnnnnnnnnnnnnnnnnnnnnnnnnnnnnnnnnnnnnnnnnnncttcacagcctccagtcgggcagggggccctccagggtggcctgctcatgggatacagcccagcagggggggcgacatcccccggggtctaccaggtatccatcttttcccctccggctggtacctctgagcctcacagggccctgaaacgacaagccccacccactgagggtccccgggagctgaagagaggccctgggctgggggccagagagggactaccccctgaagaaccatatactgtggggcttttgggcccagagggactggggctgggactaggtgtggccagccagcatttctcccaccgtggcctctgtgttgtggaacagagaagtagtgtcacctcatcttggacttcagggacctggagnnnnnnnnnnnnnnatcaaatgcttcctgcaatactttgcacaccagagactgggcctccccagatccagggggacacgggtccctgggggagtccccagggccagcccctccannnnnnnnnnnnnnnnnnnnnnnnnnnnnnnnnnnnnnnnnnnnnnnnnnnnnnnnnnnnnnnnnnnnnnnnnnnnnnnnnnnnnnnnnnnnnnnnnnnnnnnnnnnnnnnnnnnnnnnnnnnnnnnnnnnnnnnnnnnnnnnnnnnnnnnnnnnnnnnnnnnnnnnnnnnnnnnnnnnnnnnnnnnnnnnnnnnnnnnnnnnnnnnnnnnnnnnnnnnnnnnnnnnnnnnnnnnnnnnnnnnnnnnnnnnnnnnnnnnnnnnnnnnnnnnnnnnnnnnnnnnnnnnnnnnnnnnnnnnnnnnnnnnnnnnnnnnnnnnnnnnnnnnnnnnnnnnnnnnnnnnnnnnnnnnnnnnnnnnnnnnnnnnnnnnnnnnnnnnnnnnnnnnnnnnnnnnnnnnnnnnnnnnnnnnnnnnnnnnnnnnnnnnnnnnnnnnnnnnnnnnnnnnnnnnnnnnnnnnnnnnnnnnnnnnnnnnnnnnnnnnnnnnnnnnnnnnnnnnnnnnnnnnnnnnnnnnnggaatcattgctgcgagcattttttgcaccatctggccacattgagggcttcacagcagaaattggagctagtgggtcatactgcccccagcatgtcacgctgcctgtcactgtcacattctttgatgtttctgagcaaaatgccccggctcccttcctggngggcatcgtggatctgaaccccctggggaggaagggttacagcgtgcccaaggtgggcaccgtccaagtg

SEQ ID NO: 28674 - DNA, 829 bp, Macaca Mulatta
  misc_feature (1)...(829): n = A,T,C or G
ggcatgtttaattttatttgactttatgacattgcttttcaacaagcaaatgttcttgtgaggcaaaaagtaaaacatgtttaattttatttgactttatgacattgcttttcaacaagcaaatgttaaatgtgttaagacttgtactagtgttgcaactttccaagtaaaagtatccctaaaggccacttcctatcttgatttttcccagtaaatgaggcaagcaattctaagatcttccacagaacatctagccatctaaaatggagagatgaatcattctacctatacaaacaagctagctactagagggtggttggggtatgctacttacaagatttcagggtgtcttccaactgaaatctcaatgttctcagtatgaaaaacctgaaatcacatgcctgtgtaaggaaagtgctattcacccagtaaacccaaaaaagcaaatggataatgctggccattttgcctttctcacatttccttgggaatctgcaagaacctcccctttcccctcccccaataagaccatttaagtgtgtgttaaacaactacagaatactaaataaaaagtttggccaaaaccaaccatggaagctgcnnnnnnnnnnnnnnnnnnnnnnnnnnnnncccattgtcggnnnnnnnnnnnnnnnnnnnnnnnnnnnnnaaaaccatttccgtttggccgccgcggggcccccgttagggtaagtgaaacatggtccaatagcctgttttccctaaggaaaatcctgggccaagaaccaagggcctggggaattcnnnnnnnnnnnnnnnnnnnnnngggcggggcaaccgaaacgtt

SEQ ID NO: 28675 - DNA, 582 bp, Macaca Mulatta
atgaaggaaaaggtgagtccaggtttgagtgagtagaactacagctatacttttttctttaatttaaaaagaaaaggagtcggagcggcggcggcgggtcatgcgggacgcggatgcagacgcaggcggaagcaccaactgcggggatagccagggtgaccacagctgccccggtggcgcggacacagcggcagctccagccggcggagctcccccacctcacgcctcaggtcctggcagagacgccaagtctgtggccagggggccaggaatgcggccacacgtattcaccctcagcatgccttttccgacccccttagaggcggaaattgcccgtgggtccctggctccagatgctgagccccaccaaagggtggttgggaagaatctcgcagtgagcggcaggatcttggccgtccgctgggaagctgaagactgtcgcctgctccgaatttccgttatcaactttctcgaccatctttctctggtggtgcagaccatgcagcactttgggccccccgtttcccgctaagcctggtctggcaaaatggggcgaggtctaaccttgcgtctcctcctagg

SEQ ID NO: 28676 - DNA, 748 bp, Macaca Mulatta
  misc_feature (1)...(748): n = A,T,C or G
caaaagaagatcttgggtaaaatggtgtccaaatccatcgccaccaccttaatagatgacacgagtagtgaggtgctggatgagctctacagagtgaccagggagtacacccaaaacaagaaggaggcagagaagatcatcaagaaccttatcaagacggtcatcaagctggccattctttacaggaataatcagtttaatcaagatgagctagcactgatggagaaatttaagaagaaagttcatcaacttgctatgaccgtggtcagtttccaccaggtggattatacctttgaccggaatgtgttatccaggctgttaaatgaatgcagagagatgctgcaccaaatcattcagcgtcacctcactgccaagtcacatggacgggttaataatgtctttgatcatttttcagattgtgactttttggctgccttgtataatccttttgggaattttaaacctcacttacaaaaactatgtgatggtatcaacaaaatgttggatgaagagaacatatgagcgcatgagttaagattgtgactgatcgtgattgatttgaagatggagcactgctgatttatgaagganaaaagaagaattttctaaagattacacatatttcagaaagactttgcccaattcagttgtcagacataatgatttatttgaaggcttgttttatttgaagaanagcatattgccaaaaattctggttaaaagcttccaaacgggtaacagaccatgg

SEQ ID NO: 28677 - DNA, 460 bp, Macaca Mulatta
aagtcacttctctctacccttttcaatgtgctaatgctgttttatttatctagggctcaaatcctagaacacaaggtgctgtgttcagttttgttgcccaatatcacagaattggttacctaaccttgactcagtttctaccttgttgttacggaagcatatacacaactaattacaaagcagagtgtgatgtgtcataataagcagaatgctagggggaattcagaagctggagataaatttcagctggaataattaggaaatacttatgagaggcagtgacatttgagcttagtcttggaggatagggagacttaagtaggcaaaagatggttttagggcaatgtgttgaaggcctttagaggccaggtcagtaacggaagcaagtgaaactggcatgctttgtgtgactgatggcaactgtgaacaaatggagatgtccaatggagacacctgctac

SEQ ID NO: 28678 - DNA, 2738 bp, Macaca Mulatta
  misc_feature (1)...(2738): n = A,T,C or G
aggccagcaagctggtgatgtcttatgtggctgccatctgtgggaaaggagagcaggtgaactctgtgaaggagcagctgctgcagtctaatccagtgctggaggngcttttggcaatgccaagaccattcgcaacaacaattcctcccgatttgnggaaagtacatggatattgaatttgacttcaagggatgccccctcggtggtgtcatcacgaactnnnnnnnnnnnnnnnnnnnnnnnnnnnnnnnnnnnnnnnnnnnnnnnnnnnnnnnnnnnnnnnnnnnnnnnnnnnnnnnnnnnnnnnnnnnnnnnnnnnnnnnnnnnnnnnnnnnnnnnnnnnnnnnnnnnnnnnnnnnnnnnnnnnnnnnnnnnnnnnnnnnnnnnnnnnnnnnnnnnnnnnnnnnnnnnnnnnnnnnnnnnnnnnnnnnnnnnnnnnnnnnnnnnnnnnnnnnnnnnnnnnnnnnnnnnnnnnnnnnnnnnnnnnnnnnnnnnnnnnnnnnnnnnnnnnnnnnnnnnnnnnnnnnnnnnnnnnnnnnnnnnnnnnnnnnnnnnnnnnnnnnnnnnnnnnnnnnnnnnnnnnnnnnnnnnnnnnnnnnnnnnnnnnnnnnnnnnnnnnnnnnnnnnnnnnnnnnnnnnnnnnnnnnnnnnnnnnnnnnnnnnnnnnnnnnnnnnnnnnnnnnnnnnnnnnnnnnnnnnnnnnnnnnnnnnnnnnnnnnnnnnnnnnnnnnnnnnnnnnnnnnnnnnnnnnnnnnnnnnnnnnnnnnnnnnnnnnnnnnnnnnnnnnnnnnnnnnnnnnnnnnnnnnnnnnnnnnnnnnnnnnnnnnnnnnnnnnnnnnnnnnnnnnnnnnnnnnnnnnnnnnnnnnnnnnnnnnnnnnnnnnnnnnnnnnnnnnnnnnnnnnnnnnnnnnnnnnnnnnnnnnnnnnnnnnnnnnnnnnnnnnnnnnnnnnnnnnnnnnnnnnnnnnnnnnnnnnnnnnnnnnnnnnnnnnnnnnnnnnnnnnnnnnnnnnnnnnnnnnnnnnnnnnnnnnnnnnnnnnnnnnnnnnnnnnnnnnnnnnnnnnnnnnnnnnnnnnnnnnnnnnnnnnnnnnnnnnnnnnnnnnnnnnnnnnnnnnnnnnnnnnnnnnnnnnnnnnnnnnnnnnnnnnnnnnnnnnnnnnnnnnnnnnnnnnnnnnnnnnnnnnnnnnnnnnnnnnnnnnnnnnnnnnnnnnnnnnnnnnnnnnnnnnnnnnnnnnnnnnnnnnnnnnnnnnnnnnnnnnnnnnnnnnnnnnnnnnnnnnnnnnnnnnnnnnnnnnnnnnnnnnnnnnnnnnnnnnnnnnnnnnnnnnnnnnnnnnnnnnnnnnnnnnnnnnnnnnnnnnnnnnnnnnnnnnnnnnnnnnnnnnnnnnnnnnnnnnnnnnnnnnnnnnnnnnnnnnnnnnnnnnnnnnnnnnnnnnnnnnnnnnnnnnnnnnnnnnnnnnnnnnnnnnnnnnnnnnnnnnnnnnnnnnnnnnnnnnnnnnnnnnnnnnnnnnnnnnnnnnnnnnnnnnnnnnnnnnnnnnnnnnnnnnnnnnnnnnnnnnnnnnnnnnnnnnnnnnnnnnnnnnnnnnnnnnnnnnnnnnnnnnnnnnnnnnnnnnnnnnnnnnnnnnnnnnnnnnnnnnnnnnnnnnnnnnnnnnnnnnnnnnnnngggaaggtgttgagaaggtcctgggggagctgagcatgtcctcgggggagctggcctttggcaagacaaagatattcattagaagccccaagacnnnnnnnnnnnnnnnnnnnnnnnnnnnnnnnnnnnnnnnnnnnnnnnnnnnnnnnnnnnnnnnnnnnnnnnnnnnnnnnnnnnnnnnnnnnnnnnnnnnnnnnnnnnnnnnnnnnnnnnnnnnnnnnnnnnnnnnnnnnnnnnnnnnnnnnnnnnnnnnnnnnnnnnnnnnnnnnnnnnnnnnnnnnnnnnnnnnnnnnnnnnnnnnnnnnnnnnnnnnnnnnnnnnnnnnnnnnnnnnnnnnnnnnnnnnnnnnnnnnnnnnnnnnnnnnnnnnnnnnnnnnnnnnnnnnnnnnnnnnnnnnnnnnnnnnnnnnnnnnnnnnnnnnnnnnnnnnnnnnnnnnnnnnnnnnnnnnnnnnnnnnnnnnnnnnnnnnnnnnnnnnnnnnnnnnnnnnnnnnnnnnnnnnnnnnnnnnnnnnnnnnnnnnnnnnnnnnnnnnnnnnnnnnnnnnnnnnnnnnnnnnnnnnnnnnnnnnnnnnnnnnnnnnnnnnnnnnnnnnnnnnnnnnnnnnnnnnnnnnnnnnnnnnnnnnnnnnnnnnnnnnnnnnnnnnnnnnnnnnnnnnnnnnnnnnnnnnnnnnnnnnnnnnnnnnnnnnnnnnnnnnnnnnnnnnnnnnnnnnnnnnnnnnnnnnnnnnnnnnnnnnnnnnnnnnnnnnnnnnnnnnnnnnnnnnnnnnnnnnnnnnnnnnnnnnnnnnnnnnnnnnnnnnnnnnnnnnnnnnnnnnnnnnnnnnnnnnnnnnnnnnnnnnnnnnnnnnnnnnnnnnnnnnnnnnnnnnnnnnnnnnnnnnnnnnnnnnnnnnnnnnnnnnnnnnnnnnnnnnnnnnnnnnnnnnnnnnnnnnnnnnnnnngatgtcatcggtgggctccaagggggacttcctgctggtcagcgagcatgtgattgaactgctgaccaaaatgtaccgggctgtgctggatgccacacagaggcagcttgcagttaccgtgactgagaagt

SEQ ID NO: 28679 - DNA, 679 bp, Macaca Mulatta
actctggtctgggccctgtggccctctgggaagcttcgtaccccttttgggggatctcggggtggggagggacaagctagttccccaacctcctatggctgctttctatgctcacagccttttttccataagaaccttcttgaaacttctccctgcacatactcacagaaaggagccaatggtgctacttcccctctctcctcctcaacctgggaatacttcaggtatctccaaactcatccttgtgtatagtctcacacccttccccatatgtataaatgggcccatatttaacacattttgtgattttgggttatttattttgtgcatctgtggcaataaatgagatctcagcggtggtacggatttgactgatctctgcaactgtgtatggcaaaaggactggaaaatgaaaaccaaatcccagtaaggggtagagagggccaagagaactgaacatctgggctggcagagaaatcaaagtctaggaattaagaggtaggagtgtagcacaggggatataccccaatctctttgctccttccctcttccttcctatcctagagactcaggtccctgggactatattggatctgtctctgaagctgaaaaacaaaaggcggaggagatagttggctctaagtgaccaatctcagccatctttgtcagaaatcctaat

SEQ ID NO: 28680 - DNA, 556 bp, Macaca Mulatta
tgtttggacatattcctacctggcgatgctgctgcgtgtgtttgtcctcaccgattaagtccgctacaagccggtcatcatcttgcaaggtatcagtttcatcattacctggctgctgctcttgtttggccaaggagtgaagaccatgcaggttgtagagttcttatacgggatggtgaccgccaccgaggtggcctactacgcctacatatacagcgtggtcagccccgagcactaccagagagtgagcggctactgcaggagcgtcacgctggtcgcatacacagcagggtccgtgctggcccaactcttggtatccctggagaacaaataatacttttacctcaacgtcatatccttggcctctgtctccgtagccttccttttctcacttttcctaccaatgcccaagaaaagcatgttttttcatgcaaaatccagcagagaaataaagaagtcatcgagtgtgaatccagtattagaggaaactcacgaaggtgaagcgccagacttgaaaagcaggaacaacatcagaaatacccagcattcagggaag

SEQ ID NO: 28681 - DNA, 3261 bp, Macaca Mulatta
  misc_feature (1)...(3261): n = A,T,C or G
ccctctcaaccacaataacagacggagggtcggcgtaggnnnnnnnnnnnnnnnnnnnnnnnnnnnnnnnnnnnnnnnnnnnnnnnnnnnnnnnnnnnnnnnnnnnnnnnnnnnnnnnnnnnnnnnnnnnnnnnnnnnnnnnnnnnnnnnnnnnnnnnnnnnnnnnnnnnnnnnnnnnnnnnnnnnnnnnnnnnnnnnnnnnnnnnnnnnnnnnnnnnnnnnnnnnnnnnnnnnnnnnnnnnnnnnnnnnnnnnnnnnnnnnnnnnnnnnnnnnnnnnnnnnnnnnnnnnnnnnnnnnnnnnnnnnnnnnnnnnnnnnnnnnnnnnnnnnnnnnnnnnnnnnnnnnnnnnnnnnnnnnnnnnnnnnnnnnnnnnnnnnnnnnnnnnnnnnnnnnnnnnnnnnnnnnnnnnnnnnnnnnnnnnnnnnnnnnnnnnnnnnnnnnnnnnnnnnnnnnnnnnnnnnnnnnnnnnnnnnnnnnnnnnnnnnnnnnnnnnnnnnnnnnnnnnnnnnnnnnnnnnnnnnnnnnnnnnnnnnnnnnnnnnnnnnnnnnnnnnnnnnnnnnnnnnnnnnnnnnnnnnnnnnnnnnnnnnnnnnnnnnnnnnnnnnnnnnnnnnnnnnnnnnnnnnnnnnnnnnnnnnnnnnnnnnnnnnnnnnnnnnnnnnnnnnnnnnnnnnnnnnnnnnnnnnnnnnnnnnnnnnnnnnnnnnnnnnnnnnnnnnnnnnnnnnnnnnnnnnnnnnnnnnnnnnnnnnnnnnnnnnnnnnnnnnnnnnnnnnnnnnnnnnnnnnnnnnnnnnnnnnnnnnnnnnnnnnnnnnnnnnnnnnnnnnnnnnnnnnnnnnnnnnnnnnnnnnnnnnnnnnnnnnnnnnnnnnnnnnnnnnnnnnnnnnnnnnnnnnnnnnnnnnnnnnnnnnnnnnnnnnnnnnnnnnnnnnnnnnnnnnnnnnnnnnnnnnnnnnnnnnnnnnnnnnnnnnnnnnnnnnnnnnnnnnnnnnnnnnnnnnnnnnnnnnnnnnnnnnnnnnnnnnnnnctagatcttggttacctcatcattactgctgcccgtaggnnnnnnnnnnnnnnnnnnnnnnnnnnnnnnnnnnnnnnnnnnnnnnnnnnnnnnnnnnnnnnnnnnnnnnnnnnnnnnnnnnnnnnnnnnnnnnnnnnnnnnnnnnnnnnnnnnnnnnnnnnnnnnnnnnnnnnnnnnnnnnnnnnnnnnnnnnnnnnnnnnnnnnnnnnnnnnnnnnnnnnnnnnnnnnnnnnnnnnnnnnnnnnnnnnnnnnnnnnnnnnnnnnnnnnnnnnnnnnnnnnnnnnnnnnnnnnnnnnnnnnnnnnnnnnnnnnnnnnnnnnnnnnnnnnnnnnnnnagaccactcaagatggactcgattggttgatatcaacctagtacggtgccatgctttgaagctggactcttttggccagtttattgaattgttacccagcctagagtttatttcactggatcagatgtttcgtgaaccacccaaggnnnnnnnnnnnnnnnnnnnnnnnnnnnnnnnnnnnnnnnnnnnnnnnnnnnnnnnnnnnnnnnnnnnnnnnnnnnnnnnnnnnnnnnnnnnnnnnnnnnnnnnnnnnnnnnnnnnnnnnnnnnnnnnnnnnnnnnnnnnnnnnnnnnnnnnnnnnnnnnnnnnnnnnnnnnnnnnnnnnnnnnnnnnnnnnnnnnnnnnnnnnnnnnnncattaaatgagatggaagacatcgtnnnnnnnnnnnnnnnnnnnnnnnnnnnnnnnnnnnnnnnnnnnnnnnnnnnnnnnnnnnnnnnnnnnnnnnnnnnnnnnnnnnnnnnnnnnnnnnnnnnnnnnnnnnnnnnnnnnnnnnnnnnnnnnnnnnnnnnnnnnnnnnnnnnnnnnnnnnnnnnnnnnnnnnnnnnnnnnnnnnnnnnnnnnnnnnnnnnnnnnnnnnnnnnnnnnnnnnnnnnnnnnnnnnnnnnnnnnnnnnnnnnnnnnnnnnnnnnnnnnnnnnnnnnnnnnnnnnnnnnnnnnnnnnnnnnnnnnnnnnnnnnnnnnnnnnnnnnnnnnnnnnnnnnnnnnnnnnnnnnnnnnnnnnnnnnnnnnnnnnnnnnnnnnnnnnnnnnnnnnnnnnnnnnnnnnnnnnnnnnnnnnnnnnnnnnnnnnnnnnnnnnnnnnnnnnnnnnnnnnnnnnnnnnnnnnnnnnnnnnnnnnnnnnnnnnnnnnnnnnnnnnnnnnnnnnnnnnnnnnnnnnnnnnnnnnnnnnnnnnnnnnnnnnnnnnnnnnnnnnnnnnnnnnnnnnnnnnnnnnnnnnnnnnnnnnnnnnnnnnnnnnnnnnnnnnnnnnnnnnnnnnnnnnnnnnnnnnnnnnnnnnnnnnnnnnnnnnnnnnnnnnnnnnnnnnnnnnnnnnnnnnnnnnnnnnnnnnnnnnnnnnnnnnnnnnnnnnnnnnnnnnnnnnnnnnnnnnnnnnnnnnnnnnnnnnnnnnnnnnnnnnnnnnnnnnnnnnnnnnnnnnnnnnnnnnnnnnnnnnnnnnnnnnnnnnnnnnnnnnnnnnnnnnnnnnnnnnnnnnnnnnnnnnnnnnnnnnnnnnnnnnnnnnnnnnnnnnnnnnnnnnnnnnnnnnnnnnnnnnnnnnnnnnnnnnnnnnnnnnnnnnnnnnnnnnnnnnnnnnnnnnnnnnnnnnnnnnnnnnnnnnnnnnnnnnnnnnnnnnnnnnnnnnnnnnnnnnnnnnnnnnnnnnnnnnnnnnnnnnnnnnnnnnnnnnnnnnnnnnnnnnnnnnnnnnnnnnnnnnnnnnnnnnnnnnnnnnnnnnnnnnnnnnnnnnnnnnnnnnnnnnnnnnnnnnnnnnnnnnnnnnnnnnnnnnnnnnnnnnnnnnnnnnnnnnnnnnnnnnnnnnnnnnnnnnnnnnnnnnnnnnnnnnnnnnnnnnnnnnnnnnnnnnnnnnnnnnnnnnnnnnnnnnnnnnnnnnnnnnnnnnnnnnnnnnnnnnnnnnnnnnnnnnnnnnnnnnnnnnnnnnnnnnnnnnnnnnnnnnnnnnnnnnnnnnnnnnnnnnnnnnnnnnnnnnnnnnnnnnnnnnnnnnnnnnnnnnnnnnnnnnnnnnnnnnnnnnnnnnnnnnnnnnnnnnnnnnnnnnnnnnnnnnnnnnnnnnnnnnnnnnnggtgttgtggatggagctccatattccatgatttctgacttcccttggctgaggtcattacgagcagcagagcccaacagcttcgctcgatacgactttgaagatgatgaagaaag

SEQ ID NO: 28682 - DNA, 115 bp, Macaca Mulatta
cagctggaggagtcagagttcacctgtgcggcagccgtgaaagcacggaaagcaatggaggtagagatcgaagacctgcacctgcagattgatgacatcgccaaagccaagacag

SEQ ID NO: 28683 - DNA, 91 bp, Macaca Mulatta
agagccacaatggagagtcacctagacactccctacaatgtcccagatgtggtcatctccatagccaacaatgatgtcgatctgatcatca

SEQ ID NO: 28684 - DNA, 641 bp, Macaca Mulatta
gatcctcatcaaggtcaagggaatgacactgaccacatctcggctgctggcccctggctcaagttccgtgggcacttggacaacatctccaacaacctgctcattggtgccatcaacattgaaaatggcaaggccaactccgtgcgcaatgccgtcactcaggagtttggccccgtccctgtacactgcccgctactacaagaaacatggcatcaggtgggtggtgatcggagacgagaactacggcgagggctcgagccgggagcatgcagctctggagcctcgccaccttggtgcccgggccatcatcaccaagagctttgccaggatccacgagaccaacctgaagaaacagggcctgctgcccctgaccttcgcggacccagccgactacaacaagattcaccctgtggacaagctgaccattcaagggctaaaggacttcacccctggcaagcccctgaagtgcatcatcaagcaccccaacgggacccaggagaccatcctcctgaaccacaccttcaacgagacgcagatcgagtggttccgcgccggcagtgccctcaacagaatgaaggagctgcagcagtgagggcaatgccgccccgccccagcgctggcctcaagttcagcccacgtgc

SEQ ID NO: 28685 - DNA, 185 bp, Macaca Mulatta
tcccaagaagatcacgtcctggtttctctccaaggggcagggaaagacacgggatgactctgccgactacatcccccatgacatttacgtgatcggcacccaggaagaccccctgagtgagaaggagtggctggagatcctcaaacactccctgcaagaaatcaccagcatgacgtttaaaacag

SEQ ID NO: 28686 - DNA, 261 bp, Macaca Mulatta
agcctgtgatcagctgtctcttggggtggctgccatcttcgggccttcacacagctcatcagcaaatgcagtgcagtccatctgcaatgctctgggagttccccacatacagacccgctggaagcaccaggtgtcagacaacaaagattccttctatgtcagtctctacccagacttctcttcactcagccgtgccattttagacctggtgcagtttttcaagtggaaaaccgtcacggttgtgtatgatgacagcactgg

SEQ ID NO: 28687 - DNA, 806 bp, Macaca Mulatta
  misc_feature (1)...(806): n = A,T,C or G
gggaactcggtggtggccactgttcagaccagacttcgctcgttttcgtgcgcctcgctccgcttttcctccgcaaccatgtctgacaaacccgatatggctgagatcgagaaattcgataagtcgaaactgaagaagacagagacgcaagagaaaaatccactgccttccaaagaaacgattgaacaggagaagcaagcaggcgaatcgtaatgaggcgtgcgccgccaatatgcactgtacattccacaagcattgccttcttattttacttcttttagctgtttaactttgtaagatgcaaagaggttggatcaagtttaaatgactgtgctgcccctttcacatcaaagaactactgacaacgaaggccgcgcctgcctttcccatctgtctatctggctggcagggaaggaaagaacttgcatgttggtgaaggaagaagtggggtggaagaagtgggggtgggacgacagtgaaatctagagtaaaaccaagctggcccaaggtgtcctgcaggctgtaatgcagtttaatcagagtgccattttttttttgttcaaatgattttaattatcggaatgcacaatttttttaatatgcaaataaaaagtttaaaaacttagnctggtgtgtctggtcatctggaaaggatcnccgggatgaaaaccttttgcaaaggaggccctaaccttcttgggttccactggggggaagggacaaagatttgtgggcccgccttgggcccctaaaaaaaccttttttctaaaccattttttttttgtggccccgggggccccccaaag

SEQ ID NO: 28688 - DNA, 630 bp, Macaca Mulatta
  misc_feature (1)...(630): n = A,T,C or G
gctggggcccagagaaagacaggcaaagctgtccatcttgcagatggacagaggggccccacaacatggctcacgctggtgcccagagaaagaggtaagctgctgaccctgaaggcaagggnnnnnnnnnnnnnnnnnnnnnnnnnnnnnnnnnnnnnnnnnnnnnnnnnnnnnnnnnnnnnnnnnnnnnnnnnnnnnnnnnnnnnnnnnnnnnnnnnnnnnnnnnnnnnnnnnnnnnnnnnnnnnnnnnnnnnnnnnnnnnnnnnnnnnnnnnnnnnnnnnnnnnccttgctatctggaacatgtttccagtagagtctctatttcctggatctcagccnnnnnnnnnnnnnnnnnnnnnnnnnnnnnnnnnnnnnnnnnnnnnnnnnnnnnnnnnnnnnnnnnnnnnnnnnnnnnnnnnnnnnnnnnnnnnnnnnnnnnnnnnnnnnnnnnnnnnnnnnnnnnnnnnnnnnnnnnnnnnnnnnnnnnnnnnnnnnnnnnnnnnnnnnnnnnnnnnnnnnnnnnnnnnnnnnnnnnnnnnnnnnnnnnnnnnnnnnnnnnnnnnnnnnnnnnntgtatggatcatgttttacttcatgtggatgtgaactgtttgaagtccctgccctg

SEQ ID NO: 28689 - DNA, 1426 bp, Macaca Mulatta
  misc_feature (1)...(1426): n = A,T,C or G
natctccttccgtcggcccggccagaatcagctgccctctcaggctgtgtgggtggtttccccggcggcagctacgtgtgggcgtagattgctgggcctcagtgcacaccagcctccgctacgcgagttctgagctggagctggcggctcttttgactctgcttcactgttgctgctggcaacatccacttccgggagcgagtgccgtttccctagctcactgcgggctcgggagcgtggggttcgggcccccgagcggctgttgttagtacgtcgccgctgctggcgatccggcgaccctcggccggccggatccgcgggccacacagcccgggccttctcaccgcctcagtgcctcggcgggaccgccatggttctgctgcacgtgaagcggggcgacgagagccagttcctgctgcaggcgcctgggagcaccgagctggaggagctcacggtgcaggtggcccgggtctataatgggcgcctcaaggtgcagcgcctctgctcanagaaatggaagaattagctgaacatggcatatttctccctcctaatatgcaaggactgactgatgatcagattgaagaattgaaattgaaagatgaatggggtgaaaaatgtgtacccagtggaggtgcagtatttaaaaaggatgatattggacgaaggaatgggcaannnnnnnnnnnnnnnnnnnnnnnnnnnnnnnnnnnnnnnnnnnnnnnnnnnnnnnnnnnnnnnnnnnagaaacaagtggaagccggtgtctgtgttacgatggagatggtgaaagatgccttggatcagcttcgaggcgcggtgatgattgtttaccccatggggttgccaccgtatgatcccatccgcatggagtttgaaaataaggaagatttgtcgggaacgcagnnnnnnnnnnnnnnnnnnnnnnnnnnnnnnnnnnnnnnnnnnnnnnnnnnnnnnnnnnnnnnnnnnnnnnnnnnnnnnnnnnnnnnnnnnnnnnnnnnnnnnnnnnnnnnnnnnnnnnnnnnnnnnnnnnnnnnnnnnnnnnnnnnnnnnnnnnnnnnnnnnnnnnnnnnnnnnnnnnnnnnnnnnnnnnnnnnnnnnnnnnnnnnnnnnnnnnnnnnnnnnnnnagagataggaagaaaatgatgacgacgcctgtttaaactcaccatgggcggataacactgctttgaaaagacattttcatggagtaaaagacataaagtggagaccaagatgaagttcaccagctgatgacgcttccaaagagattagctcacctttctcctaggcgattataattttaaaaaggccacttaccaccctctgtaaaagatgttaacatttctagttttcttagttttcttttagtgtgaattttaaaaatagcagttcttcaagattttagaacttaataaatac

SEQ ID NO: 28690 - DNA, 832 bp, Macaca Mulatta
atgggtattttgttttgtctgttgagcagtatttagaactttctgacagtgccaacaatattcactttatgagacagagcgaaataggcaggaggtaacaaaaaaaatctctgcctttgcgtcaccaaagactgcctgtttttaaaacataaaatggtttattgtattggttttctagatcagaactctgtatatgtaaatatggaggaaaaacatatccaactgcctttcaatgtgacggaagatggtattttaatattgtttgtttaaactctttaagaaatgacagagatttttatttcttgtgtggcagtattcaaaataacacaagtagaactcaaacagctaaaaacagttttcggaaagcaccactttcaatttgccgagccatgcatatgttccaatatccagaaagaacccaaggttctctatttctattgtgacaagcagtttcatccttaactgttggcagaaattgtgggctatttgaataggtggtgcagtagtatctgaaccttgcatttcaaaagactgccagccctttcacattttccagatctgttataggaaacttaaaaacaggtgtaaaatgtcttcagccaccatctcctagagtcaggacccaattgcccttccttcttgattattcctccttgcttgttaaagtaaatgccatattgttgtgctgtgttttggcatgtggtggctgggttctgtctaccatgcttccctgtgggtgtggtaactagactgaatagccactatttgctcatgtgtacgtgataccaaagcagctggccagcgtgacctctctctcacacaacctgttttg

SEQ ID NO: 28691 - DNA, 1907 bp, Macaca Mulatta
  misc_feature (1)...(1907): n = A,T,C or G
ctaagcaacctggggatccctggagtgtgggctttccatatcggcagcacttccctgttggacaacgtcaggccagccgcagttggaggagacctttccactgcccgctcttctgttcccctgggacgttccttcagccatgctacagccctggaaagtgactataatgaggacaatttggattactatgatgtgaatgaggaggaagctgaataccttccgggtgaaccagaggaggcattgaatggccacagcagcattgatgtttccttccagtccaaagtagatacaaagcctttagaggnnnnnnnnnnnnnnnnnnnnnnnnnnnnnnnnnnnnnnnnnnnnnnnnnnnnnnnnnnnnnnnnnnnnnnnnnnnnnnnnnnnnnnnnnnnnnnnnnnnnnnnnnnnnnnnnnnnnnnnnnnnnnnnnnnnnnnnnnnnnnnnnnnnnnnnnnnnnnnnnnnnnnnnnnnnnnnnnnnnnnnnnnnnnnnnnnnnnnnnnnnnnnnnnnnnnnnnnnnnnnnnnnnnnnnnnnnnnnnnnnnnnnnnnnnnnnnnnnnnnnnnnnnnnnnnnnnnnnnnnnnnnnnnnnnnnnnnnnnnnnnnnnnnnnnnnnnnnnnnnnnnnnnnnnnnnnnnnnnnnnnnnnnnnnnnnnnnnnnnnnnnnnnnnnnnnnnnnnnnnnnnnnnnnnnnnnnnnnnnnnnnnnnnnnnnnnnnnnnnnnnnnnnnnnnnnnnnnnnnnnnnnnnnnnnnnnnnnnnnnnnnnnnnnnnnnnnnnnnnnnnnnnnnnnnnnnnnnnnnnnnnnnnnnnnnnnnnnnnnnnnnnnnnnnnnnnnnnnnnnnnnnnnnnnnnnnnnnnnnnnnnnnnnnnnnnnnnnnnnnnnnnnnnnnnnnnnnnnnnnnnnnnnnnnnnnnnnnnnnnnnnnnnnnnnnnnnnnnnnnnnnnnnnnnnnnnnnnnnnnnnnnnnnnnnnnnnnnnnnnnnnnnnnnnnnnnnnnnnnnnnnnnnnnnnnnnnnnnnnnnnnnnnnnnnnnnnnnnnnnnnnnnnnnnnnnnnnnnnnnnnnnnnnnnnnnnnnnnnnnnnnnnnnnnnnnnnnnnnnnnnnnnnnnnnnnnnnnnnnnnnnnnnnnnnnnnnnnnnnnnnnnnnnnnnnnnnnnnnnnnnnnnnnnnnnnnnnnnnnnnnnnnnnnnnnnnnnnnnnnnnnnnnnnnnnnnnnnnnnnnnnnnnnnnnnnnnnnnnnnnnnnnnnnnnnnnnnnnnnnnnnnnnnnnnnnnnnnnnnnnnnnnnnnnnnnnnnnnnnnnnnnnnnnnnnnnnnnnnnnnnnnnnnnnnnnnnnnnnnnnnnnnnnnnnnnnnnnnnnnnnnnnnnnnnnnnnnnnnnnnnnnnnnnnnnnnnnnnnnnnnnnnnnnnnnnnnnnnnnnnnnnnnnnnnnnnnnnnnnnnnnngtgcttagatttgcttcgaccaatcagattggcccggtnnnnnnnnnnnnnnnnnnnnnnnnnnnnnnnnnnnnnnnnnnnnnnnnnnnnnnnnnnnnnnnnnnnnnnnnnnnnnnnnnnnnnnnnnnnnnnnnnnnnnnnnnnnnnnnnnnnnnnnnnnnnnnnnnnnnnnnnnnnnnnnnnnnnnnnnnnnnnnnnnnnnnnnnnnnnnnnnnnnnnnnnnnnnnnnnnnnnnnnnnnnnnnnnnnnnnnnnnnnnnnnnnnnnnnnnnnnnnnnnnnnnnnnnnnnnnnnnnnnnnnnnnnnnnnnnnnnnnntgatcaccccacctcccaacccctgtgaggatggcagtcatacctgtgctcctgctggacaggcccggtgtgttcaccacggaggcagcgcgttcagctgtgcctgcctgcctggttatgctggcgacgggcaccagtgcact

SEQ ID NO: 28692 - DNA, 4180 bp, Macaca Mulatta
  misc_feature (1)...(4180): n = A,T,C or G
aagtagtaacatttctggtagacagaaagtgccagcttgacgtccttgatggtgaaaacaggacacctctgatgaagganncaggctctacaatgccagagggaggattgtgcaaatattctggtagactctggtgccggtctaaatattgtagatgtgtatggcaacacagctctccattatgctgtttataataagaatttgtcagtggtggcaaaactgctgtcccacggtgcagtnnnnnnnnnnnnnnnnnaggctagcctcacaccacttttactggccataacgaaaagaagtgagcaaattgtggaatttttactgacaaaaaatgcaaatgcgaatgcagtcaataggtttaaatcacagctctcatgctcgctgtatgtcatggatcatcatagatagtcggcatgctgcttctgcgaaatgttgacgtctttgctgaagatacgtgtggaatgactgcactacgttatgctattgcttgtggatttgatcacattcatcaacaacttttggaatatatacgaaaattatctaaaaannnnnnnnnnnnnnnnnnnnnnnnnnnnnnnnnnnnnacctgacgaggccgcacccttggtggagggaacacctgacacagctgaaagcttggtggaaaaatcacctgacgaggccgcacccttggtggaggcaacacctgacacagctgaaagcttggtggaaaaaacacctgatgaggctgcacccttggtggagggaacacctgacaaaattcaatgtttggggaaagcgacatctggaaagttggaacagttagcagaagannnnnnnnnnnnnnnnnnnnnnnnnnnnnnnnnnnnnnnnnnnnnnnnnnnnnnnnnnnnnnnnnnnnnnnnnnnnnnnnnnnnnnnnnnnnnnnnnnnnnnnnnnnnnnnnnnnnnnnnnnnnnnnnnnnnnnnnnnnnnnnnnnnnnnnnnnnnnnnnnnnnnnnnnnnnnnnnnnnnnnnnnnnnnnnnnnnnnnnnnnnnnnnnnnnnnnnnnnnnnnnnnnnnnnnnnnnnnnnnnnnnnnnnnnnnnnnnnnnnnnnnnnnnnnnnnnnnnnnnnnnnnnnnnnnnnnnnnnnnnnnnnnnnnnnnnnnnnnnnnnnnnnnnnnnnnnnnnnnnnnnnnnnnnnnnnnnnnnnnnnnnnnnnnnnnnnnnnnnnnnnnnnnnnnnnnnnnnnnnnnnnnnnnnnnnnnnnnnnnnnnnnnnnnnnnnnnnnnnnnnnnnnnnnnnnnnnnnnnnnnnnnnnnnnnagagcctcctgagaagtcatctgccttcaannnnnnnnnnnnnnnnnnnnnnnnnngcctgctgttgacatgcaaaactctgttccaaatgaagccttcgaatggaagaatgaacaaacgttgagannagatcagatgatcccatcagaatccaaacaaaaggaagaggaagaaaattcttgggattnnnnnnnnnnnnnnnnnnnnnnnnnnnnnnnnnnnnnnnnnnnnnnnnnnnnnnnnnnnnnnnnnnnnnnnnnnnnnnnnnnnnnnnnnnnnnnngagtctcctcataaagatggtcttcttaagnnnnnnnnngaatgaaagtttctattccaaataaagccttagaagtgaaggatatacaaacattcaaagcagnnnnnnnnnnnnnnnnnnnnnnnnnnntagcctgccactgaaatacaaaactcttttccaaatgaagccttcgaannnnnnnnnnnnnnnnnnnnnnnnnnnnnnnnnnnnnnnnnnnnnnnnnnnnnnnnnnnnnnnnnnnnnnnnnnnnnnnnnnnnnnnnnnnnnnnnnnnnnnnnnnnnnnnnnnnnnnnnnnnnnnnnnnnnnnnnnnnnnnnnnnnnnnnnnnnnnnnnnnnnnnnnnnnnnnnnnnnnnnnnnnnnnnnnnnnnnnnnnnnnnnnnnnnnnnnnnnnnnnnnnnnnnnnnnnnnnnnnnnnnnnnnnnnnnnnnnnnnnnnnnnnnnnnnnnnnnnnnnnnnnnnnnnnnnnnnnnnnnnnnnnnnnnnnnnnnnnnnnnnnnnnnnnnnnnnnnnnnnnnnnnnnnnnnnnnnnnnnnnnnnnnnnnnnnnnnnnnnnnnnnnnnnnnnnnnnnnnnnnnnnnnnnnnnnnnnnnnnnnnnnnnnnnnnnnnnnnnnnnnnnnnnnnnnnnnnnnnnnnnnnnnnnnnnnnnnnnnnnnnnnnnnnnnnnnnnnnnnnnnnnnnnnnnnnnnnnnnnnnnnnnnnnnnnnnnnnnnnnnnnnnnnnnnnnnnnnnnnnnnnnnnnnnnnnnnnnnnnnnnnnnnnnnnnnnnnnnnnnnnnnnnnnnnnnnnnnnnnnnnnnnnnnnnnnnnnnnnnnnnnnnnnnnnnnnnnnnnnnnnnnnnnnnnnnnnnnnnnnnnnnnnnnnnnnnnnnnnnnnnnnnnnnnnnnnnnnnnnnnnnnnnnnnnnnnnnnnnnnnnnnnnnnnnnnnnnnnnnnnnnnnnnnnnnnnnnnnnnnnnnnnnnnnnnnnnnnnnnnnnnnnnnnnnnnccgtgagactgtttcacagaaggatgtgtgtttacccaaggctacacctcaaaaagaattccatatgataagtgaaaaattagaaagattcaactagcctatcaaaaagcttggatgcagttccttcttgtaaaagagcaagggaacttaaaaaacatcactgtgaaaaacttacagcaaaacttgaacgaatgaaaaataagttttgtgtactaaaaaaggaactatcagaaacaaaagaaataaactcacagttagagaatcaaacagttaaatgggaacaagagctctgcagtgtgagnnnnnnnnnnnnnnnnnnnnnnnnnnnnnnnnnnnnnnnnnatatattaaatgaaaaaattaggaaagaattaggaagaattgaagagcaacataggaaagagttagaagtgaaacaagaacttgaacaggctctcagaatacaagatatggaagtgaagagtgtaagaagtaatttgagtcaggnnaggtttctcacgctcatgaaaatgaaaataatctcctacatgaaaatcgcatgttgaaaaaggaaattgccatgctaaaactggaaatagccaaactaaaacaccaacaccaggagaaggaaaataaatactttaaggacattaagattttaaaagaaaagaatgctgaacttcaaatgactctaaaactgaaagaggaatcattaacaaaaagggcatctcaatatagtgggcagcttaaagttctgatggctgagaacacagagctcacttctaaattgaaggaaaaacaagacaaagaaatacgagagagagaaattgaatcataccatcctagactggcttctgctgtacaagaccgtgatcaaattgtgacatcaagaaaaagccaaggacttgctttccacactgcaggagatgcttgtctgcaagacaaaattaatgttgatgtgaataatacaatatataacaatgaggtgctccatcaaccactttctgaagctcaaaggaaatccaaaagcctaaaaattaatctcaattatgcaggagatgctctgagggaaaatacattggtttcagaacatgcacaaagagagcgagatgaaacacagtatcaaatgaagaaagctgaacacatgtatcaaaatgaacaagataatgtgaacatacacgatgaacagcaggagtctctggagcagaaattatttcaactacaaagcaaaaatctgtggcttcgacagcaattaattcatgcacataagaaagctgataacaaaagcaagataacaattaatattccgcttcttgagaggaaaatgcaacatcatctcctaaaagagaaaaatgaggagnnnnnnnnnnnnnnnnnnnnnnnnnnnnnnnnnnnnnnnnnnnnnnnnnnnnnnnnnnnnnnnnnnnnnnnnnnnnnnnnnnnnnncagtaagaaacttcttttggagaaacaacagaccagatctttattcacaactcatgctatgaggccagtcccagaattaccttgtgttgcaaatcttaccaatagtttgagtcgacagaatacttattttagaagaaaaattcatgatttcttcctgaagcctacgacataaaataacagtgcaaagacctacttgttca

SEQ ID NO: 28693 - DNA, 576 bp, Macaca Mulatta
  misc_feature (1)...(576): n = A,T,C or G
ctggaagaagctgtcgtggtccatggcgcccaagaacgcgctggtgcagctgcacgagctgaggccgggcctgcagtaccggacagtgtcgcagacgggcccggtgcacgccccggtcttcgcggtagcggtggaggtgaacgggctcacgttcgagggcacgggccccaccaagaagaaggccaaaatgcgcgcggccgagctggcgctcaggtccttcgtgcagttccccaacgcctgccaggcgcatctggccatgggtggcggcccgggccctggcacggacttcacctctgaccaggcggatttccccgacacgctcttccaggnnnncccgtggtgctgctgaaccgcctgcgcgctgggctgcgctacgtgtgtctggcggaaccggctgagcggcgggcgcggagcttcgtgatggccgtgagcgtggatggcaggacgttcgagggctccgggcgcagcaagaagctggcccggggtcaggccgcgcaggccgcgctgcaggcgcttttcgacatccagatgcccggccacgcacccggcagggccaggaggacgaacaatgccgca

SEQ ID NO: 28694 - DNA, 1609 bp, Macaca Mulatta
  misc_feature (1)...(1609): n = A,T,C or G
agccgtccaggtcttctaaatgctggtgatcccagctatccatggcttgctgattcttggccagccacaagcttgccagtaaataatagtaatagtggcccaaatgatattggaaattttggccgtggagnnnnnnnnnnnnnnnnnnnnnnnnnnnnnnnnnnnnnnnnnnnnnnnnnnnnnnnnnnnnnnnnnnnnnnnnnnnnnnnnnnnnnnnnnnnnnnnnnnnnnnnnnnnnnnnnnnnnnnnnnnnnnnnnnnnnnnnnnnnnnnnnnnnnnnnnnnnnnnnnnnnnnnnnnnnnnnnnnnnnnnnnnnnnnnnnnnnnnnnnnnnnnnnnnnnnnnnnnnnnnnnnnnnnnnnnnnnnnnnnnnnnnnnnnnnnnnnnnnnnnnnnnnnnnnnnnnnnnnnnnnnnnnnnnnnnnnnnnnnnnnnnnnnnnnnnnnnnnnnnnnnnnnnnnnnnnnnnnnnnnnnnnnnnnnnnnnnnnnnnnnnnnnnnnnnnnnnnnnnnnnnnnnnnnnnnnnnnnnnnnnnnnnnnnnnnnnnnnnnnnnnnnnnnnnnnnnnnnnnnnnnnnnnnnnnnnnnnnnnnnnnnnnnnnnnnnnnnnnnnnnnnnnnnnnnnnnnnnnnnnnnnnnnnnnnnnnnnnnnnnnnnnnnnnnnnnnnnnnnnnnnnnnnnnnnnnnnnnnnnnnnnnnnnnnnnnnnnnnnnnnnnnnnnnnnnnnnnnnnnnnnnnnnnnnnnnnnnnnnnnnnnnnnnnnnnnnnnnnnnnnnnnnnnnnnnnnnnnnnnnnnnnnnnnnnnnnnnnnnnnnnnnnnnnnnnnnnnnnnnnnnnnnnnnnnnnnnnnnnnnnnnnnnnnnnnnnnnnnnnnnnnnnnnnnnnnnnnnnnnnnnnnnnnnnnnnnnnnnnnnnnnnnnnnnnnnnnnnnnnnnnnnnnnnnnnnnnnnnnnnnnnnggcacattcaaagcaataatcaacctccacagcctccggttccaccattaggttatgtgtccggagccttgatttctgatttggaaacagatgttccagatgatgatgctgacgacgaagaggaagctttagaaatccccaggcccctgagagcgctggaccagactcctggatccagtacggacaatctagacagctcggtgacaggnnnnnnnnnnnnnnnnnnnnnnnnnnnnnnnnnnnnnnnnnnnnnnnnnnnnnnnnnnnnnnnnnnnnnnnnnnnnnnnnnnnnnnnnnnnnnnnnnnnnnnnnnnnnnnnnnnnnnnnnnnnnnnnnnnnnnnnnnnnnnnnnnnnnnnnnnnnnnnnnnnnnnnnnnnnngatcttccaccaccaccagatcccccgccaggtcagggtctcaggcagcagataggctcgagccagcaggctggtaacgtggaaaactcaacagagagaaaaggaagctctctggagagacaacacgcatccgccctagaagacacaaagagctcactggatggtccaactagaacctccctagaatggcagcggcaaacccaggaacggataagctccacagaacgacaggaagagacacggaaagccccacacagacaaggggtcggatcag

SEQ ID NO: 28695 - DNA, 1998 bp, Macaca Mulatta
  misc_feature (1)...(1998): n = A,T,C or G
gcttggaagctcgaagtctggctgtggccatgggagatacagtagtggagcctgcccccctgaagccaacttctgagcccacttctggcccaccagggaataatggggggtccctgctaagtgtcatcacggagggggtcggggaattatcagtgattgatcctgaggtggcccagaaggcctgccaggaggtgttggagaaggtcaagcttttgcgtggaggcgtggcagtctctagcagaggcaccccactggagttggtcaatggggatggtgtggacagtgagatccgttgcctagatgatccacctgcccagatcagggaggaggaagatgagatgggggccacagtggcctcaggcacagccaaaggagcaagaagacggcggcagaacaactcagctaaacagtcttggctcctgaggctgtttgagtcaaaactgtttgacatctccatggccatttcatacctgtataactccaaggagcctggagtacaagcctacatcggcaaccggctcttctgctttcgcaatgaggacgtggacttctatctaccccagttgcttaacatgtacatccacatggatgaggacgtgngtgatgccattaagccctacatagtccaccgttgccgccagagcattaacttttccctccagtgtgccctgttgcttggggcctactcttcagannnnnnnnnnnnnnnnnnnnnnnnnnnnnnnnnnnnnnnnnnnnnnnnnnnnnnnnnnnnnnnnnnnnnnnnnnnnnnnnnnnnnnnnnnnnnnnnnnnnnnnnnnnnnnnnnnnnnnnnnnnnnnnnnnnnnnnnnnnnnnnnnnnnnnnnnnnnnnnnnnnnnnnnnnnnnnnnnnnnnnnnnnnnnnnnnnnnnnnnnnnnnnnnnnnnnnnnnnnnnnnnnnnnnnnnnnnnnnnnnnnnnnnnnnnnnnnnnnnnnnnnnnnnnnnnnnnnnnnnnnnnnnnnnnnnnnnnnnnnnnnnnnnnnnnnnnnnnnnnnnnnnnnnnnnnnnnnnnnnnnnnnnnnnnnnnnnnnnnnnnnnnnnnnnnnnnnnnnnnnnnnnnnnnnnnnnnnnnnnnnnnnnnnnnnnnnnnnnnnnnnnnnnnnnnnnnnnnnnnnnnnnnnnnnnnnnnnnnnnnnnnnnnnnnnnnnnnnnnnnnnnnnnnnnnnnnnnnnnnnnnnnnnnnnnnnnnnnnnnnnnnnnnnnnnnnnnnnnnnnnnnnnnnnnnnnnnnnnnnnnnnnnnnnnnnnnnnnnnnnnnnnnnnnnnnnnnnnnnnnnnnnnnnnnnnnnnnnnnnnnnnnnnnnnnnnnnnnnnnnnnnnnnnnnnnnnnnnnnnnnnnnnnnnnnnnnnnnnnnnnnnnnnnnnnnnnnnnnnnnnnnnnnnnnnnnnnnnnnnnnnnnnnnnnnnnnnnnnnnnnnnnnnnnnnnnnnnnnnnnnnnnnnnnnnnnnnnnnnnnnnnnnnnnnnnnnnnnnnnnnnnnnnnnnnnnnnnnnnnnnnnnnnnnnnnnnnnnnnnnnnnnnnnnnnnnnnnnnnnnnnnnnnnnnnnnnnnnnnnnnnnnnnnnnnnnnnnnnnnnnnnnnnnnnnnnnnnnnnnnnnnnnnnnnnnnnnnnnnnnnnnnnnnnnnnnnnnnnnnnnnnnnnnnnnnnnnnnnnnnnnnnnnnnnnnnnnnnnnnnnnnnnnnnnnnnnnnnnnnnnnnnnnnnnnnnnnnagtccatttgggaacaggagcgagtgcccctttggatcaagccatacaagattcttgtgatttcggctgatagtggcatgattgaaccagtggtcaacgctgtgtccatccatcaggtgaagaaacagtcacagctctccttgctcgattactttctacaggagcatggcagttacaccactgaggcattcctcagtgcccagagaaattttgtgcaaagttgtgctgggtactgcttggtctgctacctgctgcaagtcaaggacag

SEQ ID NO: 28696 - DNA, 807 bp, Macaca Mulatta
ggggaggccgggcggcgcgcgtgcgtgctggcgtgcgttcaccttcagcctggtgtgggccttttaaacatataacataaaaatggcttccaaaagagctctggtcatcctggctaaaggagcagaggaaatggagacggtcatccctgtagatgtcatgaggcgagctgggattaaggtcaccgttgcaggtctggctggaaaagacccagtacagtgtagccgtgatgtagtcatttgtcctgatgccagtcttgaagatgcaaaaaaagagggaccgtatgatgtggtggttctaccaggaggtaatctgggtgcacagaatttatctgagtctgctgccgtgaaggagatactgaaggagcaggaaaaccgggaagggcctgatagccgccatctgtgcaggtcctactgctcttttggctcatgaaataggttttgggaagtaaagttaccacacaccctcttgctaaagacaaaatgatgaatggaggtcattacacctactctgagaatcgtgtggaaaaaggacggcctgattcttacaagccggggggcctgggaaccaccttcaagttttgcgctttgcaattgtttggaaacccctgaaacgggcaaaggaggtgggcgggcttcaaggtgaaaggcttcccctttggtttctttaaaaaactaagagccagcgcaaaccggggaaatgaatccatttaagagaaaaacacgggccattttagggaagttcccttttctccccctaatgggttttgcccctctaaaaaaccacagaccaaatgggggtgagaggga

SEQ ID NO: 28697 - DNA, 975 bp, Macaca Mulatta
  misc_feature (1)...(975): n = A,T,C or G
gggttgnnnnnnnnnnnnnnnnnnnnncctgttagtttcaaaagtgactttgcttgcttaaaggttctgaagtaaaggcttgttaactttatcttagttttgatttgaggcatcccgtaaagttgtagttgcagaatcccaaactaggctacatttcaaaattcagggctgtttaagatttaaaatcacaaacgttaacggcagtaggcaccaccatgtaaaagtgagctcagacgtctctaaaaaatgtttcctttataaaagcacatggcggttgaatcttaaggttaaattttaatacgaaagatcctcatgaattaaatagttgatgcaatttttaacgttaattgatataaaacaacaacaaaattaggcttgtaaaactgactttttcattacgtgggttttgaaatctagccccagacatactgtgttgagagatacttagggggatggagtaggttttgaagaggttgatggtggtggggggagggaaggcctcctgaattgagtttgatgcagagctttttagccatgaagaatctttcagtcataggattaataattaaattttcagtatttaaaaagacaaaatattttgtccatttgagattctgcactcccataaaaggctcacttggaacgctggggccaaaaagctgatgattttcttaaagttgacgggttgtcaatatcgaaactgtttcccaagtttagtccagttatgtcctcaacacctagcattgatattaaaaaggggacacttgccggctggaatgaaaaagaggaatccaaaatccaccttttggtaattaaggttaaaagtccctaaatttggattttgttacggggtccttccccactttttgtttctccggaaagggttaaaatgcccacccatgttgtaaaattcctgcccctaaatatagggttaggctcttagaccttatttgcgtcaaaaaatgactctggcca

SEQ ID NO: 28698 - DNA, 3368 bp, Macaca Mulatta
  misc_feature (1)...(3368): n = A,T,C or G
aaggcatcacccagccaatgcctgtctgattcccatctgttctctgtatggtactgccgtcaccacagtagaaggcataggaagcacccacaccagaattcatcctgttcaggtgaggannnnnnnnnncaggagaggatcgccaagtgtcacggaacccagtgtggcttctgcacacccgggatggtgatgtccatctacacgctgctcaggaaccacccggagcccactctgcatcagttaactgatgnnnnnnnnnnnnnnnnnnnnnnnnnnnnnnnnnnnnnnnnnnnnnnnnnnnnnnnnnnnnnnnnnnnnnnnnnnnnnnnnnnnnnnnnnnnnnnnnnnnnnnnnnnnnnnnnnnnnnnnnnnnnnnnnnnnnnnnnnnnnnnnnnnnnnnnnnnnnnnnnnnnnnnnnnnnnnnnnnnnnnnnnnnnnnnnnnnnnnnnnnnnnnnnnnnnnnnnnnnnnnnnnnnnnnnnnnnnnnnnnnnnnnnnnnnnnnnnnnnnnnnnnnnnnnnnnnnnnnnnnnnnnnnnnnnnnnnnnnnnnnnnnnnnnnnnnnnnnnnnnnnnnnnnnnnnnnnnnnnnnnnnnnnnnnnnnnnnnnnnnnnnnnnnnnnnnnnnnnnnnnnnnnnnnnnnnnnnnnnnnnnnnnnnnnnnnnnncacccagttataatttctcctgatagaattgaagaactgagtgttgtaaaccatacacataatgnnggactcacccttggtgctggtctcagcctagcccaggtgaaggacattttggctgacgtagtccagaagcttccagaggagaagacacagacataccatgctctcctgaagcatttgggaactctggctgggtcccagatcaggaacatggctgtatnnnnnnnnnnnnnnnnnnnnnnnnnnnnnnnnnnnnnnnnnnnnnnnnnnnnnnnnnnnnnnnnnnnnnnnnnnnnnnnnnnnnnnnnnnnnnnnnnnnnnnnnnnnnnnnnnnnnnnnnnnnnnnnnnnnnnnnnnnnnnnnnnnnnnnnnnnnnnnnnnnnnnnnnnnnnnnnnnnnnnnnnnnnnnnnnnnnnnnnnnnnnnnnnnnnnnnnnnnnnnnnnnnnnnnnnnnnnnnnnnnnnnnnnnnnnnnnnnnnnnnnnnnnnnnnnnnnnnnnnnnnnnnnnnnnnnnnnnnnnnnnnnnnnnnnnnnnnnnnnnnnnnnnnnnnnnnnnnnnnnnnnnnnnnnnnnnnnnnnnnnnnnnnnnnnnnnnnnnnggcactggaatgaagaaatgctggatacagcttgcaggcttgttctggaggaagtctccctttcgggctcggcgccaggtggaaaggtggagttcaagaggactctcatcatcagcttcctcttcaagttctacctggaagtgtcacagattttgaaaaagatggnnnnnnttcactatcctagccttgcagacaagtatgaaagtgctttagaagatcttcattccaaacatcactgcagtacattaaagtaccannnnnnnnnnnnnnnnnnnnnnnnnnnnnnnnnnnnnnnnnnnnnnnnnnnnnnnnnnnnnnnnnnnnnnnnnnnnnnnnnnnnnnnnnnnnnnnnnnnnnnnnnnnnnnnnnnnnnnnnnnnnnnnnnnnnnnnnnnnnnnnnnnnnnnnnnnnnnnnnnnnnnnnnnnnnnnnnnnnnnnnnnnnnnnnnnnnnnnnnnnnnnnnnnnnnnnnnnnnnnnnnnnnnnnnnnnnnnnnnnnnnnnnnnnnnnnnnnnnnnnnnnnnnnnnnnnnnnnnnnnnnnnnnnnnnnnnnnnnnnnnnnnnnnnnnnnnnnnnnnnnnnnnnnnnnnnnnnnnnnnnnnnnnnnnnnnnnnnnnnnnnnnnnnnnnnnnnnnnnnnnnnnnnnnnnnnnnnnnnnnnnnnnnnnnnnnnnnnnnnnnnnnnnnnnnnnnnnnnnnnnnnnnnnnnnnnnnnnnnnnnnnnnnnnnnnnnnnnnnnnnnnnnnnnnnnnnnnnnnnnnnnnnnnnnnnnnaggtgaaatacatatgggaggtcaagaacatttttatatggaaacccaaagcatgcttgttgttcccaagggagaggatcaagaaatggatgtctacgtgtctacacagtttcctaaatatatacaggnnnncaggacattgttgcctccaccttgaagctcccagctaacaaggtcatgtgccatgtaaagcgtgttggtggagcatttggagggaaggcgttcaaaaccggagtcattgcagccgtcactgcatttgccgcaaacaannnnnnnnnnnnnnnnnnnnnnnnnnnnnnnnnnnnnnnnnnnnnnnnnnnnnnnnnnnnnnnnnnnnnnnnnnnnnnnnnnnnnnnnnnnnnnnnnnnnnnnnnnnnnnnnnnnnnnnnnnnnnnnnnnnnnnnnnnnnnnnnnnnnnnnnnnnnnnnnnnnnnnnnnnnnnnnnnnnnnnnnnnnnnnnnnnnnnnnnnnnnnnnnnnnnnnnnnnnnnnnnnnnnnnnnnnnnnnnnnnnnnnnnnnnnnnnnnnnnnnnnnnnnnnnnnnnnnnnnnnnnnnnnnnnnnnnnnnnnnnnnnnnnnnnnnnnnnnnnnnnnnnnnnnnnnnnnnnnnnnnnnnnnnnnnnnnnnnnnnnnnnnnnnnnnnnnnnnnnnnnnnnnnnnnnaaattgatcaaacaccctacaaacatgacatcaatgccaagaacctgatccagtgttggagagaatgtatggccgtgtcttcctactccttgaggaaagcggctgtggaaaattcaacgcggagaattactggaagaagaaaggactggccatggtccccctgaagtatcctgttggccttggctcacgcgctgctggtcaggnnnnnnnnnnnnnnnnnnnnnnnnnnnnnnnnnnnnnnnnnnnnnnnnnnnnnnnnnnnnnnnnnnnnnnnnnnnnnnnnnnnnnnnnnnnnnnnnnnnnnnnnnnnnnnnnnnnnnnnnnnnnnnnnnnnnnnnnnnnnnnnnnnnnnnnnnnnnnnnnnnnnnnnnnnnnnnnnnnnnnnnnnnnnnnnnnnnnnnnnnnnnnnnnnnnnnnnnnnnnnnnnnnnnnnnnnnnnnnnnnnnnnnnnnnnnnnnnnnnnnnnnnnnnnnnnnnnnnnnnnnnnnnnnnnnnnnnnnnnnnnnnnnnnnnnnnnnnnnnnnnnnnnnnnnnnnnnnnnnnnnnnnnnnnagaggttatgagtcagacataaactgggagaaaggcgaaggccatcccttcgaatacttcgtttatggagctgcctgttccgaggttgaaatagactgcctgacgggggatcataag

SEQ ID NO: 28699 - DNA, 703 bp, Macaca Mulatta
  misc_feature (1)...(703): n = A,T,C or G
ggggactggtgggcatgtcttatggacaggtgcttccagtgtctcttccttgtgtcacccagccttcaatctggtcccgggttgagtcccatccacctcttacctcattgcccctcagagattagctactcctccttaatctcaaggggactgcagaagagcagagtccattttccgaaccatcaaccagaaaaccacagccctgagtaaatagaaatagagtatttcaagctgtttagttggcataacggtgatgagtctacagctcattttcaagggcttccttgacaatggcactgatgtgactccatccagcatccattgctgtgagaactctatttggcatatcatcactgtgggcatgaacataacggaggctttcataggatgcaatggttgatattcaacattagtcaaaatttgttctagtcatacccttggagctccactgtgttgggaaaatattttagagttgcccgataagaggtcctcccatgagatttggaagtcagaaaaggatgactcaatattctccattgttacccagacagacccagggacagagatgaagactgcnagaaacactggaaagatgctgttgaaagttggagcacancatcctactcctaacttccaagagactgagaccactagttaatagcccatctcagggcgatacttcgttttgagaaccaaaaactgc

SEQ ID NO: 28700 - DNA, 720 bp, Macaca Mulatta
gggagacttgttgaaaatgagtgtctcactttcctaccctatccgtcctccccactctgaacttgaaattgaacccattacggttgcgggtgggaggctgtctgtgtctctagacacataatctctgtctcttggacctgccaccatcactttctgggtcaggattggaattgggatggaatgggacagttgtctataaaactctagtgtaaatattagcactcccctccctcatcttttcttctatttcactccccatttattttcttctacaccggttgtatttttaattttggacttcccctactgggcatggcagctcaaaggtggagtactagagcctggccaagcaaggaaggaaagcagaaaggtgaggattctcactcacctcttttgtttttaataatattggccgctgtttgtacagacagcctgcgtgttgtaaataaagcagagtgggctcttttgtgtttatagccctcactgtcctgcttgggagggaggctttggtggctgaagactagctggacgtggtgctgaaagccacctctcacagtccagtctgaagatggcacagcactgggcctctcccaccccaagatacttgagtaagccacctcagagctttcattgtatttggccctccccactcgagtctaggaacccccacaatccccaccttcactccctgcacgcacactcctgagggtcagagttgct

SEQ ID NO: 28701 - DNA, 570 bp, Macaca Mulatta
cttgacattctataaaatgtgtttctgtttttcacttttttaatatgatggaaaatgtggagtagtgtatattggagtatctttttatttttggagtctaaactgattattggtaagaataagctccccagtgttaggatcattattgccttccttatggcttcaacaatcacatataaatatccgggagaaagggtgagaatgcatagaatgaaattctcagttagtcttagtgaaaaaccttttgaatttaatggctcctttttatgttgcatagaatgtcttgctgttcttaaaaggcatgtggatgaaacataatagtaataactctgccatattttcactaatacatacgcttcattggtgtaatcactgtttatcttgcactagactgttgctttttatgatcatttaagttaatatgatacagtcaactttgtgacattttagtgcttttaaactaaaaagagtgtttccctcatctgcaggtgctgctgttttttcaaacgaaggacaaggaaaaccatacagcgccacaaatgactctggacacagacagatcctggggag

SEQ ID NO: 28702 - DNA, 878 bp, Macaca Mulatta
cggggaggggcggcagcggtggttcctgatgccaggtgtggagggtacaacgcgtgctgctaaccctaagagaaatttgggaaaaatatttgtatttttctcaccaaactttgagcttcctcattgaaatttttcagtttttcagcctaaacattattatgagcaagaatatcttttctaacctaatctctggaataaaacacagcatttggcaagaagaggctgttaactactcagtcggcatcactgttccagcgtgtaccaaaccacagagatgagaagctcagatgaaagtcaggtgcatgctgcgtggccggagaatcccgctcccgcccggcacgggggtgagctgggccctgggcggtgtcaggcgccttctgaaggtgccaggccagggccaggggagcctctacttaccctacttgggttggcctttttcaccggaattcaagaagccaggtttgtgccgttactgtgatggggcaggcttccaaacaccaccggcagccctggagcctttctctgaggcatttttcttcttcagaaggggaaataaaattcccccagaggcctggagaagggagcctttggaaaagcttgccttcttttaaaggcaaattcatgtgcaggagtagacactttacaaataaccagtaaccttggggtcgaaatttgcttaaatcatggtaaaggatctcatttctcttttgtgctgattgaaccttctagcaatttggaagtgttcttctgtgaacccttaactggggactgagggcaaatgccttagaaatggaggcgtggagaatcagaaaggagctatcacaataattcttgtctcacaggcattcaggaattctgaggaagaattgcagtgacag

SEQ ID NO: 28703 - DNA, 609 bp, Macaca Mulatta
cttctttcgcttaagaaggaagttagggggaggtgtccgaggtgaaacctgcccaggcctccctggccttgttctgggttgatggtcttcctctccctctgccctccagcttgtttttaaccgaactgtcacactgaaggaagacccaggaaaggtgtgagctggaagcactgaacctacctcatcctggaggttggggctaccttcgccaccccaaattctatgtcaataaagaacagctaaattctcctagagtctgtgtgttacctctgcgcttctagcatctgagggccctggagacatgctggtggtggtggtggtatggttgggggacggagttgtgccttttgcacattttgtctgtgagaatgggctttcccagaacagagtggtactgacagctctgaaaggactggtgcactttttggtgcttaaaggcagcgggggcctgggtgggattcataccctccgcacctgatctgagggaatggagggctctggggtgtttgtccatggttaggacctctgtgccagagggatctaaaaggtttgtttctgctggttgaagaagagagtcctagctcccagtctgatcattcagcatataat

SEQ ID NO: 28704 - DNA, 128 bp, Macaca Mulatta
atgaggggggcgatggagctggagcttgagctgctgctgcaggaggcccgcgagaatgtggaggcagcgcagatctatctgcgggagctgggtcaccggcttgaggggctgcgggaggcgcggaggca

SEQ ID NO: 28705 - DNA, 768 bp, Macaca Mulatta
ggtctgatgtcctcagcccagccagacacctcctacgtggccagcagcagccgggagaacccgattcatatctgggatgcattcactggagagctccgggcttcctttcgcgcctacaaccacctggatgagctgacggcagcccattcgctctgcttctccccggatggctcccagctcttctgtggcttcaaccggactgtacgtgttttctccacggcccggcccggccgagactgcgaggtccgagccacgtttgcaaaaaagcagggccagagcggcatcatctcctgtatagccttcagcccagcccagcccctctatgcctgtggctcctacggccgctccctgggtctgtatgcctggggtgatggttcccctcttgccttgctgggagggcaccaagggggcatcacccacctctgctttcatcccgatggcaaccgcttcttctcaggagcccgcaaggatgctgagctcctgtgctgggatctccggcagcctggttacccactatggtccctgggtcgagaggtgaccaccaatcagcgcatctacttcgatctggacccgaccgggcagtttctagtgagtggcagcacgagcggggccgtctctgtgtgggacacgggcggggcctggcaatgatggggaagccggaaccggtgttgagttttctgccccaaaaggactgcaccaatggcgtgagccctgcacctagcctgcctctccggggcactgccctccggttcaccgggtggtttcccc

SEQ ID NO: 28706 - DNA, 264 bp, Macaca Mulatta
tgagaagatagcttttgtaccacaacctaccatgattatctgatattctccggaaggttagccgagttgtttcctatattacttaggaaaaaatttcttttcacaattgaaaatgtcagcatcaatttaaagtaacactaagcatgtgcttgctttctgaatattatcctcctccacctccttccaaccaccctgccgaggatctggctgtgacagtttgattagatcatcaatcctcactgttaacagcacttttcctgaaca

SEQ ID NO: 28707 - DNA, 598 bp, Macaca Mulatta
aggagcaacagcagaattaatgtgaaatgagagagttatttgtatattgtctttctaagattaactgtcagtgaactaactgcagatacacctttttccaaacagaattgggcctgatggtataatcacggtgaatgactttacccaaaaccccagggttcgactggagtaaaagcacaatttttgcaattttaaaggaagatacagagatgattgtacttcagaatgactgaaacccatataccacccaaaatcaattttcttgtacaactggtacacactaataaacaattaaacatatgaaatcagaaatgtgcggaattaagatgtgaaattgttggaacaaaacaccttcgttaccaggagattagtattcttcccacgtggacactgagtaaaagtggctgacaaagcatggatagaaaatgtatctccaatcaaagccagactgtcagactttaaaaagtagtacgttaaccagacacagtgttgttgttctgtgattgttaggcataatttagatgagtgccttttatatggtcaattgaagtttttaccagtttatttctccatttgttggtactgtgctagtcattca

SEQ ID NO: 28708 - DNA, 91 bp, Macaca Mulatta
atttcggtattcggattcccgttggacacgtggactactttgtcaatggaggccaagaccaacccggctgccccacctacttttatgcagg

SEQ ID NO: 28709 - DNA, 155 bp, Macaca Mulatta
  misc_feature (1)...(155): n = A,T,C or G
atgcggggggctcctgggaactgtgttggagccgagcaagcgctagccaggcgcaagcgcgcacagactgtagccacccgaggacnnnnnnnnnnnnnggcccacccggagacacccgcgcagaatcgcctccggatcccctgcagtcggcggga

SEQ ID NO: 28710 - DNA, 602 bp, Macaca Mulatta
tcctgtatggcacatcttgcccacatctgaaggataagtggcaggcccctgttcatcagaacctgccatggctcagtgaggcctgcttaggccagggcacagtcccaagggagagggcccagacctgcccgcaggtgtggacacagggtgtcggcccagcatataccacatgggcccctttgcctggggcctctggcaacaggtccaggcctctccccgccctcgccttggcccctgccctggcctcgcccgcaccaggaactgggagcgcggctttctgtgccaatcctgcggcgccgcaggcactgggggctggccgttccctcaccccctcactccaaaccggtctgtccagcagtccaccccaaggaggggaagcctcctgccccacctcagcaccccaagaaagccagagtccaaacgggtgtaaataaaaggggaaatttacttggaaaagggggcaaaaacgaggaggtcaacaggtgttggtggcggtgccaggcacagtggcggcctttcctgggctcaggcctccccggccgcctcagggtgcttaaaccggaggtgtttgtccagggtggctcgcaggccgaagggcacat

SEQ ID NO: 28711 - DNA, 362 bp, Macaca Mulatta
gagcatgcgtttgagagcagtcagaaatataagggaaggaaaaattcatcattgagcttggctcacatgatcaaaagacaaatggctgggagtaaaagtgcgaactttcccttttccttcgaatgctgtttttgtgaaagaaaacggaatgtaatggaaacgtaggagcagccggtggcagcctctcttgccctctgacctcaaaaggctagctgcgcatagctcttgacactctcggccatctctgtgggtaaggtgtcccctccgatctgtcctattcatgtacacggttgtttctgaaaatcttcagtgagctttttctaacttctcaagttctagagaattaaccaactgatgactta

SEQ ID NO: 28712 - DNA, 366 bp, Macaca Mulatta
agccaaacccgagcaagggtcctcggcaccgaggcctgtgctgacttctagtggcagaatgaccctctgcaagggggacaggcagacccctccaggcccaccagcccggttccagtggcccatttggtcagcttccccgccatgggcacctcgttcttctacaccctgtcccggtggggctgtccgggaagacacctaccctgtgggcactcaggatgtgcccagcccggccccagctcagggaagaccttcaagactcctggagattcctgcagtggaactcgatgccccggctcccgacggacctggatgtagggggcccttggttcccccattatgatttcgaacagagctgctgggtccgtg

SEQ ID NO: 28713 - DNA, 740 bp, Macaca Mulatta
  misc_feature (1)...(740): n = A,T,C or G
gggcctttttcctctcttaagcgcggggagcccacaacttgtgcgctctctttctgctgtttcccagctctcggatacagccgacaccatgggtttcggagacctgaaaagccccgccggcctccaggtgctcaacgattacctggcggacaagagctacatcgaggggtatgtgccatcacaagcagatgtggcagtatttgaagccgtgtccgggccaccgcctgctgacttgtgtcatgccctacgttggtataatcacatcaagtcctacgaaaaggaaaaggccagcctgccaggagtgaagaaagctttgggcaagtatggtcctgctgatgtggaagacactacaggaagtggagctacagatagtaaagatgatgatgatattgatctctttggatctgatgatgaggaggaaagtgaagaggctaagagactaagagaagaacgtcttgcacaatatgaatcaaagaaagccaaaaaacctgcacttgttgccaagtcttccatcttactagatgtgaaaccttgggatgatgagacagatatggcaaaattagaggagtgcgtcagaagcattncagcagacggcttagtctggggctcatctaaactagttccagtgggaatggcattagaaattcaatcatggagtgagatataatgacaattgagacatcgcttagacatggcagaggtgctaaacatcacgatgctatactggtcaaaaaaatgcg

SEQ ID NO: 28714 - DNA, 675 bp, Macaca Mulatta
tgcatatgtataaggcactttaaaatccctattaacttgaaggttactgagattgttcacaacagccaagatgtagaggtgattcaaatgtccatcagtgaatgaatagatcaagaaatgtggtatatacatacaatggaatcttagcctaaaaaggaaagaattcctgtcatatgctacagcatggatgaaccttgaggaccttatgtccgaggatgaacacacaagagactcacaggaacaaaccagactactgacttgctgcaccgaagctgcaatacttctgagaagtagatctctatattaatctcgctgagtgctttgttacctgcagcacagaaacactttccctgaaaaacaaataaaactcttaaagcataattcttattctttaggtattctgatcccaccccatgggccttggaaacctgaggcagtattcttctgggatgtttccaactaggcttcccatgaggatgttagggccagcctggctggtggattttacttctctcacctctcagaggtaagaggtctgagaggctcaggcctcttccagcttttgaggatgccagcatagtagaaacataaaaaggtccaaagagaattacaaaaaataatctattttaagttcttatacttaagtcaatgcttactaaaaaaataaatcaatca

SEQ ID NO: 28715 - DNA, 396 bp, Macaca Mulatta
  misc_feature (1)...(396): n = A,T,C or G
naggaaaaagaagaactgattgaagagtggcagccagaacctcttgttcctcctgtcccgaaagaccatcccgctctcaactacaacatcgtttcagnnnnnnnnnnnnnnnnnnnnnnnnnnnnnnnnnnnnnnnnnnnnnnnnnnnnnnnnnnnnnnnnnnnnnnnnnnnnnnnnnnnnnnnnnnnnnnnnnnnnnnnnnnnnnnnnnnnnnnnnnnnnnnnnnnnnnnnnnnnnnnnnnnnnnnnnnnnnnnnnnnnnnnatgttcatttggatttggaagaccgcctggcaaaatttatgaagacagaagaagccattatatactcatatggatttgccaccatagccagtgctattcctgcttactctaaaagaggggacattgtttttgt

SEQ ID NO: 28716 - DNA, 1046 bp, Macaca Mulatta
  misc_feature (1)...(1046): n = A,T,C or G
ccattgatagctctctgtaaatgcttgacaagtaagtgaatgaacgaatgcataaattaatgaaatgagggctgcgtcaatgaataactgggaatctgactcctgcagggatccttcagcccacaggtgtatgtaagacccgccccgcctctcatccttcgggctcccacccacgccgttaggctgcggttcgcgctgcagtcgccagagggcgcggagcggcggggtttcccgcacggagcgctttgcgtggggcaccacgtggggcggggctgcgggcgggctcccaccggctgggcnnnnnnggctgggcttcgtcgaccggcaagcggaacgcggcagctgggcttgggctgcgcggcggccgccggagcgctttgggaagcgcactggtcgaagatggcggcggagcgacaggaggcgctgagggagttcgtggcggtgacgggcgccgaggaggagcgggcccgcttctttctggagtcggccggctgggacttgcagnnnnnnnnnnnnnnnnnnnnnnnnnnnnnnnnnnnnnnnnnnnnnnnnnnnnnnnnnnnnnnnnnnnnnnnnnnnnnnnnnnnnnnnnnnnnnnnnnnnnnnnnnnnnnnnnnnnnnnnnnnnnnnnnnnnnnnnnnnnnnnnnnnnnnnnnnnnnnnnnnnnnnnnnnnnnnnnnnnnnnnnnnnnnnnnnnnnnnnnnnnnnnnnnnnnnnnnnnnnnnnnnnnnnnnnnnnnnnnnnnnnnnnnnnnnnnnnnnnnnnnnnnnnnnnnnnnnnnnnnnnnnnnnnnnnnnnnnnnnnnnnnnnnnnnnnnnnnnnnnnnnnnnnnnnnnnnnnnnnnnnnnnnnnnnnnnnnnnnnnnnnnnnnnnnnnnnnnnnnnnnnnnnnnnnnnnnnnnnnnnnnnnnnnnnnnnnnnnnnnnnnnnnnnnnnnttcatgtagtattgaaactctggaagagtggattcagcctggataatggagaactcagaagctaccaagatccatccaatgcccagtttctggagtctatccgcagaggg

SEQ ID NO: 28717 - DNA, 6586 bp, Macaca Mulatta
  misc_feature (1)...(6586): n = A,T,C or G
ggcccctgattgctaagaagaatcctaagatcccaatgtctaagatgatgaccatccttggggccaaatggagagagttcagcgccaacaaccccttcaaggggtnnnnnnnnnnnnnnnnnnnnnnnnnnnnnnnnnnnnnnnnnnnnnnnnnnnnnnnnnnnnnnnnnnnnnnnnnnnnnnnnnnnnnnnnnnnnnnnnnnnnnnnnnnnnnnnnnnnnnnnnnnnnnnnnnnnnnnnnnnnnnnnnnnnnnnnnnnnnnnnnnnnnnnnnnnnnnnnnnnnnnnnnnnnnnnnnnnnnnnnnnnnnnnnnnnnnnnnnnnnnnnnnnnnnnnnnnnnnnnnnnnnnnnnnnnnnnnnnnnnnnnnnnnnnnnnnnnnnnnnnnnnnnnnnnnnnnnnnnnnnnnnnnnnnnnnnnnnnnnnnnnnnnnnnnnnnnnnnnnnnnnnnnnnnnnnnnnnnnnnnnnnnnnnnnnnnnnnnnnnnnnnnnnnnnnnnnnnnnnnnnnnnnnnnnnnnnnnnnnnnnnnnnnnnnnnnnnnnnnnnnnnnnnnnnnnnnnnnnnnnnnnnnnnnnnnnnnnnnnnnnnnnnnnnnnnnnnnnnnnnnnnnnnnnnnnnnnnnnnnnnnnnnnnnnnnnnnnnnnnnnnnnnnnnnnnnnnnnnnnnnnnnnnnnnnnnnnnnnnnnnnnnnnnnnnnnnnnnnnnnnnnnnnnnnnnnnnnnnnnnnnnnnnnnnnnnnnnnnnnnnnnnnnnnnnnnnnnnagaaggagggggtccagtgggaggccannnnnnnnnnnnnnnnnnnnnnnnnnnnnnnnnnnnnnnnnnnnnnnnnnnnnnnnnnnnnnnnnnnnnnnnnnnnnnnnnnnnnnnnnnnnnnnnnnnnnnnnnnnnnnnnnnnnnnnnnnnnnnnnnnnnnnnnnnnnnnnnnnnnnnnnnnnnnnnnnnnnnnnnnnnnnnnnnnnnnnnnnnnnnnnnnnnnnnnnnnnnnnntgccctgtgctgaagggtcgagtgcagaagatcttgcattggcggtggggggagccgcctgtagcaatgccagcccctcaacaggcagacgggaatccagatgtcccagccccgcgtcctctacgaggcagatcagagcgagagttctttgtcaagtgggtgagagtatcctactggcactgctcctgggccaaggagcttcagnnnnnnnnnnnnnnnnnnnnnnnnnnnnnnnnnnnnnnnnnnnnnnnnnnnnnnnnnnnnnnnnnnnnnnnnnnnnnnnnnnnnnnnnnnnnnnnnnnnnnnnnnnnnnnnnnnnnnnnnnnnnnnnnnnnnnnnnnnnnnnnnnnnnnnnnnnnnnnnnnnnnnnnnnnnnnnnnnnnnnnnnnnnnnnnnnnnnnnnnnnnnnnccacagtgtggataaaaaggggaattaccactatctagtaaaatggagggacttgccatatgaccagtccacggggaggaagatgaaatgaatatccctgaatatgaagaacataagcaaagctnnnnnnnnnnnnnnnnnnnnnnnnnnnnnnnnnnnnnnnnnnnnnnnnnnnnnnnnnnnnnnnnnnnnnnnnnnnnnnnnnnnnnnnnnnnnnnnnnnnnnnnnnnnnnnnnnctaccgtgaaatatgagactcagccacggtttatcacagccactggaggcaccctgcacatgtaccagctggaagggctgaactggctgcgcttctcctgggcccagggcactgataccattctagctgatgagatggggctgggcaagaccatacaaactattgtcttcctctactcactctataaggaggnnnnnnnnnnnnnnnnnnnnnnnnnnnnnnnnnnnnnnnnnnnnnnnnnnnnnnnnnnnnnnnnnnnnnnnnnnnnnnnnnnnnnnnnnnnnnnnnnnnnnnnnnnnnnnnnnnnnnnnnnnnnnnnnnnnnnnnnnnnnnnnnnnnnnnnnnnnnnnnnnnnnnnnnnnnnnnnnnnnnnnnnnnnnnnnnnnnnnnnnnnnnnnnnnnnnnnnnnnnnnnnnnnnnnnnnnnnnnnnnnnnnnnnnnnnnnnnnnnnnnnnnnnnnnnnnnnnnnnnnnnnnnnnnnnnnnnnnnnnnnnnnnnnnnnnnnnnnnnnnnnnnnnnnnnnnnnnnnnnnnnnnnnnnnnnnnnnnnnnnnnnnnnnnnnnnnnnnnnnnnnnnnnnnnnnnnnnnnnnnnnnnnnnnnnnnnnnnnnnnnnnnnnnnnnnnnnnnnnnnnnnnnnnnnnnnnnnnnnnnncaacttggagggcttcctggaggagtttgctgacatatccaaagaggaccagatcaagaaactgcatgatttgctggggccacatatgctacggaggctcaaggcagatgtctttaagaacatgccagccaagacagagctcatcgttcgggtggagctaagccccatgcagaannnnnnnnnnnnnnnnnnnnnnnnnnnnnnnnnnnnnnnnnnnnnnnnnnnnnnnnnnnnnnnnnnnnnnnnnnnnnnnnnnnnnnnnnnnnnnnnnnnnnnnnnnnnnnnnnnnnnnnnnnnnnnnnnnnnnnnnnnnnnnnnnnnnnnnnnnnnnnnnnnnnnnnnnnnnnnnnnnnnnnnnnnnnnnnnnnnnnnnnnnnnnnnnnnnnnnnnnnnnnnnnnnnnnnnnnnnnnnnnnnnnnnnnnnnnnnnnnnnnnnnnnnnnnnnnnnnnnnnnnnnnnnnnnnnnnnnnnnnnnnnnnnnnnnnnnnnnnnnnnnnnnnnnnnnnnnnnnnnnnnnnnnnnnnnnnnnnnnnnnnnnnnnnnnnnnnnnnnnnnnnnnnnnnnnnnnnnnnnnnnnnnnnnnnnnnnnnnnnnnnnnnnnnnnnnnnnnnnnnnnnnnnnnnnnnnnnnnnnnnnnnnnnnnnnnnnnnnnnnnnnnnnnnnnnnnnnnnnnnnnnnnnnnnnnnncaggcctttagccgggctcatcggattggccaggccaacaaagtgatgatttaccggtttgtgactcgtgcgtcagtggaagagcgaatcacacaagtggccaaaagaaagatgatgctgacacacctggttgtgcggcctgggctgggctccaaggcaggctccatgtctaagcaggagcttgacgaaagtctcaaatttggcactgaagagctgttcaaggatgaaatcgagggtgagaacnggggagaacaaggaggaagacagcagtgtgattcattatgacaatgaggccatcgctcggctgttggaccggaaccaggatgcaactgaggacactgacgtgcagaacatgaatgagtatctcagctccttcaaagtggcacagtacgtcgtgcgagaagaagacaagnnnnnnnnnnnnnnnnnnnnnnnnnnnnnnnnnnnnnnnnnnnnnnnnnnnnnnnnnnnnnnnnnnnnnnnnnnnnnnnnnnnnnnnnnnnnnnnnnnnnnnnnnnnnnnnnnnnnnnnnnnnnnnnnnnnnnnnnnnnnnnnnnnnnnnnnnnnnnnnnnnnnnnnnnnnnnnnnagacaaccagtcagagtattcggtgggttcagaggaggaggatgaagacttcgatgaacgtcctgaagnnagggcgtagacagtcaaagaggcagctccggaatgagaaagataagccactgcctccactgctggcccgagtcgggggcaacattgaggtnnnnggtgctgggcttcaatacccgtcagcggaaggctttcctcaatgccgtgatgcgctgggggatttttttcaggacgccttcaccacgcagtggttggtgcgggacccgacgggcaagactgagaaggagtttaagnnnnnnnnnnnnnnnnnnnnnnnnnnnnnnnnnnnnnnnnnnnnnnnnnnnnnnnnnnnnnnnnnnnnnnnnnnnnnnnnnnnnnnnnnnnnnnnnnnnnnnnnnnnnnnnnnnnnnnnnnnnnnnnnnnnnnnnnnnnnnnnnnnnnnnnnnnnnnnnnnnnnnnnnnnnnnnnnnnnnnnnnnnnnnnnnnnnnnnnnnnnnnnnnnnnnnnnnnnnnnnnnnnnnnnnnnnnnnnnnnnnnnnnnnnnnnnnnnnnnnnnnnnnnnnnnnnnnnnnnnnnnnnnnnnnnnnnnnnnnnnnnnnnnnnnnnnnnnnnnnnnnnnnnnnnnnnnnnnnnnnnnnnnnnnnnnnnnnnnnnnnnnnnnnnnnnnnnnnnnnnnnnnnnnnnnnnnnnnnnnnnnnnnnnnnnnnnnnnnnnnnnnnnnnnnnnnnnnnnnnnnnnnnnnnnnnnnnnnnnnnnnnnnnctggatccaaggaagattcctctagaggatgagttgccaggggtatctggagagatggagcttgaacttgggttccttggggacagagagaagtcannnnnnnnnnnnnnnnnnnnnnnnnnnnnnnnnnnnnnnnnnnnnnnnnnnnnnnnnnnnnnnnnnnnnnnnnnnnnnnnnnnnnnnnnnnnnnnnnnnnnnnnnnnnnnnnnnnnnnnnnnnnnnnnnnnnnnnnnnnnnnnnnnnnnnnnnnnnnnnnnnnnnnnnnnnnnnnnnnnnnnnnnnnnnnnnnnnnnnnnnnnnnnnnnnnnnnnnnnnnnnnnnnnnnnnnnnnnnnnnnnnnnnnnnnnnnnnnnnnnnnnnnnnnnnnnnnnnnnnnnnnnnnnnnnnnnnnnnnnnnnnnnnnnnnnnnnnnnnnnnnnnnnnnnnnnnnnnnnnnnnnnnnnnnnnnnnnnnnnnnnnnnnnnnnnnnnnnnnnnnnnnnnnnnnnnnnnnnnnnnnnnnnnnnnnnnnnnnnnnnnnnnnnnnnnnnnnnnnnnnnnnnnnnnnnnnnnnnnnnnnnnnnnnnnnnnnnnnnnnnnnnnnnnnnnnnnnnnnnnnnnnnnnnnnnnnnnnnnnnnnnnnnnnnnnnnnnnnnnnnnnnnnnnnnnnnnnnnnnnnnnnnnnnnnnnnnnnnnnnnnnnnnnnnnnnnnnnnnnnnnnnnnnnnnnnnnnnnnnnnnnnnnnnnnnnnnnnnnnnnnnnnnnnnnnnnnnnnnnnnnnnnnnnnnnnnnnnnnnnnnnnnnnnnnnnnnnnnnnnnnnnnnnnnnnnnnnnnnnnnnnnnnnnnnnnnnnnnnnnnnnnnnnnnnnnnnnnnnnnnnnnnnnnnnnnnnnnnnnnnnnnnnnnnnnnnnnnnnnnnnnnnnnnnnnnnnnnnnnnnnnnnnnnnnnnnnnnnnnnnnnnnnnnnnnncagccgccaccaacggccctccagtgctggtgaagaaggagaaggaaatggtgggggcgttggtgtcagacgggctggatcggaaggagccccgagccggggaggtgatctgtatagacgactgactggatcccaggcctgcccttcacccaggccccgtccccgaggccgacccccagctcaagcgctggggcctgctgccagccctccaccttccccaccccttgggccatcactgggctaggaacccctttgcccctctctgcagctcctctcttcaagaaggnnnnnnnnnnnnnnnnnnnnnnnnnnnnnnnnnnnnnnnnnnnnnnnnnnnnnnnnnnnnnnnnnnnnnnnnnnnnnnnnnnnnnnnnnnnnnnnnnnnnnnnnnnnnnnnnnnnnnnnnnnnnnnnnnnnnnnnnnnnnnnnnnnnnnnnnnnnnnnnnnnnnnnnnnnnnnnnnnnnnnnnnnnnnnnnnnnnnnnnnnnnnnnnnnnnnnnnnnnnnnnnnnnnnnnnnnnnnnnnnnnnnnnnnnnnnnnnnnnnnnnnnnnnnnnnnnnnnnnnnggagggggacttttagagagggatgaaaatgattcatgggagggaggaagggacgaggaggggtggctgcctgttaccgttccctacctctccccacaatgagggtggagcagttatgagggaggaagtcaattgctgttcagcctcagaataaaggcgccgttcactggctcagttacctcatgtgtaccggcatcttgtgttgggaatgttcccccctccctagggaccaaggaccacccctacaaagagtaatggttgggtgatactccctcaagccaaagaggagctccccaacctgttctagggacccaggtcacctagaagggtgggagagaatacaatgggccagacggcggtggcggggaagcccccagctctggggcttaggttcctgaagacttctactaccctccctcctcaaggcctagatacagactaaatttgcgttaagtcaggcaggggacctagtcagggtcttgggagctaccttgtcactgggaccagagcaaagtagtggagggcaggcaagggaaatgtgggcacatcccccatcccaggaggggccagggagagtggcagtttgcatggcgaaccccccacttcctctttgctgccccttcactttcttgctgcccccttcccagtctctcttcacacccactcctggtctgtcctgatcccctcttctgtatcaggtttattggttgtacatataaattatactttcctttc

SEQ ID NO: 28718 - DNA, 1360 bp, Macaca Mulatta
  misc_feature (1)...(1360): n = A,T,C or G
gggttcagaggtcaaggtcaagcccccagttctggagagcggtgctgggatgttctgctaccagcctcccttgcagcatatgtactgctcctcccagccccccttccnnnnnnnnnnnnnnnnnnnnnnnnnnnnnnnnnnnnnnnnnnnnnnnnnnnnnnnnnnnnnnnnnnnnnnnnnnnnnnnnnnnnnnnnnnnnnnnnnnnnnnnnnnnnnntcccaaaacccatctattcctacannagcatcctcatcttcatggcccttaagaacagtaaaactggaagccttcccgtcagcgagatctacaattttatgacggagcactttccttacnnnnagacagcacctgatggctggaagaattctgtccggcacaacctatccctcaacaagtgcttcgagaaggtggagaacaaatcgggaagttcctcccgcaagggctgcctgtgggccctcaatccggccaagatcgacaagatgcaagaggagctgcagaagtggaagaggaaagatcccattgctgtgcgcaaaagcatggccaagccannnnnnnnnnnnnnnnnnnnnnnnnnnnnnnnnnnnnnnnnnnnnnnnnnnnnnnnnnnnnnnnnnnnnnnnnnnnnnnnnnnnnnnnnnnnnnnnnnnnnnnnnnnnnnnnnnnnnnnnnnnnnnnnnnnnnnnnnnnnnnnnnnnnnnnnnnnnnnnnnnnnnnnnnnnnnnnnnnnnnnnnnnnnnnnnnnnnnnnnnnnnnnnnnnnnnnnnnnnnnnnnnnnnnnnnnnnnnnnnnnnnnnnnnnnnnnnnnnnnnnnnnnnnnnnnnnnnnnnnnnnnnnnnnnnnnnnnnnnnnnnnnnnnnnnnnnnnnnnnnnnnnnnnnnnnnnnnnnnnnnnnnnnnnnnnnnnnnnnnnnnnnnnnnnnnnnnnnnnnnnnnnnnnnnnnnnnnnnnnnnnnnnnnnnnnnnnnnnnnnnnnnnnnnnnnnnnnnnnnnnnnnnnnnnnnnnnnnnnnnnnnnnnnnnnnnnnnnnnnnnnnnnnnnnnggaaacctgtgggaacagttgaaggatgacagcttggccctcgaccccctggtactggtgacctcatccccgacatcatcttcgatgcagccaccccagccaccaccccacagcttcccccctgggccctgtctgacagagacaggcagtggggcaggtgacttggcatccccgggcagtgggggctccggggcactgggtgacctgcaactcaccaccctctactctgcctttatggagctggagcctacgccccctccggcctctgcaggcccctctgtgtacctcagccccagctccaagcccatggccctggcatg

SEQ ID NO: 28719 - DNA, 715 bp, Macaca Mulatta
atgtcgcggcgacccccgctcgcgcggtacccgccgattgtggcctccatgacagccgaccccgcggagcccgagcccgaacccgaacccgaacccgaacccgcgctggacctcgcggcgctgcgtgcagtcgcctgcgactgcctgctgcaggagcacttttacctgcggcgtaaacggcgcgtgcaccgttacgaggagagcgaggtcatatctttgcccttcctggatcagctggtggcaaccctcgtgggcctcctcagcccacacaacccggccctggccgctgccgccctcgattatagacgcccagttcatttttactgggtgcgtggtgaagaaattattcctcgtggtcatcgaaaaggtcgaattgataacttgcgataccagatagatgataaaccaaacaaccagattcgaatatccaagcaactcgcagagtttgtgccattggattattctgttcctatagaaatccccactataaaatgtaaaccagacaaacttccattattcaaacggcagtatgaaaaccgtatatttgttggctcaaaaactgcagatccttgctgttacggtcacacccagtttcatctgttacctaacaaattaagaagggaaagacttttgagacaaaactgtgctgatcagatagaagttgtttttagagctaatgctattgcaagcctttttgcttggactggagcacaag

SEQ ID NO: 28720 - DNA, 1319 bp, Macaca Mulatta
  misc_feature (1)...(1319): n = A,T,C or G
ggcagccccgatgggcgaatgatttcttccccacatggctatgggattcgtttgttgggatttgacaaacagtgcagtgaacttgttgactgcttgcccaaataagccagtcccttgcgggtgatccgttctctgtactctcttaatgatgtggtactgactacaaagttctctcccacacattgtctgattgtcgtcaggtgccttagtgaaccggtttcattgtatctacccaagttttacgtccaacttacatcctaaataagtaatctctcgggggttagacttgtggaatcactttccaatttacatggagcttttttccattttaacgaacataagttttggggatcatgtaatggctgggtgttattatgtgggcccccttgtaaaccccaatttgtgtaacactttaccctaactcgagaatcattccccagccatttcattttaactgaggctttcttctcctaaacattttatcaacttacctaattgcgtctccgatatacaacctctacaaggtatcgagacagatatcacaagactgtggtatgcacgatagtaatgttatactcacttgatgggccgcatacactataacacaaccctccacccaatgtaatgtcactgtttctcagaggccagcgacattcctcttgtgttggtataactctagtcaaagaagcgcattatcacgtttcttgctatgccacgtcatatcaaatacacattcttttcttatactctatatttaatctcttatctccccatcatataaaaatatctatgttnaaggttttcgaacgatgtgttctacaccgatatgctgctctaccagcccccgtgtttatacaccgcaacaacacaccaccagatttatatgaaagtctttactgagctatacacttatgcaaacggctcctccccngagttgcgtggataggatgccaccctcacactgctttactttctcacttctacctcacctatctctatggacaatgataaaaatgatagatgaataaacatntaatcacagcactactgtatcgctatgtaagaactacaagagctaaatcaatagaatctcatcacgtccnctcagtgctatctatcatcaccccgangcttataaactcttcacattaaacttnaaataactaccaaactgtcaaaattnctatactatatataaagcgcggcaacctatatatgcgatggacgcgtatataatacgcgtactctcaactcgcttcatcctctcgcgctcactcagctgtcaagacctgctncttgtacgcgatgcatcacctcac

SEQ ID NO: 28721 - DNA, 781 bp, Macaca Mulatta
  misc_feature (1)...(781): n = A,T,C or G
ggaaatgttggtggttctgtgtaatgctgaccccaaggaaagacaatcagataaaacgaaggatggttaaatctaagaggttgggtgtttgggggttttgttgatgttgttctgatttgggatatttcagaaatttttaatactatcttttgacagaatggccaccctaaaacaaatactgaatgnnnnnnnnnnnnnnnnnnnnnnnnnngnnnnnnnnnnnnnnngtcgagaactactaatttcatgctgtttctttctttctccctttgttgttatttgatttgagggaagggagtgaggcttgtgcaggtttgagctatcagaagacatgaacagaagtgaaaataccagccatatcagtagagcctcccattcaaaagtgaacacacttggtagctgaaccatatctgagcagcgtgattctgttgtcttgcatatgttactctctcaggctgtgggtctctgttacagctctaggaaactgtagaatttcaatgctatgtagcttttccaccccatggtctctagtgctgcctatcaacttgtcccctttttttcccataacctggctttcaggtggtacagttagctgtcactcagctgactctatgatgtggcagcagagagggaaacctacaagtggtttgcctcattgcctttgccacatctgaaagtctcagcagcgctacctagacttctcagctatagaaactttatgtgtatgctgagactgtatactcgtgttgacttagaagaatacaatctgcgaaaanaaaac

SEQ ID NO: 28722 - DNA, 655 bp, Macaca Mulatta
  misc_feature (1)...(655): n = A,T,C or G
agaggaggccctcctgccccagattcgtctgtttccccgcgtggcccttgcgttcttgctttgcagactgcctgcagccatgattttgtcagtgacatctgtgagccaaagactgagcctttttggcaggaataataagcaatactacacaacttgctactttcagaaaacttttttttagcttcaccgatgacaacagaggaagaagggaactgggatttgggtaagttctcctccactgtttgaccaaattctcagtgataaatacgtgtgcagatccctagaagaaaaaacgttgactttctttttaagtgtggcacataaggatctgcagaattttccgtagacaaagaaaggatcttgtgtatttttgtccatatccaatgttatatgaactaattgtattgttttatactgtgaccacaaatattatgcaatgcaccatttgttttttatttcattaaaggaagttnnnnnnnnnnnnnnnnnnnnnnnnnnnnnnnnnnnnnnnnnnnnnnnnnnnnnnnnnnnnnnnnnnnnnnnnnnnnnnnnnnnnnnnnnnnnnnnnnnnnnnnnnnnnnnnnnnnnnnnnnnnnnnnnnnnnnnnnnnnnnnnnnnnnnnnnnnnnnnnnnnnnnnnnnnnnnnnnnnnnnnn

SEQ ID NO: 28723 - DNA, 216 bp, Macaca Mulatta
  misc_feature (1)...(216): n = A,T,C or G
gcatccccacaggaagtgcctccagggaacaagctggcagggctngaaggagccgaattaggcttctatgtccctgatgtggcactccaaggggacacgccgacagcgacagcagagacatgctggaaaggtnaggtacaagctcatccctgacaagctttccacagctggactggggctccgcgttactgcacccagaagttccatggggggcgg

SEQ ID NO: 28724 - DNA, 1654 bp, Macaca Mulatta
  misc_feature (1)...(1654): n = A,T,C or G
caatttaattcaggagatgaattctgatgacccagttgtgcaacagaacgctgtcctggagacagaaaagagactactgcttatggaggaagaccaggaggaggatgaatgcaggaccaccttgaataagactgtgatcagtcctccacaaactgctgtgaagnnnnnnnnnnnnnnnnnnnnnnnnnnnnnnnnnnnnnnnnnnnnnnnnnnnnnnnnnnnnnnnnnnnnnnnnnnnnnnnnnnnnnnnnnnnnnnnnnnnnnnnnnaaagacaaagggaatgaagcaggtgctgaaggcaattatnnnnnnnnnnnnnnnnnnnnnnnnnnnnnnnnnnnnnnnnnnnnnnnnnnnnnnnnnnnnnnnnnnnnnnnnnncaggcttatatgaaacttaagaactatgagaaggccctggtggattgtgaatgggctcnnnnnnnnnnnnnnnnnnnnnnnnnnnnnnnnnnnnnnnnnnnnnnnnnnnnnnnnnnnnnnnnnnnnnnnnnnngtctagagagtgttataagaagatcttagaaataaaccccaagctgcaaacccaggtgaaannnnnnnnnnnnnnnnnnnnnnnnnnnnnnnnnnnnnnnnnnnnnnnnnnnnnnnnnnnnnnnnnnnnnnnnnnnnnnnnnnnnnnnnnnnnnnnnnnnnnnnnnnnnnnnnnnnnnnnnnnnnnnnnnnnnnnnnnnnnnnnnnnnnnnnnnnnnnnnnnnnnnnnnnnnnnnnnnnnnnnnnnnnnnnnnnnnnnnnnnnnnnnnnnnnnnnnnnnnnnnnnnnnnnnnnnnnnnnnnnnnnnnnnnnnnnnnnnnnnnnnnnnnnnnnnnnnnnnnnnnnnnnnnnnnnnnnnnnnnnnnnnnnnnnnnnnnnnnnnnnnnnnnnnnnnnnnnnnnnnnnnnnnnnnnnnnnnnnnnnnnnnnnnnnnnnnnnnnnnnnnnnnnnnnnnnnnnnnnnnnnnnnnnnnnnnnnnnnnnnnnnnnnnnnnnnnnnnnnnnnnnnnnnnnnnnnnnnnnnnnnnnnnnnnnnnnnnnnnnnnnnnnnnnnnnnnnnnnnnnnnnnnnnnnnnnnnnnnnnnnnnnnnnnnnnnnnnnnnnnnnnnnnnnnnnnnnnnnnnnnnnnnnnnnnnnnnnnnnnnnnnnnnnnnnnnnnnnnnnnnnnnnnnnnnnnnnnnnnnnnnnnnnnnnnnnnnnnnnnnnnnnnnnnnnnnnnnnnnnnnnnnnnnnnnnnnnnnnnnnnnnnnnnnnnnnnnnnnnnnnnnnnnnnnnnnnnnnnnnnnnnnnnnnnnnnnnnnnnnnnnnnnnnnnnnnnnnnnnnnnnnnnnnnnnnnnnnnnnnnnnnnnnnnnnnnnnnnnnnnnnnnnnnnnnnnnnnnnnnnnnnnnnnnnnnnnnnnnnnnnnnnnnnnnnnnnnnnnnnnnnnnnnnnnnnnnnnnnnnnnnnnnnnnnnnnnnnnnnnnnnnnnnnnnnnnnnnnnnnnnnnnnnnnnnnnnnnnnnnnnnnnnnnnnnnnnnnnnnnnnnnnnnnnnnnnnnnnagagctgctggtgttctgagccggaccctttcttcctctctgaaaattgttgaggaggccttgcaagcaggagtggtaaagaaaatgatgaaattcctgaag

SEQ ID NO: 28725 - DNA, 2212 bp, Macaca Mulatta
  misc_feature (1)...(2212): n = A,T,C or G
gttcaacagcacacaagacctgtgccgaagcctgtgcaagccatgattctgggagacaacattactgggcatttaccttttgaacccaacnnnnnnnnnnnnnnnnnnnnnnnnnnnnnnnnnnnnnnnnnnnnnnnnnnnnnnnnnnnnnnnnnnnnnnnnnnnnnnnnnnnnnnnnnnnnnnnnnnnnnnnnnnnnnnnnnnnnnnnnnnnnnnnnnnnnnnnnnnnnnnnnnnnnnnnnnnnnnnnnnnnnnnnnnnnnnnnnnnnnnnnnnnnnnnnnnnnnnnnnnnnnnnnnnnnnnnnnnnnnnnnnnnnnnnnnnnnnnnnnnnnnnnnnnnnnnnnnnnnnnnnnnnnnnnnnnnnnnnnnnnnnnnnnnnnnnnnnnnnnnnnnnnnnnnnnnnnnnnnnnnnnnnnnnnnnnnnnnnnnnnnnnnnnnnnnnnnnnnnnnnnnnnnnnnnnnnnnnnnnnnnnnnnnnnnnnnnnnnnnnnnnnnnnnnnnnnnnnnnnnnnnnnnnnnnnnnnnnnnnnnnnnnnnnnnnnnnnnnnnnnnnnnnnnnnnnnnnnnnnnnnnnnnnnnnnnnnnnnnnnnnnnnnnnnnnnnnnnnnnnnnnnnnnnnnnnnnnnnnnnnnnnnnnnnnnnnnnnnnnnnnnnnnnnnnnnnnnnnnnnnnnnnnnnnnnnnnnnnnnnnnnnnnnnnnnnnnnnnnnnnnnnnnnnnnnnnnnnnnnnnnnnnnnnnnnnnnnnnnnnnnnnnnnnnnnnnnnnnnnnnnnnnnnnnnnnnnnnnnnnnnnnnnnnnnnnnnnnnnnnnnnnnnnnnnnnnnnnnnnnnnnnnnnnnnnnnnnnnnnnnnnnnnnnnnnnnnnnnnnnnnnnnnnnnnnnnnnnnnnnnnnnnnnnnnnnnnnnnnnnnnnnnnnnnnnnnnnnnnnnnnnnnnnnnnnnnnnnnnnnnnnnnnnnnnnnnnnnnnnnnnnnnnnnnnnnnnnnnnnnnnnnnnnnnnnnnnnnnnnnnnnnnnnnnnnnnnnnnnnnnnnnnnnnnnnnnnnnnnnnnnnnnnnnnnnnnnnnnnnnnnnnnnnnnnnnnnnnnnnnnnnnnnnnnnnnnnnnnnnnnnnnnnnnnnnnnnnnnnnnnnnnnnnnnnnnnnnnnnnnnnnnnnnnnnnnnnnnnnnnnnnnnnnnnnnnnnnnnnnnnnnnnnnnnnnnnnnnnnnnnnnnnnnnnnnnnnnnnnnnnnnnnnnnnnnnnnnnnnnnnnnnnnnnnnnnnnnnnnnnnnnnnnnnnnnnnnnnnnnnnnnnnnnnnnnnnnnnnnnnnnnnnnnnnnnnnnnnnnnnnnnnnnnnnnnnnnnnnnnnnnnnnnnnaggcatntctggtagaggtcacaggtcaagcgtactactggatcggtctcactgacaggggcacagagggctcctgnnnnnnnnnnnnnnnnnnnnnnnnnnnnnnnnnnnnnnnnnnnnnnnnnnnnnnnnnnnnnnnnnnnnnnnnnnnnnnnnnnnnnnnnnnnnnnnnnnnnnnnnnnnnnnnnnnnnnnnnnnnnnnnnnnnnnnnnnnnnnnnnnnnnnnnnnnnnnnnnnnnnnnnnnnnnnnnnnnnnnnnnnnnntccttctcccagccctgtccccatcctaggaccactagcggatgaaggacccatctcatgtcagttccctagacccatcacacgtcagcttcntaagccacagcatggggaagggacgtttccttcatccaacagaataaaccccgttgtctccaggttttgggaaaggaatcggcctgacaactggcagcacaagaatgggcagactgaagactgtgtccacattcagcagaagtggaatgacatgacctgtgacaccccctatcagtgggtgtgcaagaagcccatgggccatggtgtggcctgagggcaggccagagctgaggggctgctcctgcccgccaatactgaccctcctcctaatggatgccttcggagcctctgagctctacttgttctctggggccttccgttggccttgcggacttcctgccttgttctttgatttagccctttcgaacatgcttaccttgagtgactggtgacatcagtggcttctcaagggaagagccttgctgtgcccctgtagcccctcagcacccagcacaggccggcctgtcagacagcaggtcctcaataaatacttgct

SEQ ID NO: 28726 - DNA, 240 bp, Macaca Mulatta
agacctggccaggggctctgcatcctccatcaggcctttacttctgttggggaaggtgatcctaaaccacagaaagcaccaggctgtggttttcctccctgctggcccatctggactcatggcagtggtaaagaactggattactgcatcagccagggcttgggcctatgtgttcatggttggaaggcaaaatgtgtcagggtctggtacccaattaattacttaaagctgataaactag

SEQ ID NO: 28727 - DNA, 113 bp, Macaca Mulatta
atttaaaatttatcttgtccgtgtagatactttattcttctggatgtattcagaaattgcatgaatgcccagcgaggggaggtctttcatgcatatgaaaaggtaatgtttat

SEQ ID NO: 28728 - DNA, 1025 bp, Macaca Mulatta
  misc_feature (1)...(1025): n = A,T,C or G
agggctcgatccatatacgagcgtgctttagatgtagactatcgaaatattacactctggctgaaatatgcagaaatggagatgaagaatcgccaagtcaaccatgctcgaaatatctgggaccgggccataacaacgctgcctcgagtcaatcagttctggtannnnnnnnnnnnnnnnnnnnnnnnnnnnnnnnnnnnnnnnnnnnnnnnnnnnnnnnnnnnnnnnnnnnnnnnnnnnnnnnnnnnnnnnnnnnnnnnnnnnnnnnnnnnnnnnnnnnnnnnnnnnnnnnnnnnnnnnnnnnnnnnnnnnnnnnnnnnnnnnnnnnnnnnnnnnnnnnnnnnnnnnnnnnnnnnnnnnnnnnnnnnnnnnnnnnnnnnnnnnnnnnnnnnnnnnnnnnnnnnnnnnnnnnnnnnnnnnnnnnnnnnnnnnnnnnnnnnnnnnnnnnnnnnnnnnnnnnnnnnnnnnnnnnnnnnnnnnnnnnnnnnnnnnnnnnnnnnnnnnnnnnnnnnnnnnnnnnnnnnnnnnnnnnnnnnnnnnnnnnnnnnnnnnnnnnnnnnnnnnnnnnnnnnnnnnnnnnnnnnnnnnnnnnnnnnnnnnnnnnnnnnnnnnnnnnnnnnnnnnnnnnnnnnnnnnnnnnnnnnnnnnnnnnnnnnnnnnnnnnnnnnnnnnnnnnnnnnnnnnnnnnnnnaggcgaatccacacaattacgatgcatggtttgattacttgcgcttggtagaaagtgatgcagaagctgaagccgtgagagaagtctatgaaagggccattgccaatgtcccacccattcaggagaagaggcactggaagcgctacatttatctttggatcaactatgcactctatgaagaattggaggcannnnnnnnnnnnnnnnnnnnnnnnnnnnnnnnnnnnnnnnnnnnnnnnnnnnnnnnnnnnagttcacatttgccaaaatgtggatactgtatgcacagtttgaaatacgacagaagaatctgtcattagccagaagagcattg

SEQ ID NO: 28729 - DNA, 2154 bp, Macaca Mulatta
  misc_feature (1)...(2154): n = A,T,C or G
tctccagtctcactcccctcccgactgccgccccggaatccgccatggggaannnnnnnnnnnnnnnnnnnnnnnnnnnnnnnnnnnnnnnnnnnnnnnnnnnnnnnnnnnnnnnnnnnnnnnnnnnnnnnnnnnnnnnnnnnnnnnnnnnnnnnnnnnnnnnnnnnnnnnnnnnnnnnnnnnnnnnnnnnnnnnnnnnnnnnnnnnnnnnnnnnnnnnnnnnnnnnnnnnnnnnnnnnnnnnnnnnnnnnnnnnnnnnnnnnnnnnnnnnnnnnnnnnnnnnnnnnnnnnnnnnnnnnnnnnnnnnnnnnnnnnnnnnnnnnnnnnnnnnnnnnnnnnnnnnnnnnnnnnnnnnnnnnnnnnnnnnnnnnnnnnnnnnnnnnnnnnnnnnnnnnnnnnnnnnnnnnnnnnnnnnnnnnnnnnnnnnnnnnnnnnnnnnnnnnnnnnnnnnnnnnnnnnnnnnnnnnnnnnnnnnnnnnnnnnnnnnnnnnnnnnnnnnnnnnnnnnnnnnnnnnnnnnnnnnnnnnnnnnnnnnnnnnnnnnnnnnnnnnnnnnnnnnnnnnnnnnnnnnnnnnnnnnnnnnnnnnnnnnnnnnnnnnnnnnnnnnnnnnnnnnnnnnnnnnnnnnnnnnnnnnnnnnnnnnnnnnnnnnnnnnnnnnnnnnnnnnnnnnnnnnnnnnnnnnnnnnnnnnnnnnnnnnnnnnnnnnnnnnnnnnnnnnnnnnnnnnnnnnnnnnnnnnnnnnnnnnnnnnnnnnnnnnnnnnnnnnnnnnnnnnnnnnnnnnnnnnnnnnnnnnnnnnnnnnnnnnnnnnnnnnnnnnnnnnnnnnnnnnnnnnnnnnnnnnnnnnnnnnnnnnnnnnnnnnnnnnnnnnnnnnnnnnnnnnnnnnnnnnnnnnnnnnnnnnnnnnnnnnnnnnnnnnnnnnnnnnnnnnnnnnnnnnnnnnnnnnnnnnnnnnnnnnnnnnnnnnnnnnnnnnnnnnnnnnnnnnnnnnnnnnnnnnnnnnnnnnnnnnnnnnnnnnnnnnnnnnnnnnnnnnnnnnnnnnnnnnnnnnnnnnnnnnngtgtgaatctatacaaagtgatggaagctggtgactttatttgcaaagctgtgaataaaaccacaaactctaaagtagcacaagcctccttcaatgcttgacttgaatggatttacgatctacggttgagaagatcaatttcagctacagtactcatctgaaaatcattagtgtcaacttgctctgatatgtgaagtaatagacaagagtgggaaaaaagagatccttttcaaaaagattataactggatagattaagtcaacaaaaagcagtatcagtcatcaggtaaattgcaagctgaggataaataataaaacttgtcctattttgaacttggaaaaaagtctcttttgctcttgtagaaataactttttaatttagatgggaaaattgagttcatatttccccaagtatcaaatactgtgttaatacttaatcaggcaggcttaacacagtgtacataccgtcagtagtttatgagctcctgcatagtatgcagagtgtgtggcctcaatattatgcattttgcctctggatctcaactattcatttgccaagtcagttaagttatggaccaaaagccaaatctccatctgaccctacataattttagcaatagaacttttatatttcgagtatggctaacatctgttaactatttcagtgactttatctggttccaagaggctgtggccaatggcaagatgccatatcctggaaacatattacaacctcccatgtttgttacatgcatccagtttaccatactttacctatcatcagttatagtaaaaaccagcatggagttactcagctattgagaaattgtaggctattattttggtcctgatgtctaaattgcaatgataagaataggttgatacatatatcatcatctacccttataattttcagatcactttcaatttgcccaaggaaatatcgttgtgatcctaagaatattaagataatttttggttaatgaaatacctattttcctttgattcatggtgctttgattacatcacatgattttttggtgtatttttagtggttattttaaaagttgaggtgactgaaatgttgtttattgt

SEQ ID NO: 28730 - DNA, 643 bp, Macaca Mulatta
aggattttttacaagtttctattatggcacatttgtttcctacaaattaaactgatcaaagtctcaaatattagtggaggaaaaagtgctggatttgcacttcaattgtacatcttctgtgaatttatgaaggacctacctgcttcatgtgattaccttgagtactgatgataaatactagacacagctgttgtccacatcagaaataacatgcctttcccaaagatactgttaatatttgtttagcacaatacataaagaatgtccaagactttcaaactaatgtatacatcacttacagtgattattcagtgaacagaatagaccccagctccgtggtcatctatgaagatgatattccttgtaagtgttctgcacgaacacgtctcatagggatggggaaattttttggaaagtcactttagttttaaagaaacgggacaattccatgaataatttgaggttttattcatattgcttatgtctacaattgttctaaagagtattttaaagtagttttttcctcccagctaatctttccctgtatgcccccttttaggagatttctcaccattttgctttaacacgataattattggcctacttaatactccagtgccttgagatagttggacatatttga

SEQ ID NO: 28731 - DNA, 633 bp, Macaca Mulatta
  misc_feature (1)...(633): n = A,T,C or G
aggtgatgatcctcatcacaggtgctcacaaggcattcgctctgtacaaggccatcgaggagggagtgaaccacatgtggaccgtgtctgccttccagcagcatccccgcaccgtgtttgtgtgtgatgaggatgccaccttggagctgaaagtgaagactgtcaagtatttcaaaggtnaggtttaatgcttgttcataacaagttggtggaccccttgtacagtatcaaagagaaagaaactgagaaaagccaatcttctaagaaaccatacagcgattagcctgtgctgggacctagtgtcaagtacccatagggaaaggcaggtctttctggaaattgtctttagaagaaagaattgtatttctttaatctagtatgggtactccagataagtgggtaaacttattgttcttggccatgaggctgggagcctagtcatggagtttagctatagggagaattatttgtttgtaacttaatcagaaaaaaaatctctgcaaaatgtactccatcattttgatgtctgccaaacccaggttgggagttttaaactttttgttctgcttcagccacggttcacatgtacaacacactcccatcaggaatttctctccttacatgcactgattt

SEQ ID NO: 28732 - DNA, 2574 bp, Macaca Mulatta
  misc_feature (1)...(2574): n = A,T,C or G
aggaacccaagccagaccgtctccttgtgttgaaagtactatggaatgatttcctgatgtgctactcttctcgccctcttctctgctggtctgtgtggtgggccctgtaatacctgtggctattttcaagttnnnnnnnnnnnnnnnnnnnnnnnnnnnnnnnnnnnnnnnnnnnnnnnnnnnnnnnnnnnnnnnnnnnnnnnnnnnnnnnnnnnnnnnnnnnnnnnnnnnnnnnnnnnnnnnnnnnnnnnnnnnnnnnnnnnnnnnnnnnnnnnnnnnnnnnnnnnnnnnnnnnnnnnnnnnnnnnnnnnnnnnnnnnnnnnnnnnnnnnnnnnnnnnnnnnnnnnnnnnnnnnnnnnnnnnnnnnnnnnnnnnnnnnnnnnnnnnnnnnnnnnnnnnnnnnnnnnnnnnnnnnnnnnnnnnnnnnnnnnnnnnnnnnnnnnnnnnnnnnnnnnnnnnnnnnnnnnnnnnnnnnnnnnnnnnnnnnnnnnnnnnnnnnnnnnnnnnnnnnnnnnnnnnnnnnnnnnnnnnnnnnnnnnnnnnnnnnnnnnnnnnnnnnnnnnnnnnnnnnnnnnnnnnnnnnnnnnnnnnnnnnnnnnnnnnnnnnnnnnnnnnnnnnnnnnnnnnnnnnnnnnnnnnnnnnnnnnnnnnnnnnnnnnnnnnnnnnnnnnnnnnnnnnnnnnnnnnnnnnnnnnnnnnnnnnnnnnnnnnnnnnnnnnnnnnnnnnnnnnnnnnnnnnnnnnnnnnnnnnnnnnnnnnnnnnnnnnnnnnnnnnnnnnnnnnnnnnnnnnnnnnnnnnnnnnnnnnnnnnnnnnnnnnnnnnnnnnnnnnnnnnnnnnnnnnnnnnnnnnnnnnnnnnnnnnnnnnnnnnnnnnnnnnnnnnnnnnnnnnnnnnnnnnnnnnnnnnnnnnnnnnnnnnnnnnnnnnnnnnnnnnnnnnnnnnnnnnnnnnnnnnnnnnnnnnnnnnnnnnnnnnnnnnnnnnnnnnnnnnnnnnnnnnnnnnnnnnnnnnnnnnnnnnnnnnnnnnnnnnnnnnnnnnnnnnnnnnnnnnnnnnnnnnnnnnnnnnnnnnnnnnnnnnnnnnnnnnnnnnnnnnnnnnnnnnnnnnnnnnnnnnnnnnnnnnnnnnnnnnnnnnnnnnnnnnnnnnnnnnnnnnnnnnnnnnnnnnnnnnnnnnnnnnnnnnnnnnnnnnnnnnnnnnnnnnnnnnnnnnnnnnnnnnnnnnnnnnnnnnnnnnnnnnnnnnnnnnnnnnnnnnnnnnnnnnnnnnnnnnnnnnnnnnnnnnnnnnnnnnnnnnnnnnnnnnnnnnnnnnnnnnnnnnnnnnnnnnnnnnnnnnnnnnnnnnnnnnnnnnnnnnnnnnnnnnnnnnnnnnnnnnnnnnnnnnnnnnnnnnnnnnnnnnnnnnnnnnnnnnnnnnnnnnnnnnnnnnnnnnnnnnnnnnnnnnnnnnnnnnnnnnnnnnnnnnnnnnnnnnnnnnnnnnnnnnnnnnnnnnnnnnnnnnnnnnnnnnnnnnnnnnnnnnnnnnnnnnnnnnnnnnnnnnnnnnnnnnnnnnnnnnnnnnnnnnnnnnnnnnnnnnnnnnnnnnnnnnnnnnnnnnnnnnnnnnnnnnnnnnnnnnnnnnnnnnnnnnnnnnnnnnnnnnnnnnnnnnnnnnnnnnnnnnnnnnnnnnnnnnnnnnnnnnnnnnnnnnnnnnnnnnnnnnnnnnnnnnnnnnnnnnnnnnnnnnnnnnnnnnnnnnnnnnnnnnnnnnnnnnnnnnnnnnnnnnnnnnnnnnnnnnnnnnnnnnnnnnnnnnnnnnnnnnnnnnnnnnnnnnnnnnnnnnnnnnnnnnnnnnnnnnnnnnnnnnnnnnnnnnnnnnnnnnnnnnnnnnnnnnnnnnnnnnnnnnnnnnnnnnnnnnnnnnnnnnnnnnnnnnnnnnnnnnnnnnnnnnnnnnnnnnnnnnnnnnnnnnnnnnnnnnnnnnnnnnnnnnnnnnnnnnnnnnnnnnnnnnnnnnnnnnnnnnnnnnnnnnnnnnnnnnnnnnnnnnnnnnnnnnnnnnnnnnnnnnnnnnnnnnnnnnnnnnnnnnnnnnnnnnnnnnnnnnnnnnnnnnnnnnnnnnnnnnnnnnnnnnnnnnnnnnnnnnnnnnnnnnnnnnnnnnnnnnnnnnnnnnnnnnnnnnnnnnnnnnnnnnnnnnnnnnnnnnnnnnnnnnnnnnnnnnnnnnnnnnnnnnnnnnnnnnnnnnnnnnnnnnnnnnnnnnnnnnnnnnnnnnnnnnnnnnnnnnnnnnnnnnnnnnnnnnnnnnnnnnnnnnnnnnnnnnnnnnnnnnnnnnnnnnnnnnnnnnnnnnnnnnnnnnnnnnnnnnnnnnnnnnnnnnnnnnnnnnnnnnnnnnnnnnnnnnnnnnnnnnnnnnnnnnnnnnnnnnnnnnnnnnnnnnnnnnnnnnnnnnnnnnnnnnnnnnnnnnnnnnnnnnnnnnnnnnnnnnnnnntggccatgtttgtagaatgctgaacccagtgtgcaagttgtactgtatgcagttttgcaaataactgaaaataatttgttgtactttttattcaattctgtatagattata

SEQ ID NO: 28733 - DNA, 787 bp, Macaca Mulatta
  misc_feature (1)...(787): n = A,T,C or G
ttcttccctcaggacngcaagtatactttaaccatggaggacttgacccctgccctcagcgagtatggcatcaatgtgaagaagccgcactatttcacgtgagccacccaacctaaatgtacttgtctgtccccatgtccccacaccagcctgttttcataataaactttattgtgacaggcggggctgatccctcccatgttgggagacaccatgtggcaagtgacaaagctctgagcccgccccttttggggccacagtggtagggatgggggaaggggatggaccccatggctggggtagtaccatgactggaggcaggggaggcaaccagaggtctgctgctttggggaggtacattcccccaaccatgtcctgacacctctggagttcaggcaagggccttccggtcctacttgtcctgcatcttctccaggataggcacaatcatgtcaaatttgggtcgctttgcagggtcttcgttcatgcagatcttcatgagcttacacacatgaggggaaatacctggtgggatggtagaccgaaggccttccaatgccacctgtgaatacaagaaaaaactgagcctcacaatttgagtctgtcatgtagagagaagccactggcccctgggacaggataactgtatatccgaacaaatatgggaggagcccaggcccactacagttattttcagcataaccaaccattcccccaacacaaatgtatgctgttctgctctcaccttcattccaatctccatatggaaagatcagcaaagggtacc

SEQ ID NO: 28734 - DNA, 441 bp, Macaca Mulatta
  misc_feature (1)...(441): n = A,T,C or G
tggggatgctgagctgtggggtacaggcctgaggcttggtgggagtaagaagggctgtggaagctgtcaggccatgaaccaggctgaccctcggctcagagcagtgtgcttgtggactctcacatcagcagccatgagcagaggtgacaactgcacggatctactcacactgggnggaatcccctccataacccaggcctggggactgtgggtcctcttcggagctgtgacgctgctgtttctcatctcgctggctgcacacttgtcccagtggatcaggggccggagcaggagccatccggggcagggacgngctctggagggtctgtggaagaggttccgctgtatgggaacctgcattatctacagacaggncaggacggctgtctcaagacccaggaccagaccagcaggatccaactcctggaggccctgccaggg

SEQ ID NO: 28735 - DNA, 642 bp, Macaca Mulatta
cttagcgttctgccggaggacccagccgcctccaatccctgacagctccttggcctgagttggggacgccaggacggtgggaggcaggtgaaggggaggggcataggagttccccggaacttgtgcagattaaagtaactgtgaagttttcactcttgcagtgtgtctgagtgtgtgcgggatggcgggcggggactcctcgccccttgggagagaagggcacagacggcgccctcggctctggcccaccgctttcccttctcccctgccttctgctctggctttggcgccggcctccgtggccccgcccccggtgccgcgcgcgcacttcccgcgggcggagctcacggctccctggctcgcagtgcctgccgggagccacgtctccgctggtcgatagctgtttcgggattggtgtccgggcggctatctgggggctgctgggaagatggcggactcggtggccagccgatgaggaggccgcggggggaacccggcccccgggccccgagaccgactgagggagcgacctgcgcagggcccgggaagtcatgtaggggtggcgcctgcggggagggctgtgggagggcagcgggagctggtgttagcggcagcggccacggtctcctggcgtccctgggt

SEQ ID NO: 28736 - DNA, 802 bp, Macaca Mulatta
agagtagaggaaccttagtaagtgactgacgatagggagagttgaacctgtgttgtccaggatagtttaccttcctgaaggcacagttcccctatctcagacaagtcctaaaaaacatcccagtttttccttttctgtcctccctttgtcgtagttatttgagaggagtttacaggtgcaattaatgactacatcttcttttaggtcctgaactgtatgaaacagaacccactaacaaggacattagtgctccggtggaagctgtgctaaaagcccaggctgccaggcaaaagaagatctcctttaacttttcagaaatcatggttagaacaggctggaactctgagctcaaactactgaggattcttcaggagactgatgatgaggatgaggagaaccagtactctgaggcagagaagcctctggaggaatagactgaaggcatcccccggggcagccgtgttccaaagtgggatggttggtaacctgagggcagcaacgtttcacgtaagggcaagaggagaggggcttctgctctctggagcttttaccagggcctgagatctgagcttagggattcagttttcttcgttcacctctacttgcctctaaaataaatgtaggaggaaaatccccagcccttttaaatgtagattatttctcttgcgttagggtcagtataattttggtgattaaacacaactgcttctcaattaaaagactcattttctgtttctaggaagaagggaaagatgtctcttggtgtctgttttcttgggtcactcttatctctgaagctctg

SEQ ID NO: 28737 - DNA, 641 bp, Macaca Mulatta
gcacgtgggctgaacttgaggccagcgctggggcggggcggcattgccctcactgctgcagctccttcattctgttgagggcactgccggcgcggaaccactcgatctgcgtctcgttgaaggtgtggttcaggaggatggtctcctgggtcccgttggggtgcttgatgatgcacttcaggggcttgccaggggtgaagtcctttagcccttgaatggtcagcttgtccacagggtgaatcttgttgtagtcggctgggtccgcgaaggtcaggggcagcaggccctgtttcttcaggttggtctcgtggatcctggcaaagctcttggtgatgatggcccgggcaccaaggtggcgaggctccagagctgcatgctcccggctcgagccctcgccgtagttctcgtctccgatcaccacccacctgatgccatgtttcttgtagtagcgggcagtgtacagggacggggccaaactcctgagtgacggcattgcgcacggagttggccttgccattttcaatgttgatggcaccaatgagcaggttgttggagatgttgtccaagtgcccacggaacttgagccaggggccagcagccgagatgtggtcagtgtcattcccttgaccttgatgaggatc

SEQ ID NO: 28738 - DNA, 4298 bp, Macaca Mulatta
  misc_feature (1)...(4298): n = A,T,C or G
gagaacccgtacccagccgtggcgatgcacaaggtacagaggcccggcgagagcagccacctgcgacgggtgccccggcccttcccccggctagatgagggcaccgtgcagtggatcgtggaccaggctgcgcccaagatgcagggtgcacccccagctgtgaaggccgcgaggnnnnnnnnnnnnnnnnnnnnnnnnnnnnnnnnnnnnnnnnnnnnnnnnnnnnnnnnnnnnnnnnnnnnnnnnnnnnnnnnnnnnnnnnnnnnnnnnnnnnnnnnnnnnnnnnnnnnnnnnnnnnnnnnnnnnnnnnnnnnnnnnnnnnnnnnnnnnnnnnnnnnnnnnnnnnnnnnnnnnnnnnnnnnnnnnnnnnnnnnnnnnnnnnnnnnnnnnnnnnnnnnnnnnnnnnnnnnnnnnnnnnnnnnnnnnnnnnnnnnnnnnnnnnnnnnnnnnnnnnnnnnnnnnnnnnnnnnnnnnnnnnnnnnnnnnnnnnnnnnnnnnnnnnnnnnnnnnnnnnnnnnnnnnnnnnnnnnnnnnnnnnnnnnnnnnnnnnnnnnnnnnnnnnnnnnnnnnnnnnnnnnnnnnnnnnnnnnnnnnnnnnnnnnnnnnnnnnnnnnnnnnnnnnnnnnnnnnnnnnnnnnnnnnnnnnnnnnnnnnnnnnnnnnnnnnnnnnnnnnnnnnnnnnnnnnnnnnnnnnnnnnnnnnnnnnnnnnnnnnnnnnnnnnnnnnnnnnnnnnnnnnnnnnnnnnnnnnnnnnnnnnnnnnnnnnnnnnnnnnnnnnnnnnnnnnnnnnnnnnnnnnnnnnnnnnnnnnnnnnnnnnnnnnnnnnnnnnnnnnnnnnnnnnnnnnnnnnnnnnnnnnnnnnnnnnnnnnnnnnnnnnnnnnnnnnnnnnnnnnnnnnnnnnnnnnnnnnnnnnnnnnnnnnnnnnnnnnnnnnnnnnnnnnnnnnnnnnnnnnnnnnnnnnnnnnnnnnnnnnnnnnnnnnnnnnnnnnnnnnnnnnnnnnnnnnnnnnnnnnnnnnnnnnnnnnnnnnnnnnnnnnnnnnnnnnnnnnnnnnnnnnnnnnnnnnnnnnnnnnnnnnnnnnnnnnnnnnnnnnnnnnnnnnnnnnnnnnnnnnnnnnnnnnnnnnnnnnnnnnnnnnnnnnnnnnnnnnnnnnnnnnnnnnnnnnnnnnnnnnnnnnnnnnnnnnnnnnnnnnnnnnnnnnnnnnnnnagcccaagctgctgcggccgcgcctgctgcctggggaggagtgtgtgctggacggcctgcgcgtctacctgctgccggacgggcgtgaggagggtgcggggggcagtgccgggggaccagcattgctgccagctgagggcgccgtcttcctcaccacgtaccgggtcatcttcacagggatgcccacagaccccctgnnnnnnnnnnnnnnnnnnnnnnnnnnnnnnnnnnnnnnnnnnnnnnnnnnnnnnnnnnnnnnnnnnnnnnnnnnnnnnnnnnnnnnnnnnnnnnnnnnnnnnnnnnnnnnnnnnnnnnnnnnnnnnnnnnnnnnnnnnnnnnnnnnnnnnnnnnnnnnnnnnnnnnnnnnnnnnnnnnnnnnnnnnnnnnnnnnnnnnnnnnnnnnnnnnnnnnnnnnnnnnnnnnnnnnnnnnnnnnnnnnnnnnnnnnnnnnnnnnnnnnnnnnnnnnnnnnnnnnnnnnnnnnnnnnnnnnnnnnnnnnnnnnnnnnnnnnnnnnnnnnnnnnnnnnnnnnnnnnnnnnnnnnnnnnnnnnnnnnnnnnnnnnnnnnnnnnnnnnnnnnnnnnnnnnnnnnnnnnnnnnnnnnnnnnnnnnnnnnnnnnnnnnnnnnnnnnnnnnnnnnnnnnnnnnnnnnnnnnnnnnnnnnnnnnnnnnnnnnnnnnnnnnnnnnnnnnnnnnnnnnnnnnnnnnnnnnnnnnnnnnnnnnnnnnnnnnnnnnnnnnnnnnnnnnnnnnnnnnnnnnnnnnnnnnnnnnnnnnnnnnnnnnnnnnnnnnnnnnnnnnnnnnnnnnnnnnnnnnnnnnnnnnnnnnnnnnnnnnnnnnnnnnnnnagctacccagggctgctgatcgtaccccagagcgtccaggacaacgccctgcagcgcgtgtcccgctgctaccgccagaaccgcttccccgtggtctgctggcgcagcgggcggtctaaggccgtactgctgcgctctggcggcctgcatggcaaaggtgtcgtcggcctcttcaaggcccagaacgcaccttctccaggnaggccagtcccaggcggactcgagcagcctggagcaggagaagtacctgcaggccgtggtcagctccatgccccgctacgccgacgcgtcgggacgcaacacgcttagcggcttctcctcagcccacatgggcagtcacggtnnnnnnnnnnnnnnnnnnnnnnnnnnnnnnnnnnnnnnnnnnnnnnnnnnnnnnnnnnnnnnnnnnnnnnnnnnnnnnnnnnnnnnnnnnnnnnnnnnnnnnnnnnnnnnnnnnnnnnnnnnnnnnnnnnnnnnnnnnnnnnnnnnnnnnnnnnnnnnnnnnnnnnnnnnnnnnnnnnnnnnnnnnnnnnnnnnnnnnnnnnnnnnnnnnnnnnnnnnnnnnnnnnnnnnnnnnnnnnnnnnnnnnnnnnnnnnnnnnnnnnnnnnnnnnnnnnnnnnnnnnnnnnnnnnnnnnnnnnnnnnnnnnnnnnnnnnnnnnnnnnnnnnnnnnnnnnnnnnnnnnnnnnnnnnnnnnnnnnnnnnnnnnnnnnnnnnnnnnnnnnnnnnnnnnnnnnnnnnnnnnnnnnnnnnnnnnnnnnnnnnnnnnnnnnnnnnnnnnnnnnnnnnnnnnnnnnnnnnncaggtggtatctttggtgcagctgctctcagaccccttttaccgcacgctggagggcttccgcctgctgctggagaaggagtggctgtccttcggtcaccgcttcagccaccgtggggcccacaccctggctgggcagagcagcggcttcacacccgtcttcctgcagttcctggactgcgtacatcaggnnnnnnnnnnnnnnnnnnnnnnnnnnnnnnnnnnnnnnnnnnnnnnnnnnnnnnnnnnnnnnnnnnnnnnnnnnnnnnnnnnnnnnnnnnnnnnnnnnnnnnnnnnnnnnnnnnnnnnnnnnnnnnnnnnnnnnnnnnnnnnnnnnnnnnnnnnnnnnnnnnnnnnnnnnnnnnnnnnnnnnnnnnnnnnnnnnnnnnnnnnnnnnnnnnnnnnnnnnnnnnnnnnnnnnnnnnnnnnnnnnnnnnnnnnnnnnnnnnnnnnnnnnnnnnnnnnnnnnnnnnnnnnnnnnnnnnnnnnnnnnnnnnnnnnnnnnnnnnnnnnnnnnnnnnnnnnnnnnnnnnnnnnnnnnnnnnnnnnnnnnnnnnnnnnnnnnnnnnnnnnnnnnnnnnnnnnnnnnnnnnnnnnnnnnnnnnnnnnnnnnnnnnnnnnnnnnnnnnnnnnnnnnnnnnnnnnnnnnnnnnnnnnnnnnnnnnnnnnnnnnnnnnnnnnnnnnnnnnnnnnnnnnnnnnnnnnnnnnnnnnnnnnnnnnnnnnnnnnnnnnnnnnnnnnnnnnnnnnnnnnnnnnnnnnnnnnnnnnnnnnnnnnnnnnnnnnnnnnnnnnnnnnnnnnnnnnnnnnnnnnnnnnnnnnnnnnnnnnnnnnnnnnnnnnnnnnnnnnnnnnnnnnnnnnnnnnnnnnnnnnnnnnnnnnnnnnnnnnnnnnnnnnnnnnnnnnnnnnnnnnnnnnnnnnnnnnnnnnnnnnnnnnnnnnnnnnnnnnnnnnnnnnnnnnnnnnnnnnnnnnnnnnnnnnnnnnnnnnnnnnnnnnnnnnnnnnnnnnnnnnnnnnnnnnnnnnnnnnnnnnnnnnnnnnnnnnnnnnnnnnnnnnnnnnnnnnnnnnnnnnnnnnnnnnnnnnnnnnnnnnnnnnnnnnnnnnnnnnnnnnnnnnnnnnnnnnnnnnnnnnnnnnnnnnnnnnnnnnnnnnnnnnnnnnnnnnnnnnnnnnnnnnnnnnnnnnnnnnnnnnnnnnnnnnnnnnnnnntgaagacaacgcgtcgcgtttacaacttctgtgcccaggacgtgccctcggcccagcagtgggtggaccggatccagagctgcctgtcggatgcctgagcctcccggccctgcccggctgctctgcttccagtcgttaccgaccactaggggtgggcagggccgccccggccatgtttacagccccggccctcgacagtattgaggccccgagcccccagcacttgtgtgtac

SEQ ID NO: 28739 - DNA, 2021 bp, Macaca Mulatta
  misc_feature (1)...(2021): n = A,T,C or G
gggcctttgttcccaatgacttccacatttttgcacagattatgctccatcccattcacttctgcattcctgtaacttttaatccctatgtttgtctcacttttcatctggttgaatggctttttttagtgtggtatttgctgtcacatagtttttcctgggtgagtctgccaactcacaggtgcttttggcgtgaaatctccatcctatcatttccgttctgcctgtgactgtaaagagtagccattcttttcccatgtactgaagaatatatttttctgttgctttatactactcatgtccttggggagggaaatgcacaattttttttgttaggctgtaaagaatttaagttgtaaattacataagttagaacaagcccaaatttaatttgcaaccatcagaattcagaatctatagtgaccagtgatcaaggctaattggaaaagagttatcggcccatagctaataagtgctgacagacaactaagcttcagtatttttctaaagaaattacaggtgggatatgctagagaaggcattttggggttatgtttaaaaaacattattgtcccacaatattaccttaagatttttcttttctacactacctggacatggtaatacagacaaacttgatttcttctagaatataacattttcaatattgtcccactcttcatcttagaaatattgtcatgtttattttaatatccaacacaactatcaaaattgactttttctctagaggatgaannnnnnnnnnnnnnnnnnnnnnnnnnnnnnnnnnnnnnnnnnnnnnnnnnnnnnnnnnnnnnnnnnnnnnnnnnnnnnnnnnnnnnnnnnnnnnnnnnnnnnnnnnnnnnnnnnnnnnnnnnnnnnnnnnnnnnnnnnnnnnnnnnnnnnnnnnnnnnnnnnnnnnnnnnnnnnnnnnnnnnnnnnnnnnnnnnnnnnnnnnnnnnnnnnnnnnnnnnnnnnnnnnnnnnnnnnnnnnnnnnnnnnnnnnnnnnnnnnnnnnnnnnnnnnnnnnnnnnnnnnnnnnnnnnnnnnnnnnnnnnnnnnnnnnnnnnnnnnnnnnnnnnnnnnnnnnnnnnnnnnnnnnnnnnnnnnnnnnnnnnnnnnnnnnnnnnnnnnnnnnnnnnnnnnnnnnnnnnnnnnnnnnnnnnnnnnnnnnnnnnnnnnnnnnnnnnnnnnnnnnnnnnnnnnnnnnnnnnnnnnnnnnnnnnnnnnnnnnnnnnnnnnnnnnnnnnnnnnnnnnnnnnnnnnnnnnnnnnnnnnnnnnnnnnnnnnnnnnnnnnnnnnnnnnnnnnnnnnnnnnnnnnnnnnnnnnnnnnnnnnnnnnnnnnnnnnnnnnnnnnnnnnnnnnnnnnnnnnnnnnnnnnnnnnnnnnnnnnnnnnnnnnnnnnnnnnnnnnnnnnnnnnnnnnnnnnnnnnnnnnnnnnnnnnnnnnnnnnnnnnnnnnnnnnnnnnnnnnnnnnnnnnnnnnnnnnnnnnnnnnnnnnnnnnnnnnnnnnnnnnnnnnnnnnnnnnnnnnnnnnnnnnnnnnnnnnnnnnnnnnnnnnnnnnnnnnnnnnnnnnnnnnnnnnnnnnnnnnnnnnnnnnnnnnnnnnnnnnnnnnnnnnnnnnnnnnnnnnnnnnnnnnnntcatttgcttttgtcactaaacagttttgtgttagaaccaccaaaattatagcttttaagagcttcctttgaccactgtcttttatttaccctgcttctcttatctttgaccgtatatttctcataatgtgaaatatgatgagattcacttaggggaagcatgtgagttttcggaggcaatgtcaactgtgtctctgacttcctgccttccaaattgaaggccagaccatgctgatgacctcaaggagcactgactatttgacaatagggcagataatgtaatcggcttgaattttgacttagtaactttttatgtaacactttgggggaaattctctttaggacaaagcaaagagttcaatttattgagggataga

SEQ ID NO: 28740 - DNA, 931 bp, Macaca Mulatta
  misc_feature (1)...(931): n = A,T,C or G
cactgcttcatatggtttctcttctgtaaggtttctcacatgtatagtgattcatatggtctaaaggcttttccacacttaccacattattgggtttccctccattatgtactctttgatgggcagtaagatttgagcctttgctaaaagctttcccacactcattacatttatatggcttttctccagtatgaattctctgatgtacagtaaggtttgaactacagctgaaggttttcccacatttaatnnnnnnnnnnnnnnnnnnnnnnnnnnnnnttctgtgatgttgaagcagggatgacctatgactgaaggctttcccacatatactgcattcatagggtttcaatctaatgtgatttctcaaatgcatattcagtgattcaagctggttgaaggatttcctgcatttctgacattcaaagggtttttcttcagtatgaatactctgatgctgaacaagaaatgagaggctactaaagactttgagacatttgttgcattcatattgtttctccatagtgtgaattctttgatgtcgagtaaggtgtgagctacagcaaaaagctttcccacattctctacattcataaggcttctctccagtatggattttctgatggtgaatgagagatgacctatgaatgaaggcctttccacatatacgacactcatagagtttttcttgcgtatgaattcttagatgttcaataagatgcgacacacgactaaaagactttccacagttcatacattcgtatnnnnnnnnnnnnnnnnnngtgctctgatggttagtaagtgatgacacatggctaaaggccttcccacattcaacacatttgtaaggtttctctccactatggcttatcagatgtcgtgtaagggatgagccatggctaaaagtcttcccacattcacgacattcacc

SEQ ID NO: 28741 - DNA, 818 bp, Macaca Mulatta
ggagtaaggacaaacctggaatagatagcaaaactgaaaatcagcagtgctgatggtggtacatatgtctttccttttgcttctcccctggtacttcccatctgcttttactttgggtgagcagagcgggatgtgtgcgtgcgtgtgtgtcagtctgtttgtgagtgtgttaaaggctacagaccacagttggtttaaaatgcttggaacttcccaaactggctttactttatgtttatacagtgctcagggttaacgcagtacatccatgccattgctgtgggaggtatccccggatgcatgtgttttgagtctataaatatagaaaatatatattggtttctttttccagcttaataggtttattaaagcatgaaatgaaaggttgcatatcatgcattcaggttattttctaatttttgttctgacagtgcatgtctttgaaagcatgcgtaaacaagattaacacagaagtcgagtaacagagagaaacctttgttagatgtacagcattggttcttgcatttttatagtgttttatacctgggtatttgcttcaatcctgcaaaacccctcctgccccttctccctgccctaagttttctggtcaagggaatggaatacctacatttttccggggaaaaaactccttaaaagttaattttaaagggtataaaaaagtatctcccaatgggtggccttgcaaaaaatgggctggaaaacctccattaaaattaccatttttcaaccttaaaagggaagttttttagaaaggaaaattccaatttgggcttttccttctttgcaaaacaatttgt

SEQ ID NO: 28742 - DNA, 4968 bp, Macaca Mulatta
  misc_feature (1)...(4968): n = A,T,C or G
aggtgactgtaggacgaggatttggtgtcacataccaattggtatcaaaaatctgccccctgatgatttctcgaaaccactgtgtttgaagcagaatcctgagggccagtggacannnnnnnnnnnnnnnnnnnnnnnnnnnnnnnnnnnnnnnnnnnnnnnnnnnnnnnnnnnnnnnnnnnnnnnnnnnnnnnnnnnnnnnnnnnnnnnnnnnnnnnnnnnnnnnnnnnnnnnnnnnnnnnnnnnnnnnnnnnnnnnnnnnnnnnnnnnnnnnnnnnnnnnnnnnnnnnnnnnnnnnnnnnnnnnnnnnnnnnnnnnnnnnnnnnnnnnnnnnnnnnnnnnnnnnnnnnnnnnnnnnnnnnnnnnnnnnnnnnnnnnnnnnnnnnnnnnnnnnnnnnnnnnnnnnnnnnnnnnnnnnnnnnnnnnnnnnnnnnnnnnnnnnnnnnnnnnnnnnnnnnnnnnnnnnnnnnnnnnnnnnnnnnnnnnnnnnnnnnnnnnnnnnnnnnnnnnnnnnnnnnnnnnnnnnnnnnnnnnnnnnnnnnnnnnnnnnnnnnnnnnnnnnnnnnnnnnnnnnnnnnnnnnnnnnnnnnnnnnnnnnnnnnnnnnnnnnnnnnnnnnnnnnnnnnnnnnnnnnnnnnnnnnnnnnnnnnnnnnnnnnnnnnnnnnnnnnnnnnnnnnnnnnnnnnnnnnnnnnnnnnnnnnnnnnnnnnnnnnnnnnnnnnnnnnnnnnnnnnnnnnnnnnnnnnnnnnnnnnnnnnnnnnnnnnnnnnnnnnnnnnnnnnnnnnnnnnnnnnnnnnnnnnnnnnnnnnnnnnnnnnnnnnnnnnnnnnnnnnnnnnnnnnnnnnnnnnnnnnnnnnnnnnnnnnnnnnnnnnnnnnnnnnnnnnnnnnnnnnnnnnnnnnnnnnnnnnnnnnnnnnnnnnnnnnnnnnnnnnnnnnnnnnnnnnnnnnnnnnnnnnnnnnnnnnnnnnnnnnnnnnnnnnnnnnnnnnnnnnnnnnnnnnnnnnnnnnnnnnnnaggaagagaaggagaaggtgcaagcacagaaggaagaagttctcagccacatgaatgatgtgctagagaatgagctccaatgtattatttgttcagaatacttcattgannnnnnnnnnnnnnnnnnnnnnnnnnnnnnnnnnnnnnnnnnnnnnnnnnnnnnnnnnnnnnnnnnnnnnnnnnnnnnnnnnnnnnnnnnnnnnnnnnnnnnnnnnnnnnnnnnnnnnnnnnnnnnnnnnnnnnnnnnnnnnnnnnnnnnnnnnnnnnnnnnnnnnnnnnnnnnnnnnnnnnnnnnnnnnnnnnnnnnnnnnnnnnnnnnnnnnnnnnnnnnnnnnnnnnnnnnnnnnnnnnnnnnnnnnnnnnnnnnnnnnnnnnnnnnnnnnnnnnnnnnnnnnnnnnnnnnnnnnnnnnnnnnnnnnnnnnnnnnnnnnnnnnnnnnnnnnnnnnnnnnnnnnnnnnnnnnnnnnnnnnnnnnnnnnnnnnnnnnnnnnnnnnnnnnnnnnnnnnnnnnnnnnnnnnnnnnnnnnnnnnnnnnnnnnnnnnnnnnnnnnnnnnnnnnnnnnnnnnnnnnnnnnnnnnnnnnnnnnnnnnnnnnnnnnnnnnnnnnnnnnnnnnnnnnnnnnnnnnnnnnnnnnnnnnnnnnnnnnnnnnnnnnnnnnnnnnnnnnnnnnnnnnnnnnnnnnnnnnnnnnnnnnnnnnnnnnnnnnnnnnnnnnnnnnnnnnnnnnnnnnnnnnnnnnnnnnnnnnnnnnnnnnnnnnnnnnnnnnnnnnnnnnnnnnnnnnnnnnnnnnnnnnnnnnnnnnnnnnnnnnnnnnnnnnnnnnnnnnnnnnnnnnnnnnnnnnnnnnnnnnnnnnnnnnnnnnnnnnnnnnnnnnnnnnnnnnnnnnnnnnnnnnnnnnnnnnnnnnnnnnnnnnnnnnnnnnnnnnnnnnnnnnnnnnnnnnnnnnnnnnnnnnnnnnnnnnnnnnnnnnnnnnnnnnnnnnnnnnnnnnnnnnnnnnnnnnnnnnnnnnnnnnnnnnnnnnnnnnnnnnnnnnnnnnnnnnnnnnnnnnnnnnnnnnnnnnnnnnnnnnnnnnnnnnnnnnnnnnnnnnnnnnnnnnnnnnnnnnnnnnnnnnnnnnnnnnnnnnnnnnnnnnnnnnnnnnnnnnnnnnnnnnnnnnnnnnnnnnnnnnnnnnnnnnnnnnnnnnnnnnnnnnnnnnnnnnnnnnnnnnnnnnnnnnnnnnnnnnnnnnnnnnnnnnnnnnnnnnnnnnnnnnnnnnnnnnnnnnnnnnnnnnnnnnnnnnnnnnnnnnnnnnnnnnnnnnnnnnnnnnnnnnnnnnnnnnnnnnnnnnnnnnnnnnnnnnnnnnnnnnnnnnnnnnnnnnnnnnnnnnnnnnnnnnnnnnnnnnnnnnnnnnnnnnnnnnnnnnnnnnnnnnnnnnnnnnnnnnnnnnnnnnnnnnnnnnnnnnnacaaaaggaaaagatgttaccaccttgatttaataacttcttgtttcccatacatgtgttttgtttatagattgcatgggtatatgtcaatttttgtatgttctgtctttagtttacatgttgtaattcgtttttaggagagtacagacgtacactttttgagtagacaatatgttcacatagtttgaaataaaaggtacaaaatggcatagaatgaaatgcctctcaccctttccccacagcgactacttcccactcagaggcaacaagtattacagttccttgtgtattcttccagagatcttccctgtccacacaagcaaatacacatgtggtctttttccttgttttgcacaaatggtaaactgtacactattctgtaccttgctattttcagatatatgttgtcaacagttccatgtcagtagtttcctttctttgttacagctgcctgttatttcattgtgtatttgcactatcatttacttttccggcttatttttgatagaaatctaggttggttcaaacctttttactcttaaaacaatgctgcagttaacacccttgtacatacatctttagagaaaagannnnnnnnnnnnnnnnnnnnnnnnnnnnnnnnnnnnnnnnnnnnnnnatagagactatgttgcctaggctggtcttgaaattctgggctaaagcaatcctaccaccttggcctcctaaagtgctgagattacaggcatgagccactgcgcaaagaatcatcttgacttgagcctgaagactatgtacagactgacctcacagactgaccaccgttccatcccacagctgctggacatagagtgatttgcagcccctcctttcagaataccacatgcctcaaatgttccacaatatctaggaaagtgagctcttaaagatagactaaaaagaataataaatcaatacaacaacatttaaaagccagactagcagaatttgaatcttggccctgctgttagtaactgtgtgggcctcgggcaagttacacaacctccttgtatcttcgttttggtttcttcatctctaaataattttatctgtcattattgcactgatcacaaacaaaggcctgaatgtactatgtttaaaagacaaaccaaaaattaacacaaacttgaattatttgtctcagctacagaatgttctttccttggagagatacctgatattaaacatcatctgcattttgcttgcctagaaaatacatggtaacttttctgccttgcagcatcaaactatagtatagctgagccccagtgctgtgcagtctggctctaattaaaggcacattctttacagcagtactctggggaactggaaaagggggtttgtttcattatctggttttattaagcagatgaatgcgggcagctatgtgaagcactttgcagtgaatggcaggtgtcccatatctggttgtgttacctagaaagggctcactctacctctaggcatgcttcatccccacaatcagactgnnnnnnnnnnnnnnnnnnnnnnnnnnnnnnnnnnnnnnnnnnnnnnnnnnnnnnnnnnnnnnnnnnnnnnnnnnnnnnnnnnnnnnnnnnnnnnnnnnnnnnnnnnnnnnnnnnnnnnnnnnnnnnnnnnnnnnnnnnnnnnnnnnnnnnnnnnnnnnnnnnnnnnnnnnnnnnnnnnnnnnnnnnnnnnnnnnnnnnnnnnnnnnnnnnnnnnnnnnnnnnnnnnnnnnnnnnnnnnnnnnnnnnnnnnnnnnnnnnnnnnnnnnnnnnnnnnnnnnnnnnnnnnnnnnnnnnnnnnnnnnnnnnnnnnnnnnnnnnnnnnnnnnnnnnnnnnnnnnnnnnnnnnattagctaaatttgacatagaaattaagagaaggaatgtctactttgtattgtggtcctaatctaaggtgaggagaatcctggaatctgtctcttgctctaagacgcagacttgttcataaatgtggggtctgattggaacaggatctgccattggtcacaataggccaagggcttgttctgaaccctacttagcctcattcagagaaaaaaacttcctgcctggtcagctttttcagcttctcccacaaatgggagttgaggcagtggcagtgtggggttcctgggaagacgatggggccttgtattaaggagaaataatgaactattttcttgattcttccatttatagaagtatatgaatcctaggaaagggctgagcctgcgataggtattcaataaatactccaatgccgtcattcctttgtctacagcatccccaaacaatgtaccagtgatgggctgcctgagctcattgagtcgccaagcagtatctcctgcctgctgctgctttactgcgttccagatgcccacctcagtttccagagccactatctctgccgtccactttccttcaggctctgtgaatacttcaacctgctgtgatttggggctatttatactctgcatgtatccaataaattcaattca

SEQ ID NO: 28743 - DNA, 1871 bp, Macaca Mulatta
  misc_feature (1)...(1871): n = A,T,C or G
tagttcagctgctgacctccagccagatcaggctgagactgaagatacagaagaagaactagtagatggtttggaagactgttgtagccatgatgagaatgaagaggaagagggnggagactcagagtgctcctcattaagtgctgtcacccctagcgaatcggtggccgtgatctctagnntagaagctgtatggaaattctgaccaaacccctttccaatcatgagaaagttgtccgaccagccctcatgtacagtctctttcccaacgttccccctaccatctattttggcactcgggatgagagannnnnnnnnnnnnnnnnnnnnnnnnnnnnnnnnnnnnnnnnnnnnnnnnnnnnnnnnnnnnnnnnnnnnnnnnnnnnnnnnnnnnnnnnnnnnnnnnnnnnnnnnnnnnnnnnnnnnnnnnnnnnnnnnnnnnnnnnnnnnnnnnnnnnnnnnnnnnnnnnnnnnnnnnnnnnnnnnnnnnnnnnnnnnnnnnnnnnnnnnnnnnnnnnnnnnnnnnnnnnnnnnnnnnnnnctatggcggaacctgtcacgcacgctgagccgctttggcaagaaggagttcagtttcttcccccagtcctttatcctgccccaggacgccaagctcctgcgcaaagcatgggagagcagcagccgccaaaagtggattgtgaagccanccagcatcagctcgaggcattggcatccaggttattcataagtggagtcagctccctaagcgaaggcccctcctggtacagaggtnaggtatctacacaaaccctacctcatcagcggcagcaagtttgacctgcggatctatgtttacgtcacttcctacgatcctctgcggatttacctcttttcggatggactggtccgctttgccagttgcaagtatnnnnnnnnnnnnnnnnnnnnnnnnnnnnnnnnnnnnnnnnnnnnnnnnnnnnnnnnnnnnnnnnnnnnnnnnnnnnnnnnnnnnnnnnnnnnnnnnnnnnnnnnnnnnnnnnnnnnnnnnnnnnnnnnnnnnnnnnnnnnnnnnnnnnnnnnnnnnnnnnnnnnnnnnnnnnnnnnnnnnnnnnnnnnnnnnnnnnnnnnnnnnnnnnnnnnnnnnnnnnnnnnnnnnnnnnnnnnnnnnnnnnnnnnnnnnnnnnnnnnnnnnnnnnnnnnnnnnnnnnnnnnnnnnnnnnnnnnnnnnnnnnnnnnnnnnnnnnnnnnnnnnnnnnnnnnnnnnnnnnnnnnnnnnnnnnnnnnnnnnnnnnnnnnnnnnnnnnnnnnnnnnnnnnnnnnnnnnnnnnnnnnnnnnnnnnnnnnnnnnnnnnnnnnnnnnnnnnnnnnnnnnnnnnnnnnnnnnnnnnnnnnnnnnnnnnnnnnnnnnnnnnnnnnnnnnnngcccacctcccccggggacaaatgtcgaatggctccagagcatgtcactgcacagaagatgaagaaagcctattatctgacccagaaaattcctgatcaggnnnnnnnnnnnnnnnnnnnnnnnnnnnnnnnnnnnnnnnnnnnnnnnnnnnnnnnnnnnnnnnnnnnnnnnnnnnnnnnnnnnnnnnnnnnnnnnnnnnnnnnnnnnnnnnnnnnnnnnnnnnnnnnnnnnnnnnnnnnnnnnnnnnnnnnnnnnnnnnnnnnnnnnnnnnnnnnnnnnnnnnnnnnnnnnnnnnnnnnnnnnnnnnnnnnnnnnnnnnnnnnnnnnnnnnnnnnnnnnnnnnnnnnnnnnnnnnnnnnnnnnnnnnnnnnnnnnnnnnngtggtctctcccgacaacacttctgactgtctcaaaggatgacgtgatactcaatgccttcagcaaatcagagactagcaagctgg

SEQ ID NO: 28744 - DNA, 133 bp, Macaca Mulatta
cgatccagctggacggggagatcctcttctcgctgttgcagaaggtgacgccggtggcgcacaagcacctcagccgacagaagatcgacccgctcctctgtatgacagagtggttcatgtgcgccttctcccg

SEQ ID NO: 28745 - DNA, 420 bp, Macaca Mulatta
tctataaaatggaagatttccagaggtccatggtttgtgtcctctgtcctgcacagctcctgtctggctggcacagtggatggaggaagggaggttgaccacaggatctgggggaggtctggccagtgcagccttggatgcacaagtgtcttggggccagtggtggctgcctctgtgcccacaactgtccatccatgcccagaggaggatcccagagtgtaggaggagaacctggagaagaattttgctctggatccagcagaggggctttcggaggaagccacaacccagagggggaccccccaaccctcctacagtcctggggccagagggtgagtgtggggagtgcagagccgggcccatgtctgtgcacacgtgtgtgtttgtccatgcatagcgcctgccccgtgtgctctttgc

SEQ ID NO: 28746 - DNA, 452 bp, Macaca Mulatta
  misc_feature (1)...(452): n = A,T,C or G
gaatagatcactcagatgtattttagataagctatttagcctttgatggaaccataaatacagtgaatgcaaccttttgcattgttaaggaggcttttgtttttaagtggtggatcgaggagctagtttacaggcttactgtgatttaagcaaatgtgaaaagtgaaaccttaattttatcaaaaggagtttctgtaaatggtatgtctccttagaatacgcaaatcataattttatttgtacacactgttttggggctcatctcacatatagctcagagcataaagtattaccttttggaattaaaagccactgactgttaaagtataacaacacacatcaattttttaaaaagccttgaatggcctttgtcttaaaaagaaatgaagagccgggtgcggtagcacnnnnnnnnnnnnnnnnnnccttgggaggctaagacaggaggattc

SEQ ID NO: 28747 - DNA, 802 bp, Macaca Mulatta
  misc_feature (1)...(802): n = A,T,C or G
gggagtctcgccggccgcgcgaacccgtttgtgctcggtatcctagtgcacacgccttgcaagcgacggcgccatgagtctgacttccagttccagcgtacgagttgaatggatcgcagcagttaccattgctgctgggacagctgcaattggttatctagcttacaaaagattttatgttaaagatcatcgaaataaagctatgataaaccttcacatccagaaagacaaccccaagatagtacatgcttttgacatggaggatttgggagataaagctgtgtactgccgttgttggaggtccaaaaagttcccattctgtgatggggctcacacaaaacataacgaagagactggagacaatgtgggccctctgatcatcaagaaaaaagaaacttaaatggacacttttgatgctgcaaatcagcttgtcgtgaagttacctgattgtttaattagaatgactaccacctctgtctaattcaccttcgctgggttctaaatgtggtatattgcaaactgcagctttcacattcatggcatttgtcttgatgaaacatcgtggtgcacatttgttnnnnnnnnnnnnnnnnnnnnnnnnnnncaacctcgtgggcctgggggttattttgggtcttgtaaaggacccgnnnnnnnnnnnnnnnnnngacatttaagagttgttatcttaacattagaaatattagttggttatcttggaaaattcaaacattatttaaaatttatttcctccaaaaattattggttatttttggcacagaatttggttaaccttttgtct

SEQ ID NO: 28748 - DNA, 834 bp, Macaca Mulatta
  misc_feature (1)...(834): n = A,T,C or G
ggacacttgcttctgacacaactgtgttcacgagcaacctcnnnnnnnnnnnnnnnnnnnnnnnnnnnnnnnnnnnnnnnnnnnnnnnnnnnnnnnnnnnnnnnnnnnnnnnnnnnnnnnnnnnnnnnnnnnnnnnnnnnnnnnnnnnnnnnnnnnnnnnnnnnnnnnnnnnnnnnnnnnnnnnnnnnnnnnnnnnnnnnnnnnnnnnnnnnnnnnnnnnnnnnnnnnnnnnnnnnnnnnnnnnnnnnnnnnnnnnnnnnnnnnnnnnnnnnnnnnnnnnnnnnnnnnnnnnnnnnnnnnnnnnnnnnnnnnnnnnnnnnnnnnnnnnnnnnnnnnnnnnnnnnnnnnngatcctgagaacttcannnnnnnnnnnnnnnnnnnnnnnnnnnnnnnnnnnnnnnnnnnnnnnnnnnnnnnnnnnnnnnnnnnnnnnnnnnnnnnnnnnnnnnnnnnnnnnnnnnnnnnnnnnnnnnnnnnnnnnnnnnnnnnnnaagctcactttcttgctgtccaatttctaccaaaagttccttttgttcccaaagtcccactactggaactggggggatattatgaaaggggccttgaagatctggaattctgccctaataaaaaaacattttatttttcnnnnnnnnnnnnnnnnnnnnnnnnnnnnnnnnnnnnnnnnncttggtccggcccccccctccggcccctccgaagaaagccttttcctaaaacccattttcgtttttgtgggcgccgcggcgggcccccagtatagggttaaagtggaaaaaatggggtccctataagcttggtttttccccagagagaaaaaaattccca

SEQ ID NO: 28749 - DNA, 790 bp, Macaca Mulatta
gcaaggatgcaggagaatgacagtttatacccagggcccatccatactacagagggtccagggggtctcccagccacccatccttggcaaccagatgttactggggccaagctaggatgggagctgagggggaaggaagtaggggaacagaagtggaaggatgcagccccccagacctgccgagaggcctcatgcatgtgcatgagtgtgcccatgggcagacgtgcctgtcccagcacagagggcaggatgagattgtccacattggccccaccctccaagtcgacctgtaccccatggtatgtagcagagcatcagggtaggctatcttctctgccttcagtcttcagggactgctgggaagagggaagcatgcacggcagggtttctctctccactgcattgcttcactgggctcacctgcttctgaaaacggctccctgtcttgggctctactgaggatctggggttgggagaggctgttggtctgaaggcagtaatcacaggctgcaggctagagggggcagttatgactgcctgaaattgagtgagggattgcacctcagaaaaagatctaaaaaacctagtctatgaatttcccacctccatcccatctatgggaagagccattcagtgtttagagagtgggggagatgggtccctgcacttggcctctccataagccttggagggtcagggctgatgccaggggtcctggcaaggcattgggcagagacagaccccaagagcggagcatctttttacgctggacatacgtatacacacaagc

SEQ ID NO: 28750 - DNA, 820 bp, Macaca Mulatta
  misc_feature (1)...(820): n = A,T,C or G
aggtgcgtatagcagcaaaattcatcattcatgcccctcctggagaatttaatgaggtttttaatnnnnnnnnnnnnnnnnnnnnnnnnnnnnnnnnnnnnnnnnnnnnnnnnnnnnnnnnnnnnnnnnnnnnnnnnnnnnnnnnnnnnnnnnnnnnnnnnnnnnnnnnnnnnnnnnnnggtattgataacagaacatggcgacttgggaaatggaaagtttttggatccaaagaacagaatctgttttaaatttgatcacttaagaaaggaggcaactgatccaagaccctgtgaagtagaaaatgcagttgaatcgtggagaacttcagtagaaactgctctgagagcttatgtaaaagaacattacccgaatggagtctgcactgtnnnnnnnnnnnnnnnnnnnnnnnnnnnnnnnnnnnnnnnnnnnnnnnnnnnnnnnnnnnnnnnnnnnnnnnnnnnnnnnnnnnnnnnnnnnnnnnnnnnnnnnnnnnnnnnnnnnnnnnnnnnnnnnnnnnnnnnnnnnnnnnnnnnnnnnnnnnaggttcattattatgaagatggtaatgttcagctagtgagtcataaagatatacaagattccctaacagtgtcnnnnnnnnnnnnnnnnnnnnnnnnnnnnnnnnnnnnnnnnnnnnnnnnnnnnnnnnnnnnnagactgccatcagtgagaattatcagacaatgtcggacactactttcaaagccttacgtcgacagttgccagttacacgcactaagattgattggaacaagatccttagctacaagattggcaaagagatgcagaatgcata

SEQ ID NO: 28751 - DNA, 4443 bp, Macaca Mulatta
  misc_feature (1)...(4443): n = A,T,C or G
aggatcacagtcaccttctatatagcaccatccccaggatgcaggagccggggcagattgtggagacctacacggaggaggatcctgagggagccatgtctgtagtctctgtggagacctcagatgatgggaccactcggcgcacagagaccacggtnnnnnnnnnnnnnnnnnnnnnnnnnnnnnggacagtacagccagttgctatgggaccagacgggttgcctgtggatgcttcatcagtttctaacaactatatccagactttgggtcgtgacttccgcaagaatggcaatgggggacctggtccctatgtggggcaagccggcactgctacccttcctaggaacttccactaccctcctgatggttatagccgccactatgaagatggttatccaggtggcagtgataactatggcagtctgtcccgggtgacccgcattgaggagcggtataggcccagcatggaaggctaccgggcacctagtagacaggatgtgtatgggccccaaccccaggttcgggtaggtgggagcagcgtggatctgcatcgctttcatccagagccttatgggctagaggatgaccagcgtagtatgggctatgatgacctggattatggtatgatgtctgattatggcactgcccgtcggactgggacaccctctgaccctcgtcggcgcctcagnnnnnnnnnnnnnnnnnnnnnnnnnnnnnnnnnnnnnnnnnnnnnnnnnnnnnnnnnnnnnnnnnnnnnnnnnnnnnnnnnnnnnnnnnnnnnnnnnnnnnnnnnnnnnnnnnnnnnnnnnnnnnnnnnnnnnnnnnnnnnnnnnnnnnnnnnnnnnnnnnnnnnnnnnnnnnnnnnnnnnnnnnnnnnnnnnnnnnnnnnnnnnnnnnnnnnnnnnnnnnnnnnnnnnnnnnnnnnnnnnnnnnnnnnnnnnnnnnnnnnnnnnnnnnnnnnnnnnnnnnnnnnnnnnnnnnnnnnnnnnnnnnnnnnnnnnnnnnnnnnnnnnnnnnnnnnnnnnnnnnnnnnnnnnnnnnnnnnnnnnnnnnnnnnnnnnnnnnnnnnnnnnnnnnnnnnnnnnnnnnnnnnnnnnnnnnnnnnnnnnnnnnnnnnnnnnnnnnnnnnnnnnnnnnnnnnnnnnnnnnnnnnnnctgtggaatctttcatcccatgactcaatcaaaatggagattgtggaccatgcactgcatgccttgacagatgaagtgatcattcctcattctggttgggagcgggaacctaatgaagactgtaagccacgccatattgagtgggaatcggtgctcaccaacacagctggctgccttaggnnnnnnnnnnnnnnnnnnnnnnnnnnnnnnnnnnnnnnnnnnnnnnnnnnnnnnnnnnnnnnnnnnnnnnnnnnnnnnnnnnnnnnnnnnnnnnnnnnnnnnnnnnnnnnnnnnnnnnnnnnnnnnnnnnnnnnnnnnnnnnnnnnnnnnnnnnnnnnnnnnnnnnnnnnnnnnnnnnnnnnnnnnnnnnnnnnnnnnnnnnnnnnnnnnnnnnnnnnnnnnnnnnnnnnnnnnnnnnnnnnnnnnnnnnnnnnnnnnnnnnnnnnnnnnnnnnnnnnnnnnnnnnnnnnnnnnnnnnnnnnnnnnnnnnnnnnnnnnnnnnnnnnnnnnnnnnnnnnnnnnnnnnnnnnnnnnnnnnnnnnnnnnnnnnnnnnnnnnnnnnnnnnnnnnnnnnnnnnnnnnnnnnnnnnnnnnnnnnnnnnnnnnnnnnnnnnnnnnnnnnnnnnnnnnnnnnnnnnnnnnnnnnngtatggtcgatacatccgctctgctctgcgtcaagagaaggctctttctgccatagctgacctcctgactaatgaacatgaacgggtggtgaaagctgcgtctggagcactgagaaacctggctgtggatgctcgcaacagagaattaattggnacatgctgttcctaacttggtaaagaatctgccaggaggacagcagaattcctcttggaatttctctgaggacactgtggtctctattttgaacactatcaatgaggttatcgccgagaacttggaggctgccaaaaagcttcgagagacacagggtattgagaagctggtgttgatcaacaaatcagggnacctnnnnnnnnnnnnnnnnnnnnnnnnnnnnnnnnnnnnnnnnnnnnnnnnnnnnnnnnnnnnnnnnnnnnnnnnnnnnnnnnnnnnnnnnnnnnnnnnnnnnnnnnnnnnnnnnnnnnnnnnnnnnnnnnnnnnnnnnnnnnnnnnnnnnnnnnnnnnnnnnnnnnnnnnnnnnnnnnnnnnnnnnnnnnnnnnnnncagataacaactattccacaccaaatgagagaggagaccacaatagaacactggatcgatcgggggatctaggcgacatggagccattgaagggaacaacacccttgatnnnnnnnnnnnnnnnnnnnnnnnnnnnnnnnnnnnnnnnnnnnnnnnnnnnnnnnnnnnnnnnnnnnnnnnnnnnnnnnnnnnnnnncagaagatttagcaccactgtctccattccatctgggcttatatgtacttttattttttggtggtgaaattgactgatgattttcctttttcttcgctggactattgtgccaactgccaggctgcctcctgcccttacagccctacgtggctgccttctttccatcaattcccaacttcttccggtgaagtttaattgtctcaacgttttcccctcccccattctctccattttctcccaagaagcctgactcagttatttgcatattttgagaaactgctgcagattagttctttttgccagttctccctggaactcttggccttttgtggagggagggatggagagaatagcaatcttcactggaagccgtgggaagaattggaagttacatgctgtatatgcaatgtccagcagtctgataaactgatgattcttaatcaagatttttttcctggtggggaagggacttttattttcttttagagaggggaaagtgtgaactcttcccttattcctaatggctatttttgaagcaaagaaggccggcaacattggcacatgccacctggcaaaggacccttgagtaagtgaaggtctcctagaactgggattaagagaccttgctctcctcatctccaaggcagggaccatcaagaacctacagactccatctcttctgcaagcctcatgccaaccctgggctattgctgctgccccttaaacagaggctgtccttaacccacttctcccgccctgtgatatgtctgctgagttggcctggccatttccaagaggctatagaaaggggagaatgtcaaggaagacttgatagagaaggagcagaaagatgttttttgggaagaagaagacatcgaggaggagctagtaggaatgtacnnnnnnnnnnnnnnnnnnnnnnngcttccccactcccccgtttctcctttccctatccttataggcctgtcccttgcctctgccctggattgtttggcaaactaaaggacttgatgtacataactcctgtcccttttacccttacaaggtggggattgcccctggctttgcctcttctttgtgcctttggcctggggtgcatctcctcccgcccttccatgtgcctttctttgcctctgcagtctcatttctcataattttgcaaattatattttgttgctttcttacctactattggccctaaatagcagaaagaagagaagtgacctagagaacctcagattcttcactgaggattggtatagccatgatttcagtcatagcaagcttttgctcaacagcatgtgggtgggattttgccaaaattctattctgatgaatctcaaagtaaggttggtaagggaggtgagtggtgtgactcttactccttaggtgcccagaatttaccatcatctctgaaggagttacagggaagtggtctccccagttgtcccctccttccagtattgcctcctctcactttagcatatattaattagcaggttgggctagagaaatcagctgctatgcgggccgcattattattattatttttaatccttttccttatttgccttctactccccttaatctaatctaaaagctctgttccatgcaactttatccctctcttccccttcccttatatattgaggctatggggtaggagaaaagtgcacaacccaccaccccctttactcgtgcattaaaatttctcatttaccctttccccgctttccatttcttcccactttcatctaccttttctggcaaaaaggagccttttgctctctgtgacccctaagagcatactgcacaggggaaattgccccatccaaaaggggctccactcttgatttcttttgtcctattgtgctcttttcctggtgctctttttt

SEQ ID NO: 28752 - DNA, 3092 bp, Macaca Mulatta
  misc_feature (1)...(3092): n = A,T,C or G
ttctctacgtcaaagacttggcctttgtggacccccttgactgcaccccgctcaagactatcacgcagcttctacaaccacccggtgcactttgtcttccatgacaccaagttggatgccatgctggaggagttcaagaagggnnnnnnnnnnnnnnnnnnnnnnnnnnnnnnnnnnnnnnnnnnnnnnnnnnnnnnnnnnnnnnnnnnnnnnnnnnnnnnnnnnnnnnnnnnnnnnnnnnnnnnnnnnnnnnnnnnnnnnnnnnnnnnnnnnnnnnnnnnnnnnnnnnnnnnnnnnnnnnnnnnnnnnnnnnnnnnnnnnnnnnnnnnnnnnnnnnnnnnnnnnnnnnnnnnnnnnnnnnnnnnnnnnnnnnnnnnnnnnnnnnnnnnnnnnnnnnnnnnnnnnnnnnnnnnnnnnnnnnnnnnnnnnnnnnnnnnnnnnnnnnnnnnnnnnnnnnnnnnnnnnnnnnnnnnnnnnnnnnnnnnnnnnnnnnnnnnnnnnnnnnnnnnnnnnnnnnnnnnnnnnnnnnnnnnnnnnnnnnnnnnnnnnnnnnnnnnnnnnnnnnnnnnnnnnnnnnnnnnnnnnnnnnnnnnnnnnnnnnnnnnnnnnnnnnnnnnnnnnnnnnnnnnnnnnnnnnnnnnnnnnnnnnnnnnnnnnnnnnnnnnnnnnnnnnnnnnnnnnnnnnnnnnnnnnnnnnnnnnnnnnnnnnnnnnnnnnnnnnnnnnnnnnnnnnnnnnnnnnnnnnnnnnnnnnnnnnnnnnnnnnnnnnnnnnnnnnnnnnnnnnnnnnnnnnnnnnnnnnnnnnnnnnnnnnnnnnnnnnnnnnnnnnnnnnnnnnnnnnnnnnnnnnnnnnnnnnnnnnnnnnnnnnnnnnnnnnnnnnnnnnnnnnnnnnnnnnnnnnnnnnnnnnnnnnnnnnnnnnnnnnnnnnnnnnnnnnnnnnnnnnnnnnnnnnnnnnnnnnnnnnnnnnnnnnnnnnnnnnnnnnnnnnnnnnnnnnnnnnnnnnnnnnnnnnnnnnnnnnnnnnnnnnnnnnnnnnnnnnnnnnnnnnnnnnnnnnnnnnnnnnnnnnnnnnnnnnnnnnnnnnnnnnnnnnnnnnnnnnnnnnnnnnnnnnnnnnnnnnnnnnnnnnnnnnnnnnnnnnnnnnnnnnnnnnnnnnnnnnnnnnnnnnnnnnnnnnnnnnnnnnnnnnnnnnnnnnnngcctgtgggggatctggcctctgccatggacctctgagtagctctgaggtggcactgtccagccctgtatagatggggcagtgggccagctaccatgagcaaaggctgtttttttactgagagtatttctaaactaggctcatcgctcttctttttaaatataattttgggaagggaagacagggttaaggaactttattnnnnnnnnnnnnnnnnnnnnctaaaaactataaaagaagaagggtttcttgtcctgggaagcaatggacatgatctgctcccagccatggccttccagcttgtgtccctgactgagggagctctcccttccccccccttcctcctccggaggtgggatcccagagcctgccggcagaggctcgtctcttggaaggaagacagctcttcacaggaagcaaagaaccaactggcatggagatcagctgcctgggcacctgcgccgtagcttgtctgacaatgcggaggccaggagctcctgggtagctgtgatcagggacatgataatccgagctatggagaggagcacatctgctgtcaaccgctgtacccagaaatctcctagaactctgccgacagcctctcctggtgagtcaggactcggctgaggacannnnnnnnnnnncctcccatccagccctttggacaactggccccttcgtgacggggcagactcaagtgttaggcagggtctcaggccttcgattgctcacccctgctcccnnnnnnnnnnnnnnnnnnnnnnnnnnnnnnnnnnnnnnnnnnnnnnnnnnnnnnnnnnnnnnnnnnnnnnnnnnnnnnnnnnnnnnnnnnnnnnnnnnnnnnnnnnnnnnnnnnnnnnnnnnnnnnnnnnnnnnnnnnnnnnnnnnnnnnnnnnnnnnnnnnnnnnnnnnnnnnnnnnnnnnnnnnnnnnnnnnnnnnnnnnnnnnnnnnnnnnnnnnnnnnnnnnnnnnnnnnnnnnnnnnnnnnnnnnnnnnnnnnnnnnnnnnnnnnnnnnnnnnnnnnnnnnnnnnnnnnnnnnnnnnnnnaaggctcacctgggccttatccacccttttatggaacctcaggagaggacagctcctcctaaaggcctgtaacttgcaaccctgctttctcacaggcgtgatcctagtgtgagaggtcgtcctgcccttgctgaagttagtagtactgtaccaagagctctgcccccatgtgaattgctaccctggcgcctcttccctggggctgaatcaggccctgctgcagaactccaggtttcccagagtcggggaggctgtgggaccaaggtccccgttggcccttctgctgggtgcagcaggagctgggtcctgagagcctggccagtgaaactgcaggccttccgcctgagtattatttattcactcctttcctcactccaagtgccctgctctccaggtgcctagagaatcctaactcttaggaccagggattgtcttgcaccaagtatgcctaccctggccagtctgaggtctcctagccatagaactgactcctggacgcctggagagaaggtggtgacacccgtgggttctcaactgtaaggaaaaaagacaccagacttttgttccctattgggggaaagcccttagtcttctccaggagcagcttgctcccaagtccttttggaagctggcagagctgtactcctgacagcctgactgccaggtggagcaaaagacgttggtgagggtgtgggaagcaaaaggggcgggtgtacacacctccacagtgacctctgtgcacacggttaccgccaactggctgaccctcctcttccctggtccattgatcatcccttctcacagagggtcatcattatttcaaatactgttggtctgatgacttcct

SEQ ID NO: 28753 - DNA, 161 bp, Macaca Mulatta
gccagggaagtgaagtaggcgagggcgaggcggctggggactgcggggcggacgcaggcgagcatgtccgccctgactcggctgccgtatttcgctcgcgttggaggccgccttttcagaagtggccgcgcacggactgctggagatggtggagtccgtca

SEQ ID NO: 28754 - DNA, 2760 bp, Macaca Mulatta
  misc_feature (1)...(2760): n = A,T,C or G
aattcagaacagttactctgaatggtctttgctaagagcagtttaatgattaagtaaggtcagtgtccttggaagtccaaactctagccaaatttccctggtctacacccccagggataaggtaaatgtttaagaacacagtgaaattcctgaggcccccaaatccaatggaactagctgttgagggctaaaagaagagagttttttagaaaactccaaatctctcaggctggggatatttcaaagactactactattattaataatannnnnnnnnnnnnnnnnnnnnnnnnnnnnnnnnnnnnnnnnnnnnnnnnnnnnnnnnnnnnnnnnnnnnnnnnnnnnnnnnnnnnnnnnnnnnnnnnnnnnnnnnnnnnnnnnnnnnnnnnnnnnnnnnnnnnnnnnnnnnnnnnnnnnnnnnnnnnnnnnnnnnnnnnnnnnnnnnnnnnnnnnnnnnnnnnnnnnnnnnnnnnnnnnnnnnnnnnnnnnnnnnnnnnnnnnnnnnnnnnnnnnnnnnnnnnnnnnnnnnnnnnnnnnnnnnnnnnnnnnnnnnnnnnnnnnnnnnnnnnnnnnnnnnnnnnnnnnnnnnnnnnnnnnnnnnnnnnnnnnnnnnnnnnnnnnnnnnnnnnnnnnnnnnnnnnnnnnnnnnnnnnnnnnnnnnnnnnnnnnnnnnnnnnnnnnnnnnnnnnnnnnnnnnnnnnnnnnnnnnnnnnnnnnnnnnnnnnnnnnnnnnnnnnnnnnnnnnnnnnnnnnnnnnnnnnnnnnnnnnnnnnnnnnnnnnnnnnnnnnnnnnnnnnnnnnnnnnnnnnnnnnnnnnnnnnnnnnnnnnnnnnnnnnnnnnnnnnnnnnnnnnnnnnnnnnnnnnnnnnnnnnnnnnnnnnnnnnnnnnnnnnnnnnnnnnnnnnnnnnnnnnnnnnnnnnnnnnnnnnnnnnnnnnnnnnnnnnnnnnnnnnnnnnnnnnnnnnnnnnnnnnnnnnnnnnnnnnnnnnnnnnnnnnnnnnnnnnnnnnnnnnnnnnnnnnnnnnnnnnnnnnnnnnnnnnnnnnnnnnnnnnnnnnnnnnnnnnnnnnnnnnnnnnnnnnnnnnnnnnnnnnnnnnnnnnnnnnnnnnnnnnnnnnnnnnnnnnncacttctactatgctatcgagccctcctggcatgcccgggtgcaggccgtttttctgcccatggctgcctttctcgcctggctttcctgcactggctcctgctataacaaatacatccagaaaccaggcctgctgggccgcacatgccaggaagtgccctccgccctggcctatgcactggacatcagtcctgtggtgcatcgtatcttcgtgtcctccgaccctgccatagatgacccagctcttctctaccacaagtgccaggtggtcttctttctgctggctgctgccttcttctctaccttcatgcctgagcgctggttccctggcagctgccatgtcttcgggcagggccaccaacttttccacatcttcttggtgctgtgcacgctggctcagctggaggctgtggcactggactatgaggcccgacggcccatctatgagcctctgcacacgcactggcctcacaacttttccggtctcttcctgctcacggtgggcagcagcgtcctcaccgcgttcctcctgagccagctggtacagcgcagacttgatcagaagaccaagtgaagggggctggcatctagtagggagggaggtattgtggggggacaggggtctgggcttggctccaggggggaacaagtcctggtaaaaattgtttgtgtctggcccacagtgactctttgtgcaccactcaactcaagggcgtcactggccaattcttggatttacggattnnnnnnnnnnnnnnnnnnnnnnnnnnnnnnnnnnnnnnnnnnnnnnnnnnnnnnnnnnnnnnnnnnnnnnnnnnnnnnnnnnnnnnnnnnnnnnnnnnnnnnnnnnnnnnnnnnnnnnnnnnnnnnnnnnnnnnnnnnnnnnnnnnnnnnnnnnnnnnnnnnnnnnnnnnnnnnnnnnnnnnnnnnnnnnnnnnnnnnnnnnnnnnnnnnnnnnnnnnnnnnnnnnnnnnnnnnnnnnnnnnnnnnnnnnnnatgcggaaggggcaggcccaaaatatatgcaggatcttactgtcccttgaagcccagccacaagtgttggcgctgcagagagaccccaaaggtagtagattgtgccagacagaaatgggtcccatccagtgcttcataccccttcagtcaccatcccagacagtgagtcccagatcttctagttctggcttctgtgtcccacacagcctgttcccagcttctttcctggttcccttgttaaggactcatttatnnnnnnnnnnnnnctgggcctctgctcagaggcaggtcaccgctgggccctgaggatcaatgcaagatgataaagnnnnnnnnnnnnnnnnnnnnnnnnnnnnnnnnnnggagttttgctgttgttggctaggctggagtgcaatggtgcnnnnnnnnnnnnnnnnnnnnnnnnnnnnnnnnnnnnnnnnnnnnnnnnnnnnnnnnnnnnnnnnnnnnnnnnnnnnnnnnnnnnnnnnnnnnnnnnnnnnnnnnnnnngtatttttagtagagatgggatttctccatgttggtcaggctggtagcgaactcccgacctcaggtgatccgcctgcctaggcctcccaaagtgctgggattacaggcgtgagtcaccgcgcccggcc

SEQ ID NO: 28755 - DNA, 199 bp, Macaca Mulatta
  misc_feature (1)...(199): n = A,T,C or G
tgagcngtacagctgatgtttgcaccatcgcttctttccctgactgtgattcctgatgtttgcactatttctccttgcctgagctatattaccagtgtctgcaccatgtccctttgcctggtgtctacgttctactttgccttttctcatggatgcatgacctttgacatactctgggaggtaggggtaggggngagan

SEQ ID NO: 28756 - DNA, 259 bp, Macaca Mulatta
  misc_feature (1)...(259): n = A,T,C or G
ctgtgacctggccagctgcatttcccctggaggcttgagcccaagccagagccttgaaaaggtattcaggttgttgctcnnnnnnnnnnnnnnnnnnnnnnnnnnnnnaaccaaatatcttgaaccctcataaactccataccctgacccctttgttttggacatatcgagatagaacaactctctcccactgtctgttgtaaggatatgctgtagcccactcattaagtacattttcctaataaatgctttggactga

SEQ ID NO: 28757 - DNA, 1916 bp, Macaca Mulatta
  misc_feature (1)...(1916): n = A,T,C or G
aagccaggaaatatgcctttccgatcactcgttccacctggccagnnnnnnnnnnnnnnnnnnnnnnnnnnnnnnnnnnnnnnnnnnnnnnnnnnnnnnnnnnnnnnnnnnnnnnnnnnnnnnnnnnnnnnnnnnnnnnnnnnnnnnnnnnnnnnnnnnnnnnnnnnnnnnnnnnnnnnnnnnnnnnnnnnnnnnnnnnnnnnnnnnnnnnnnnnnnnnnnnnnnnnnnnnnnnnnnnnnnnnnnnnnnnnnnnnnnnnnnnnnnnnnnnnnnnnnnnnnnnnnnnnnnnnnnnnnnnnnnnnnnnnnnnnnnnnnnnnnnnnnnnnnnnnnnnnnnnnnnnnnnnnnnnnnnnnnnnnnnnnnnnnnnnnnnnnnnnnnnnnnnnnnnnnnnnnnnnnnnnnnnnnnnnnnnnnnnnnnnnnnnnnnnnnnnnnnnnnnnnnnnnnnnnnnnnnnnnnnnnnnnnnnnnnnnnnnnnnnnnnnnnnnnnnnnnnnnnnnnnnnnnnnnnnnnnnnnnnnnnnnnnnnnnnnnnnnnnnnnnnnnnnnnnnnnnnnnnnnnnnnnnnnnnnnnnnnnnnnnnnnnnnnnnnnnnnnnnnnnnnnnnnnnnnnnnnnnnnnnnnnnnnnnnnnnnnnnnnnnnnnnnnnnnnnnnnnnnnnnnnnnnnnnnnnnnnnnnnnnnnnnnnnnnnnnnnnnnnnnnnnnnnnnnnnnnnnnnnnnnnnnnnnnnnnnnnnnnnnnnnnnnnnnnnnnnnnnnnnnnnnnnnnnnnnnnnnnnnnnnnnnnnnnnnnnnnnnnnnnnnnnnnnnnnnnnnnnnnnnnnnnnnnnnnnnnnnnnnnnnnnnnnnnnnnnnnnnnnnnnnnnnnnnnnnnnnnnnnnnnnnnnnnnnnnnnnnnnnnnnnnnnnnnnnnnnnnnnnnnnnnnnnnnnnnnnnnnnnnnnnnnnnnnnnnnnnnnnnnnnnnnnnnnnnnnnnnnnnnnnnnnnnnnnnnnnnnnnnnnnnnnnnnnnnnnnnnnnnnnnnnnnnnnnnnnnnnnnnnnnnnnnnnnnnnnnnnnnnnnnnnnnnnnnnnnnnnnnnnnnnnnnnnnnnnnnnnnnnnnnnnnnnnnnnnnnnnnnnnnnnnnnnnnnnnnnnnagccagagccctgcctcacagatgggcagtcgggcagggctgcactgtacccaggcctaccctgtgcggaccgcgggccaggagctgccttttgcctacagcgggcagccaggtggcagtgggctctctagtgtggctggacacaccgacctgatcgactccctgctgaagaacaggacttcagaggagtggatgaatgatttggacgacctgttagggtctcagtaatggaaggatgtgtagtgtttttagtgttcattcatcctatatttttcttctcagattcaaagaaagagcaactactttggaccaaaagcccatggcctggggagctgggcagtagagcccaagctccaggtgaggcctggccctgggcagggtccgtggctgcgcccctcaggccagcacttgcggtccatcgggctggccccagcccatctgctggcatcagtacctggtgttgggacagcaggatagggttctaaaggtggttttctatccaaatgaccaaaaaaccaacagtaacaacagtgaaaccccacgatatcaggcttataaaaatctgtgccatcatggtgattttatccaagatttctccatttaccccagtgttagggacaagtttttgttgaaactttatatagcagaattatttgcaatttgtagcatagaaaagatttttaaatttttttacaaaaggtttttaaacagattagggtaggtgatggtttaaatcaattaagaggcattggaaacctagggtttccttttgattaagag

SEQ ID NO: 28758 - DNA, 109 bp, Macaca Mulatta
tggaaatagataaccagacgtgggtgagagaatttattcttcttggcttatccagtgactggtgcactcaggtctccctgttttccctgttcttggtcacatacctcat

SEQ ID NO: 28759 - DNA, 516 bp, Macaca Mulatta
cgaagggaggagcggcaacatggcggcttcgggagctggtgaccctctggatgctaagcgtggagaggccccgttcgctcagcttatcgacccgactcgggagaagcagacacccgagcaactgcattccatgccgcggacgcagcttgcccagtggcaggaggtcctacagcagcggcagacccggaacatcgtgacctgcctaggcatcggggccctggtgttagctatttatggttacaccttctactcgatttcccaggagcgtttcctagatgagctagaagacgaggccaaagttgcccgagcctgagctctggcaagggcgtcaggatgctaatctggatgggcattgatcatgtccaacctgctggagccccttcacatggtggatgatgacccatgaccctgtagaaattgactcctgctcacaacattgttggccttcttactaaccttgggccatgatcgatcccaagaaaccagggacttaagcatttggccactgtcaaaaga

SEQ ID NO: 28760 - DNA, 786 bp, Macaca Mulatta
  misc_feature (1)...(786): n = A,T,C or G
gggctcttggtgacagcgtgggccgctgagatttgggagtctgcgctgggtccgcttggagttctgagcggatggaagatttcagtcatgtttgcacccgcggtgatgcgtgcttttcgcaagaacaagactctccgctacggagtccccatgttgttgctgattgttggaggttcttttggtcttcgtgagttttctcaaatccgatacgatgctgtgaagattaaaatggatcctgagcttgaaaaaaaactgaaagagaataaaatatctttagagtcggaatatgagaaaataaaagactccaagtttgatgactggaagaatattcgaggacccaggccttgggaagatcctgacgtcctccaaggaagaaatccagaaagccttaagactaagacaacttgactctgctgattcttnnnnnnnnnnnnnnnnnnnnnnnnnnnnnnttatcaactggacttcctaatatatacccctatcaagtggaaaggaaattccaggcccatggaaacttggatatgggtaatttgatgacaaataatcttgataaaaggtcatgtacaggtttttatacttcccagatattccatctgtggatgaaagtaacagtgttgggccacgtatatttttacaacttgaaataaaaaatgtaaatactgactcccnnnnaaaaaaatcttattatagaaaatttcgattttattcgcttttttttctcacttttttttctactggatatgttgattagatgtcgtgtatggatcacagtctgctggggaa

SEQ ID NO: 28761 - DNA, 5413 bp, Macaca Mulatta
  misc_feature (1)...(5413): n = A,T,C or G
ggcctgtatgagaaagcgctagaggacagcgagaaggcactaggcctggacagcgagagtatccgggcattgttccgcaaggcacgcgctctcaatgaactgggacgccacaaggaggcctacgagtgcagcagccggtgttccctcgccctgccccacgnnnnnnnnnnnnnnnnnnnnnnnnnnnnnnnnnnnnnnnnnnnnnnnnnnnnnnnnnnnnnnnnnnnnnnnnnnnnnnnnnnnnnnnnnnnnnnnnnnnnnnnnnnnnnnnnnnnnnnnnnnnnnnnnnnnnnncagggaacttctaatggattggggtccatagatgacatcgaaacaggtaatgtccctgatatgagggaacaagtggaaattgaggcccnnnnnnnnnnnnnnnnnnnnnnnnnnnnnnnnnnnnnnnnnnnnnnnnnnnnnnnnnnnnnnnnnnnnnnnnnnnnnnnnnnnnnnnnnnnnnnnnnnnnnnnnnnnnnnnnnnnnnnnnnnnnnnnnnnnnnnnnnnnnnnnnnnnnnnnnnnnnnnnnnnnnnnnnnnnnnnnnnnnnnnnnnnnnnnnnnnnnnnnnnnnnnnnnnnnnnnnnnnnnnnnnnnnnnnnnnnnnnnnnnnnnnnnnnnnnnnnnnnnnnnnnnnnnnnnnnnnnnnnnnnnnnnnnnnnnnnnnnnnnnnnnnnnnnnnnnnnnnnnnnnnnnnnnnnnnnnnnnnnnnnnnnnnnnnnnnnnnnnnnnnnnnnnnnnnnnnnnnnnnnnnnnnnnnnnnnnnnnnnnnnnnnnnnnnnnnnnnnnnnnnnnnnnnnnnnnnnnnnnnnnnnnnnnnnnnnnnnnnnnnnnnnnnnnnnnnnnnnnnnnnnnnnnnnnnnnnnnnnnnnnnnnnnnnnnnnnnnnnnnnnnnnnnnnnnnnnnnnnnnnnnnnnnnnnnnnnnnnnnnnnnnnnnnnnnnnnnngccagagccctgcatgcccaacactgccttgctcatcaagaaccccttggctgccacccacgagttcaagcaggcctgccagctctgctaccccaagacagnnnnnnnnnnnnnnnnnnnnnnnnnnnnnnnnnnnnnnnnnnnnnnnnnnnnnnnnnnnnnnnnnnnnnnnnnnnnnnnnnnnnnnnnnnnnnnnnnnnnnnnnnnnnnnnnnnnnnnnnnnnnnnnnnnnnnnnnnnnnnnnnnnnnnnnnnnnnnnnnnnnnnnnnnnnnnnnnnnnnnnnnnnnnnnnnnnnnnnnnnnnnnnnnnnnnnnnnnnnnnnnnnnnnnnnnnnnnnnnnnnnnnnnnnnnnnnnnnnnnnnnnnnnnnnnnnnnnnnnnnnnnnnnnnnnnnnnnnnnnnnnnnnnnnnnnnnnnnnnnnnnnnnnnnnnnnnnnnnnnnnnnnnnnnnnnnnnnnnnnnnnnnnnnnnnnnnnnnnnnnnnnnnnnnnnnnnnnnnnnnnnnnnnnnnnnnnnnnnnnnnnnnnnnnnnnnnnnnnnnnnnnnnnnnnnnnnnnnnnnnnnnnnnnnnnnnnnnnnnnnnnnnnnnnnnnnnnnnnnnnnnnnnnnnnnnnnnnnnnnnnnnnnnnnnnnnnnnnnnnnnnnnnnnnnnnnnnnnnnnnnnnnnnnnnnnnnnnnnnnnnnnnnnnnnnnnnnnnnnnnnnnnnnnnnnnnnnnnnnnnnnnnnnnnnnnnnnnnnnnnnnnnnnnnnnnnnnnnnnnnnnnnnnnnnnnnnnnnnnnnnnnnnnnnnnnnnnnnnnnnnnnnnnnnnnnnnnnnnnnnnnnnnnnnnnnnnnggtgccccgaggacacatgggcccagcacctttgacctgcaaatgaagtttgtatgtggccagtgctggaggaacgggcaggtggtggagcctgacaaggacctcaagtactgcagtgccaaggcccggcactgnnnnnnnnnnnnnnnnnnnnnnnnnnnnnnnnnnnnnnnnnnnnnnnnnnnnnnnnnnnnnnnnnnnnnnnnnnnnnnnnnnnnnnnnnnnnnnnnnnnnnnnnnnnnnnnnnnnnnnnnnnnnnnnnnnnnnnnnnnnnnnnnnnnnnnnnnnnnnnnnnnnnnnnnnnnnnnnnnnnnnnnnnnnnnnnnnnnnnnnnnnnnnnnnnnnnnnnnnnnnnnnnnnnnnnnnnnnnnnnnnnnnnnnnnnnnnnnnnnnnnnnnnnnnnnnnnnnnnnnnnnnnnnnnnnnnnnnnnnnnnnnnnnnnnnnnnnnnnnnnnnnnnnnnnnnnnnnnnnnnnnnnnnnnnnnnnnnnnnnnnnnnnnnnnnnnnnnnnnnnnnnnnnnnnnnnnnnnnnnnnnnnnnnnnnnnnnnnnnnnnnnnnnnnnnnnnnnnnnnnnnnnnnnnnnnnnnnnnnnnnnnnnnnnnnnnnnnnnnnnnnnnnnnnnnnnnnnnnnnnnnnnnnnnnacaggctccagaagggcaaagcctgcccagatggggacaagtgccgctgcgcccatggacaggaagagctcaacgagtggctggatcggcgcgaggtgctgaagcaaaagctggccaaggctcgcaaggnnnnnnnnnnnnnnnnnnnnnnnnnnnnnnnnnnnnnnnnnnnnnnnnnnnnnnnnnnnnnnnnnnnnnnnnnnnnnnnnnnnnnnnnnnnnnnnnnnnnnnnnnnnnnnnnnnnnnnnnnnnnnnnnnnnnnnnnnnnnnnnnnnnnnnnnnnnnnnnnnnnnnnnnnnnnnnnnnnnnnnnnnnnnnnnnnnnnnnnnnnnnnnnnnnnnnnnnnnnnnnnnnnnnnnnnnnnnnnnnnnnnnnnnnnnnnnnnnnnnnnnnnnnnnnnnnnnnnnnnnnnnnnnnnnnnnnnnnnnnnnnnnnnnnnnnnnnnnnnnnnnnnnnnnnnnnnnnnnnnnnnnnnnnnnnnnnnnnnnnnnnnnnnnnnnnnnnnnnntgaggagggaggggcctagctgacccctccagcttcagcctccagctttaacttatgtctgctcctaatgggggcccaaagctcagggctggggagcctggggtccccacttgaatctgcagcaggagagtccttcgccctggccggtcctcatcccaccccctccccctgggggcaaatcaggacacaacagagggcggaggccccattagctttaaaatgtagccccaggatggagctgggaacactgtactggtcacttaccctctggggcctcagctttcagcttcccctcgggaaggctgggaggagcggggctggaggatctttggagcttaaggagttcccggcctttctctgatgccaccacctgaaccctactccctcgtgggccagtgaaaatagactgtaggtcctcagagccttcagagatgatccagcccaaaccccattttgcagagaggaaaactgaggcctagaagggaggagtggtccgcccagggtcccagcacaaggcagagctgggatgaaaacagggctcaaaagactcagggccaattattggccaagcccacaatcccctcagcagggatgtgacggtctctgaatcggtgtgcagctggggtcccagacagcgctgcctggnnnnnnnnnnnnnnnnnnnnnnnnnnnnnnnnnnnnnnnnnnnnnnnnnnnnnnnnnnnnnnnnnnnnnnnnnnnnnnnnnnnnnnnnnnnnnnnnnnnnnnnnnnnnnnnnnnnnnnnnnnnnnnnnnnnnnnnnnnnnnnnnnnnnnnnnnnnnnnnnnnnnnnnnnnnnnnnnnnnnnnnnnnnnnnnnnnnnnnnnnnnnnnnnnnnnnnnnnnnnnnnnnnnnnnnnnnnnnnnnnnnnnnnnnnnnnnnnnnnnnnnnnnnnnnnnnnnnnnnnnnnnnnnnnnnnnnnnnnnnnnnnnnnnnnnnnnnnnnnnnnnnnnnnnnnnnnnnnnnnnnnnnnnnnnnnnnnnnnnnnnnnnnnnnnnnnnnnnnnnnnnnnnnnnnnnnnnnnnnnnnnnnnnnnnnnnnnnnnnnnnnnnnnnnnnnnnnnnnnnnnnnnnnnnnnnnnnnnnnnnnnnnnnnnnnnnnnnnnnnnnnnnnnnnnnnnnnnnnnnnnnnnnnnnnnnnnnnnnnnnnnnnnnnnnnnnnnnnnnnnnnnnnnnnnnnnnnnnnnnnnnnnnnnnnnnnnnnnnnnnnnnnnnnnnnnnnnnnnnnnnnnnnnnnnnnnnnnnnnnnnnnnnnnnnnnnnnnnnnnnnnnnnnnnnnnnnnnnnnnnnnnnnnnnnnnnnnnnnnnnnnnnnnnnnnnnnnnnnnnnnnnnnnnnnnnnnnnnnnnnnnnnnnnnnnnnnnnnnnnnnnnnnnnnnnnnnnnnnnnnnnnnnnnnnnnnnnnnnnnnnnnnnnnnnnnnnnnnnnnnnnnnnnnnnnnnnnnnnnnnnnnnnnnnnnnnnnnnnnnnnnnnnnnnnnnnnnnnnnnnnnnnnnnnnnnnnnnnnnnnnnnnnnnnnnnnnnnnnnnnnnnnnnnnnnnnnnnnnnnnnnnnnnnnnnnnnnnnnnnnnnnnnnnnnnnnnnnnnnnnnnnnnnnnnnnnnnnnnnnnnnnnnnnnnnnnnnnnnnnnnnnnnnnnnnnnnnnnnnnnnnnnnnnnnnnnnnnnnnnnnnnnnnnnnnnnnnnnnnnnnnnnnnnnnnnnnnnnnnnnnnnnnnnnnnnnnnnnnnnnnnnnnnnnnnnnnnnnnnnnnnnnnnnnnnnnnnnnnnnnnnnnnnnnnnnnnnnnnnnnnnnnnnnnnnnnnnnnnnnnnnnnnnnnnnnnnnnnnnnnnnnnnnnnnnnnnnnnnnnnnnnnnnnnnnnnnnnnnnnnnnnnnnnnnnnnnnnaagaaggtgatttgtatttgtctccccgctgaaaggaacaggattcaagtccagagttttcatcttcagcctgtgatctgtccagggacccttgggatctggggctccctggcctggccagagctggagcccccacagggtaaggaagagagggtgggaggcagannnnnnnnnnnnnnnnnnnnnnnnnnnnnnnnnnnnnnnnnnnnnnnnnnnnnnnnnnnnnnnnnnnnnnnnnnnnnnnnnnnnnnnnnnnnnnnnnnnnnnnnnnnnnnnnnnnnnnnnnnnnnnnnnnnnnnnnnnnnnnnnnnnnnnnnnnnnnnnnnnnnnnnnnnnnnnnnnnnnnnnnnnnnnnnnnnnnnnnnnnnnnnnnnnnnnnnnnnnnnnnnnnnnnnnnnnnnnnnnnnnnnnnnnnnnnnnnacactttaatattaaatattcataaggtctagtatcttgataataatgtagatgttttaataacaatttttgtccttcttaaaataaaatgaaagaaacttgcttcttttagcctttgttctagaaaataaacttgtgcactttga

SEQ ID NO: 28762 - DNA, 947 bp, Macaca Mulatta
acagtagattattggggaagtatgccaagttttaaatttaaatgtgaaaaacatcataattacaattctcataaaaaattgccacactccaaaaatccctggaagaaaaattattctagtcttgagtcaagatgatattttttccccaaggaaaaatgccaatgcaaataaatgaaattatattttatttgagattatacaatcttgcattagcttgtgtgtttaactcttggtgatgaaccagtccaaggtagtgagtgtgactcattattcccgtagagatgacatcctaactcacatggtaatccaagatggcattccattactagaataagggattcttttcatccagtgtacttggatacctacatttgtttcacataagccatacagatgaagagacttttgttaaaattaaacttggtcctgatgtcttttcttgttttattaggtgtatggctgctgctttaaaagatgcaggtgtacagcctgaagagatatcctatataaatgcacatgctacttccacaccattgggagatgctgctgaaaacaaggcaatcaaacatctcttcaaagaccatgcatatgcccttgcagtttcctcaactaagggagcaacaggacatctgctgggagctgcaggggcggccgaggcagcttttaccacattagcttgttattatcaaaaactaccacctactttaaacctggattgtacagaaccagaatttgatctcaactatgttccactaaaggcacaggaatggaaaactgagaaaagatttattggcctcaccaattcctttggttttggtggtactaatgcaacactttgtattgctggaatgtagaacaaatcatttgtaattaaatatgaatttttaaatgttatatgtgaagaaattatatatttatacattgatacccagatatcctttatgtta

SEQ ID NO: 28763 - DNA, 716 bp, Macaca Mulatta
gaagatctcagggaaactgctgctgtgtaccgactgaatccaggcagagtctgggatcctcggggctccatctctttccatttggaagccggagtcataactgctgcagtttgggcccaggctgtgtgttcttctggtgccctagggactgctgtggccagagcctggggccagccagtacagtcctgagctgaggaggagggactgcaagtgagagacagccagtctggaaggaagagctttccaggtggacagggattcttggaagatccccaaagtcccaggtatcctgggtgaagcctgtttgcctctcttgaaaatggcaggtgctcttgtgtgtgcccatgttgggtcaggctgaaactgccaaccagtgggaaacatggactctcttgagtgagaagagactgaaataggagcaagcagaaacctgaggggtgtcccatcttattgctgttgaggacccttaaacactgctgtttaaagacttcacagggaaggttctgaactgagccactggggaaggaactttcagtaacatgacactaaaatggcaagagatgttaaaaaaagcttttcccttctagagctgttttgcgcgcatgcatgtctgtgtgcattggggctttttagacaggcctgccctgtggctttgtcgtggaggtagagagaaggaaattgtgccctgagcacggtaggaccttgctgggtggggt

SEQ ID NO: 28764 - DNA, 887 bp, Macaca Mulatta
acattggtgcacttgaactgagctgcaaaccacaacattcttcagattgtggatgtgtgtcatgacgtagaaaaggatgaaaaacttattcgtttaatggaagagatcatgagtgagaaggagaataaaaccattgtttttgtggaaaccaaaagaagatgtgatgagcttaccagaaaaatgaggagagatgggtggcctgccatgggtatccatggtgacaagagtcaacaagagcgtgactgggttctaaatgaattcaaacatggaaaagctcctattctgattgctacagatgtggcctccagagggctagatgtggaagatgtgaaatttgtcatcaattatgactaccctaactcctcagaggattatattcatcgaattggaagaactgctcgcagtaccgaaacaggcacagcatacactttctttacacctaataacataaagcaagtgagcgaccttatctctgtgcttcgtgaagctaatcaagcaattaatcccaagttgcttcagttggtcgaagacagaggttcaggtcgttccaggggtagaggaggcatgaaggatgaccgtcgggacagatactctgcgggcaaaaggggtggatttaatacctttagagacagggaaaattatgacagaagttactctagcctgctaaagagagattttgggggcaaaactccgaattggtgtttacagtggctgcaattacactaatggggagctttgggaagtaattttgtgtcctgccgggtatacagacccagttttttaggactggtttattccaacaggggactttacccagaattgggttatggattgccacttcaggcaaatacggggaaagttataggtttccaaaattttgccacacc

SEQ ID NO: 28765 - DNA, 644 bp, Macaca Mulatta
tggccaccgctggaccgagtgacctcccctctccccggagggtaataaacaccagattccatgcgtgagtttcctgtgtttatttgcctctggggaggacgctggcacaccgtatcaggctgcgcggtgcagggcgcggtgctgtgcgtaggtgtccggccgggagctggtgaagccgcagtcctcgcacacgtgcagcttctcgcgacgctcgcggtaagcgtagctggccggctgcccgtgcaccttagcaaggtgagcttccagggagcagcgctgcgtaaacgctttcccgcaagcactacagcggaagggccggatccctgcacagatgggcgcagaggggagggctggacagagagggcaatgggctctggactaaagcgcccctaccctgctttccagccttgagcatttgcgttccctattccgagctcttcagactcttccacccatgacgcaccatctgctaccctcaccccgtgcagacatgggccagacacctttgtccccaccctccctcaccaggatgctctgtcccctgggggatggagagggaggccttcccttgcccttcgatctggagcctgaatcgtataaccggcatccggctgcactggacataccttgacaggcccctattt

SEQ ID NO: 28766 - DNA, 789 bp, Macaca Mulatta
ggatttcagagaagaaccttctaacttgtttacacaaaaacaagtatgatttagcattcatactagttgaaatttttaatataatcaaggcacaaaagtcttaaaaccatgtggaaaaattaggtaattattgcagattgatgcctctcaatcccatgtattgcgcttatgttacaagttgttatcacagttgagacttaatttctcctaatttcttctgcctgaagggtaagtggtgcgtccagcttacacaatcatgattcaaaggttggtgggcaatgtaatactttaaaagtatgatggaagagctatctggaaattatgagtaggctgaattttcggtacaaaactttagtataattgtagtttgcaaagtttatttcagttcacatgtaaggtattggaaataaattcttggacaattttgcatggaaacttgatattaaaaactagtcagtgggtctttgcaggttcttgaaaatttataaaccaggcacaaggttcaatttaaattttaagcacttttataacaatgagaagggcctttttgggagatgtaactttgccgcggtttggtaaatctggacatctcgtgccaggccaagttgaggagagagaaattcggctggtgggcaggtggtttcccagctccggtggtggccgattgacggcagacttaaggttgggcaaagaggggggaaagccgggagcgcggccagataggctgccgccacattgtaagcgtggcacggggggcgacaaaccccagttcgccggatcggcgcccat

SEQ ID NO: 28767 - DNA, 906 bp, Macaca Mulatta
  misc_feature (1)...(906): n = A,T,C or G
cttacaatatttggggtgcacatttaaatgttgaagcgcacatgtttaatttcttggctaaactattgtgtgggccccccaaggaatttgtggcttttcccgagtagtaaactttcggtaccaaaataaaatttttccctggggcttttccaagaaatttacaataaaacccgggggggaaattcgttttgaggagtatccctatgtggagggggaaataggaatccaaaggcccttccccatatcacaacaaggatttcccttttctcaaagggggcggcnnnnnnnnnnnnnnnnnnnnnnnnnnnnnnnnacccaaggggggttaaagttttatgtgggaccaaggggcccatggtcattccccaaaattaggcacagggtaaaagggccaccctgggcctggacccatcaaaatgcttttcccacattggtatttcatcacccagttaccttccacttggctttcataggatcttgtccatgccaaacctatgagaaagcttgcgggccagcagcaggccagtacaatatgctgcagcatagtttgtcaggccaaccttcacaccgtattttggcagttcgtgtgcatatgctgcgcagactatcatatccccctctatacgggcataagcaatctgacaaatgatatctctgtttgttacacgaactatcatcctgtatttgggtgtgttgtatttatttttatcctgtatcaccaagcgtttccgagcatagtaatcagttttaccctctcgtcgtcttctaaatttcacttggtatctcttaaagtaggccttattcttaacaactttaacaaaccccatcctgcggaacagagaccagcgtccgcgggtcgacagagacctgcaggcccagcggcgctagagggggggaaaagggccc

SEQ ID NO: 28768 - DNA, 121 bp, Macaca Mulatta
ggaaccagttacattcaagaatgcctctgtggccttcacggaggagaagtgaggccgcctggactctgctcccaggaagctgtgcagagctgtaatgatgggaactacaggaacttggtct

SEQ ID NO: 28769 - DNA, 264 bp, Macaca Mulatta
tacatgcctgatcttcttagaatagaatttggtagctttggcttcaaaataagttaaagcaaggtctcactttgatgtctctcatttcagccctgcctcagaatgacatcagaggcaaggagtcatggaaggccatggtatgctcagaatgatgaaaagttattttgtgactagaaagtaggtgaaaagaagtgggtatggtaggagtcctgaactagatgaaggctagtttgtactcatttctcaagtttaataagggttttg

SEQ ID NO: 28770 - DNA, 695 bp, Macaca Mulatta
atgacattcgcagggccactgtcttctccacggtctcccttcgtgcgtgacctggcacctgtagctcttgtggacttccactggtcagacgtcaggctcaggtagctgctggccgcgtacttgttgttgctctgtttggagggtttggtggtctccactcccgcgttgacagcgctgccatctgcccttccaggccacttccacggctcccgggtagaagtcactgatcagacacactagtgtggccttgttggcttgaagctcctcagaggagggcgggaagagagtgaccgagggggcagccttgggctgacgtaggacggtcagccgggtccctcctccgaaaaagcaaccgtactggccatacatcgtgtggcactctccacagtaatactcagcctcgtcgtcagactggaggttggagatggtgaggtagcggtcagtcccagaactggagcccaagaagcgatcggggatcccatcccccttggtctgggtgccatcactgttaaccttcattatatattggggagacctccccggtctctgttgataccagaaaataaagttgttgctgtaatcactgatcagggtgcaggtgagcttgacagaggctcccaacgaggcagatgcagacgggggctgagtcagcacaggcagagcacagagacctatggagaaaatgaagggcagga

SEQ ID NO: 28771 - DNA, 494 bp, Macaca Mulatta
cctgggccattgatactaaagccactttctggtacctttatcggaaattcatctctcctgccatctactcgtacattctacactgggccaaagtggctggcaatggctaattaggtcagacagtaaagtaatgagctactacagtgacaactggcacttgactgaaaagaccaattgaatccattaaagttattcttgtgatgcggtgcagagaagccacttttgactgtgttttagatgtgtgaattatcttccccaaaggactaaagtctttcaaaggggtctcagtcacctcttcctcctcctgaaactttgttttcctcccccacagttcagggctgtgtcttgcacacagatgaaccagggaagatcactcatgacttcagggggcaaagaaagcagtcagatctccttgccagactccttcccaggctgggcacatggtcttctgctctttaacatgcccggagtcattgattctagactgttcttct

SEQ ID NO: 28772 - DNA, 507 bp, Macaca Mulatta
ccagctctctctgctcccctgtgatttataagggccaccactctcagccccaggcaacgtagagcctcctgttctttctatgcttggtctgactgagcctaaagttgagaaaatgggtagccaaggccagtgccagtgtcttggggcccctttgcctctccctcactctctgaggctccggctggtcctgggacatgcagccaggcctgtgagtctgggcaggtccaaggcctgcaccttcaagaagtagaataaatgtggccttcatttctgtttctggtggctctccctgggctgtgtctgtgaggcagggaaggctctcagctgagtgtgcttggcaaccaagtcgggtctgggcggggatctatgagaagtgctaaaaatgggggtgggaatcggtcatgtcctgatttctgcctttcccctaaatgggccctaatttcaaggaagaaagcaaggggtgccttcccgttccttgcgttctcttgccccaacagcatttggaaa

SEQ ID NO: 28773 - DNA, 790 bp, Macaca Mulatta
  misc_feature (1)...(790): n = A,T,C or G
tgatgttctaatcatgtcagataaagatgatattgagactccactgctaactgaagcagcccccatccttgaagatggaaactgtgagccagccaagaattctgagtttgttgaccaaggtgccaagccagagagtaaatcagaacctgtagtttccactcggaaaagaccagagaccaaacctnnnnnnnnnnnnnnnnnnnnnnnnnnnnnnnnnnnnnnnnnnnnnnnnnnnnnnnnnnnnnnnnnnnnnnnnnnnnnnnnnnnnnnnnnnnnnnnnnnnnnnnnnnnnnnnnnnnnnnnnnnnnnnnnnnnnnnnnnnnnnnnnnnnnnnnnnnnnnnnnnnnnnnnnnnnnnnnnnnnnnnnnnnnnnnnnnnnnnnnnnnnnnnnnnnnnnnnnnnnnnnnnnnnnnnnnnnnnnnnnnnnnnnnnnnnnnnnnnnnnnnnnnnnnnnnnnnnnnnnnnnnnnnnnnnnnnnnnnnnnnnnnnnnnnnnnnnnnnnnnnnnnnnnnnnnnnnnnnnnnnnnnnnnnnnnnnnnnnnnnnnnnnnnnnnnnnnnnnnnnnnnnnnnnnnnnnnnnnnnnnnnnnnnnnnnnnnnnnnnnnnnnnnnnnnnnnnnnnnnnnnnnnnnnnnnnnnnnaggttttacgagaggcgaaggagaaagaagagatatggaactccaatgaggttactatggaaacagaaaagaaaactcattatgggttactctttgatgaatttcaaggcctttcacatctagaagctctggagatgctttcccgagaaa

SEQ ID NO: 28774 - DNA, 462 bp, Macaca Mulatta
  misc_feature (1)...(462): n = A,T,C or G
tcccggcagctgcgggtcagccaccggctgtgtcagcaaaatcctggccaggtngcaggtactacgagaccggcagcatcaagccaggtgtgatcggtggctccaagcccaaagtggcgacgcccaaagtggtggacaagattgctgaatacaaacgacagaacccgactatgttcgcctgggagatccgagaccggnnnnnnnnnnnnnnnnnnnnnnnnnnnnnnnnnnnnnnnnnnnnnnnnnnnnnnnnnnnnnnnnnnnnnnnnnnnnnnnnnnnnnnnnnnnnnnnnnnnnnnnnnnnnnnnnnnnnnnnnnnnnnnnnnnnnnnnnnnnnnnnngttcccagcacggcctcccctcctgtttccagcgcctccaatgacccagtgggatcctactccatcaatgggatcctggggattcctcgctccaatggtgagaagaggaaacgtgatgaag

SEQ ID NO: 28775 - DNA, 1064 bp, Macaca Mulatta
  misc_feature (1)...(1064): n = A,T,C or G
ggccaggatgtctacaaaattggtggtattggtactgttcctgttggccgagtggagactggtgttctcaaacccggtatggtggtcacctttgctccagtcaacgttacaactgaagtaaaatctgtcgaaatgcaccatgaagctttgagtgaagctcttcctggggacaatgtgggcttcaatgtcaagaatgtgtctgtcaaggatgttcgtcgtggcaacgttgctggtgacagcaaaaacgacccaccaatggaagcagctggcttcactgctcaggtgattatcctgaaccatccaggccaaataagtgctggctatgcccctgtgttggattgccacacagctcacattgcatgcaagtttgctgagctgaaggaaaagattgatcgccgttctggtaaaaaactggaagatggccctaaattcttgaagtctggtgatgctgccattgttgatatggttcctggcaagcctatgtgtgttgagagcttctcagactatccacctttgggtcgctttgctgttcgtgatatgaggcagacagttgcggtgggtgtcatcaaagcagtggacaagaaggctgctggagctggcaaggtcaccaagtctgcccagaaagctcagaaggctaaatgaatattatccctaatacctgccaccccactcttaatcagtggtggaagaacggtctcagaactgtttgtttcaattggccatttaagtttagtagtaaaagactggttaatgataacaatgcatcgtaaaaccttcagaaggaaaggagaatgttttgtggaccactttggttttcttttttgcgtgtggcagttttaagttattagtttttaaaatcagtactttttaatggaaacaacttgacaaaaatttgtccccagaatttttgagacccaattaaaaaagttttaatgagttctcgaaatgttcgggatctcggggccccccaataaaagatttttccggcccgcccttccggccnnnnnnnnnnnnnnnnnnnnnttaaacaattttccattttgggcgcccccgaggaccaaaac

SEQ ID NO: 28776 - DNA, 1107 bp, Macaca Mulatta
ttggcactttgaaacttaaagaaaaattgtactcttcaggtggctatggcggttccagcagcagcagtagctatggcagtggcagaagatttaattaggtaagtaagcacctttttgtgtgtggacataatttttaaattgctgatgaacccaataaccctaatgtagctgagcagtgcaacatagttaacattataattgcagtaatcgtggatataaagttaatattcagatcagcaaaatttgtgggaagcaaacttgatattggattgtagccttgagtcttaatatgtttagattaacaactttattccatattgttcaacaggaaacaaagcttagcaggagaggagagccagagaagtgacagggaagctacaggttacaacagatttgtgaactcagccaagcacagtggtggcagggcctagctgctacaaagaagacatgttttagacaaatactcatgtgtatgggcaaaaaactcgaggactgtatttgtgactaattgtataacaggttattttagtttctgttctgtggaaagtgtaaagcattccaacaaagggttttaatgttagattacctaaatctattgcacccatgctgttgattgctaaatgtaatagtctgatcgtgacgctgaataaatgtcttttttttaatgtgctgtgtaaagttagtctactctgaagccatcttggtaaacttccccaacagtgtgaagttagaattccttcagggtgatgccaggttctatttggaatttatttacaacctgcttgggtggagaagccattgtcttcggaaaccttggtggagttgaactgatagttactgttgtgacctgaagttcaccgttaaaagggattaccccaagcaaaatcatgggaattattgggttattaaaagtggattgtttgggcaccttcctaatgccaatattatcctaaatttggaataaatgggtaccccgaaataaaaaatttttaccattgggggacatgaaagccctgtgggggtatccaatccccactttaatccagggggggtaaaatcccaaattaaagccgacagtttctaaaatttccctctcttttggaaaaa

SEQ ID NO: 28777 - DNA, 332 bp, Macaca Mulatta
agaacacccatcagtctgggcgcttggaggagactactgggaaagggtccgggggtgccctgctgacccccaagactgagcatgaggagctggctgtttctcagggaggggcagcccctgctactgaggagtcatcttcatcttcagaagaggaggaagtacccagctcccctgagcccccccgtccagccaaacggcctcggcgggaactagggagcaaaggcctcaagggtgggggtggggggcctggaggctggacctgtggcctgtgtcactttttgtgggcctaaacgtgacgagtatgtggcccacatgaagaaggagcatggcaa

SEQ ID NO: 28778 - DNA, 3766 bp, Macaca Mulatta
  misc_feature (1)...(3766): n = A,T,C or G
gtgataagacagaggcaaccacaaagcttcatgacatggtagaccaactggnnnnnnnnnngtgtgtcagagcttttggaaaaacatggactcgagaaaccaatttcatttgttaaaaacactcagtctagctcggaagaggcacgcaagctgatggttagattgactaggcacaccggccggaagnnnnnnnnnnnnnnnnnnnnnnnnnnnnnnnnnnnnnnnnnnnnnnnnnnnnnnnnnnnnnnnnnnnnnnnnnnnnnnnnnnnnnnnnnnnnnnnnnnnnnnnnnnnnnnnnnnnnnnnnnnnnnnnnnnnnnnnnnnnnnnnnnnnnnnnnnnnnnnnnnnnnnnnnnnnnnnnnnnnnnnnnnnnnnnnnnnnnnnnnnnnnnnnnnnnnnnnnnnnnnnnnnnnnnnnnnnnnnnnnnnnnnnnnnnnnnnnnnnnnnnnnnnnnnnnnnnnnnnnnnnnnnnnnnnnnnnnnnnnnnnnnnnnnnnnnnnnnnnnnnnnnnnnnnnnnnnnnnnnnnnnnnnnnnnnnnnnnnnnnnnnnnnnnnnnnnnnnnnnnnnnnnnnnnnnnnnnnnnnnnnnnnnnnnnnnnnnnnnnnnnnnnnnnnnnnnnnnnnnnnnnnnnnnnnnnnnnnnnnnnnnnnnnnnnnnnnnnnnnnnnnnnnnnnnnnnnnnnnnnnnnnnnnnnnnnnnnnnnnnnnnnnnnnnnnnnnnnnnnnnnnnnnnnnnnnnnnnnnnnnnnnnnnnnnnnnnnnnnnnnnnnnnnnnnnnnnnnnnnnnnnnnnnnnnnnnnnnnnnnnnnnnnnnnnnnnnnnnnnnnnnnnnnnnnnnnnnnnnnnnnnnnnnnnnnnnnnnnnnntaaaagctgggatgtttgtagccagttaggacaatcagaaggttaccaggacttgggcactcgtcaagagctcatggcttttgctttgacacattgccctcctagcagcattgaacttcttttggcagctagcagctctctgcagacagannnnnnnnnnnnnnnnnnnnnnnnnnnnnnnnnnnnnnnnnnnnnnnnnnnnnnnnnnnnnnnnnnnnnnnnnnnnnnnnnnnnnnnnnnnnnnnnnnnnnnnnnnnnnnnnnnnnnnnnnnnnnnnnnnnnnnnnnnnnnnnnnnnnnnnnnnnnnnnnnnnnnnnnnnnnnnnnnnnnnnnnnnnnnnnnnnnnnnnnnnnnnnnnnnnnnnnnnnnnnnnnnnnnnnnnnnnnnnnnnnnnnnnnnnnnnnnnnnnnnnnnnnnnnnnnnnnnnnnnnnnnnnnnnnnnnnnnnnnnnnnnnnnnnnnnnnnnnnnnnnnnnnnnnnnnnnnnnnnnnnnnnnnnnnnnnnnnnnnnnnnnnnnnnnnnnnnnnnnnnnnnnnnnnnnnnnnnnnnnnnnnnnnnnnnnnnnnnnnnnnnnnnnnnnnnnnnnnnnnnnnnnnnnnnnnnnnnnnnnnnnnnnnnnnnnnnnnnnnnnnnnnnnnnnnnnnnnnnnnnnnnnnnnnnnnnnnnnnnnnnnnnnnnnnnnnnnnnnnnnnnnnnnnnnnnnnnnnnnnnnnnnnnnnnnnnnnnnnnnnnnnnnnnnnnnnnnnnnnnnnnnnnnnnnnnnnnnnnnnnnnnnnnnnnnnnnnnnnnnnnnnnnnnnnnnnnnnnnnnnnnnnnnnnnnnnnnnnnnnnnnnnnnnnnnnnnnnnnnnnnnnnnngctgatcccaaagaactaatcaagatggtcaccaggcatgtgactcgacatgggcatgaagcctggcctgaagaccttgtttcactgaccaagcagttacactactacaatgaacgcctcctggatttcactcaggcgcagatccttcagggccttcggaagggtgtggacgtgcagcggtttactgcagatgaccagtataaaagggagactatccttggtctggcagannnnnnnnnnnnnnnnnnnnnnnnnnnnnnnnnnnnnnnnnnnnnnnnnnnnnnnnnnnnnnnnnnnnnnnnnnnnnnnnnnnnnnnnnnnnnnnnnnnnnnnnnnnnnngtttgtccacactagaaattgaaaatagagcccaagaccttcatctctttgagactttgaagactggtccggaagcctttcaccagcacatggtcaagtatatttaccccactnnnnnnnnnnnnnnnnnnnnnnnnnnnnnnnnnnnnnnnnnnnnnnnnnnnnnnnnnnnnnnnnnnnnnnnnnnnnnnnnnnnnnnnnnnnnnnnnnnnnnnnnnnnnnnnnnnnnnnnnnnnnnnnnnnnnnnnnnnnnnnnnnnnnnnnnnnnnnnnnnnnnnnnnnnnnnnnnnnnnnnnnnnnnnnnnnnnnnnnnnnnnnnnnnnnnnnnnnnnnnnnnnnnnnnnnnnnnnnnnnnnnnnnnnnnnnnnnnnnnnnnnnnnnnnnnnnnnnnnnnnnnnnnnnnnnnnnnnnnnnnnnnnnnnnnnnnnnnnnnnnnnnnnnnnnnnnnnnnnnnnnnnnnnnnnnnnnnnnnnnnnnnnnnnnnnnnnnnnnnnnnnnnnnnnnnnnnnnnnnnnnnnnnnnnnnnnnnnnnnnnnnnnnnnnnnnnnnnnnnnnnnnnnnnnnnnnnnnnnnnnnnnnnnnnnnnnnnnnnnnnnnnnnnnnnnnnnnnnnnnnnnnnnnnnnnnnnnnnnnnnnnnnnnnnnnnnnnnnnnnnnnnnnnnnnnnnnnnnnnnnnnnnnnnnnnnnnnnnnnnnnnnnnnnnnnnnnnnnnnnnnnnnnnnnnnnnnnnnnnnnnnnnnnnnnnnnnnnnnnnnnnnnnnnnnnnnnnnnnnnnnnnnnnnnnnnnnnnnnnnnnnnnnnnnnnnnnnnnnnnnnnnnnnnnnnnnnnnnnnnnnnnnnnnnnnnnnnnnnnnnnnnnnnnnnnnnnnnnnnnnnnnnnnnnnnnnnnnnnnnnnnnnnnnnnnnnnnnnnnnnnnnnnnnnnnnnnnnnnnnnnnnnnnnnnnnnnnnnnnnnnnnnnnnnnnnnnnnnnnnnnnnnnnnnnnnnnnnnnnnnnnnnnnnnnnngtggtggcagtgctgaccttggtgggccaagggacccactgaaggtcctggaaggtgttgttgcagccgtccacgccagtgtggacaagggngtgaggagctggtttcccctgaggacctgctggagtggctgcggcctttctgtgctgatgacgcctggccggtgcggccccgcattcacgtgctacagattttggggcaatcatttcacctgactgaggaggacagcaagctcctcgtcttctttagnnnnnnnnnnnnnnnnnnnnnnnnnnnnnnnnnnnnnaggtggacatagctgacattgagaatgaagagaaccgctaccgtgtattcatggaactcctggaatctagtcaccatgaggctgaatttcagcacttggttttacttttgcaagcttggccacctatgaaaagtgaatatgtnnnnnnnnnnnnnnnnnnnnnnnnnnnnnnnnnnnnnnnnnnnnnnnnnnnnnnnnnnnnnnnnnnnnnnnnnnnnnnnnnnnnnnnnnnnnnnnnnnnnnnnnnnnnnnnnnnnnnnnnnnnnnnnnnnnnnnnnnnnnngtgaaggagctttgtctgctgctgctcaaccagtccctcctgcttccatctctgaaacttctcctcgagagccgggatgagcatctgcgcgagatggcactggagcaaatcacggcagtcactacggt

SEQ ID NO: 28779 - DNA, 293 bp, Macaca Mulatta
agggaacttttccacgcctttcatatctaccaggtcaagtcctgtggttccctggggtgggtctgtgagaatccagtgccaggccattcctgacgcttacctgatctggctgatgatgctaaaaaactccacgtacgagaagagagacgaaaaactggggttttggaatgatactacgcctgagttcgtcattgaccacatggacgcgaacaaagcagggcgctatcagtgccgatataggatagggttctccaggttccggtacagtgacaccctggagctagtggtgacag

SEQ ID NO: 28780 - DNA, 391 bp, Macaca Mulatta
aggcaaaaagccttcttcacctgttcctcccacctcaccatagttggggtattttatggcatcctcattgtggtttatgtggccccaatagcacacatgtcccccttgcttctaaaggtcttctctgtcctctatacagtgttcacgcccatgtcaactccatcatccacaacctcaagaaccaagaggtgaaggcggctctgcataggctcagggaacagctcatcccaggacacactcactgagaaggacaggacagcttttgacttcttcctggattgatttcagcgtagccccttcttcaaagtctgatggactagagaccattgcaataaaaagatggagactgtgggattgcaagtggatgtctaacaaaatgaggtaactgtat

SEQ ID NO: 28781 - DNA, 116 bp, Macaca Mulatta
atgccaacgtgactaagtttaccaaactgcactgcttccccctgctggagacagcgctcttcttcctcatgtcctggagcacgtttcttttggcagaagcctgcggatttacaggt

SEQ ID NO: 28782 - DNA, 97 bp, Macaca Mulatta
gtggacttggttacttatataacaaggttccagtgggacatggccaaatatccaatcaagcagtccctgaaaaatatttctgaaataattgccaagg

SEQ ID NO: 28783 - DNA, 646 bp, Macaca Mulatta
gcagtggaagaactagaacaatttcaatccaggagaatttactctgggaaaaattccattaaagcctccacctctggaacttctaaatatttaaaagggcaattttaaatacaaaaaagaatgatgttagaaattgttttgagtgattcatatagaggtgcatatatgcatacatgtattcataaggaatataagcttccattaatagtgattttaaattttattttttcttaagtctaaatatttaagtaaaaagtaacaaaaactcagcaagcaagggaatttttttgtactgtaattttgaatggaaccgaaaaattttgcatgaataaagtacttttctcatgccacaccactttactatatcaccatttaaagttttaaactttttttttaggaatgaaataatttctggaactattagggggaatatgctcaaatatttagcctactgttagaataaacattaatagcatgacttcatgttcaagattctctcaaagagataaatcacagtttgtaaagagtgacaagcttttatttttagaaccataggggcatttccccaacattagtttgagactgcctctcaactttggcagtctcatggaccaccatttgagtattcttcaacaatcttatgctg

SEQ ID NO: 28784 - DNA, 1341 bp, Macaca Mulatta
  misc_feature (1)...(1341): n = A,T,C or G
ctctgggaattgaagtatgtgtggaaggaagcgtgagcggtaaccaggccaacctagaagggctttctttctgagatnnnnnnnnnnnnnnnnnnnnnnnnnnnnnnnnnnnnnnnnnnnnnnnnnnnnnnnnnnnnnnnnnnnnnnnnnnnnnnnnnnnnnnnnnnnnnnnnnnnnnnnnnnnnnnnnnnnnnnnnnnnnnnnnnnnnnnnnnnnnnnnnnnnnnnnnnnnnnnnnnnnnnnnnnnnnnnnnnnnnnnnnnnnnnnnnnnnnnnnnnnnnnnnnnnnnnnnnnnnnnnnnnnnnnnnnnnnnnnnnnnnnnnnnnnnnnnnnnnnnnnnnnnnnnnnnnnnnnnnnnnnnnnnnnnnnnnnnnnnnnnnnnnnnnnnnnnnnnnnnnnnnnnnnnnnnnnnnnnnnnnnnnnnnnnnnnnnnnnnnnnnnnnnnnnnnnnnnnnnnnnnnnnnnnnnnnnnnnnnnnnnnnnnnnnnnnnnnnnnnnnnnnnnnnnnnnnnnnnnnnnnnnnnnnnnnnnnnagttttacttgacaagccatggaggccagctgaaannnnnnnnnnnnnnnnnnnnnnnnnnnnnnnnnnnnnnnnnnnnnnnnnnnnnnnnnnnnnnnnnnnnnnnnnnnnnnnnnnnnnnnnnnnnnnnnnnnnnnnnnnnnnnnnnnnnnnnnnnnnnnnnnnnnnnnnnnnnnnnnnnnnnnnnnnnnnnnnnnnnnnnnnnnnnnnnnnnnnnnnnnnnnnnnnnnnnnnnnnnnnnnnnnnnnnnnnnnnnnnnnnnnnnnnnnnnnnnnnnnnnnnnnnnnnnnnnnnnnnnnnnnnnnnnnnnnnnnnnnnnnnnnnnnnnnnnnnnnnnnnnnnnnnnnnnnnnnnnnctggaaacaagagactggcaagaagcattttttactatcttgccccagcggaaaggagctgttcccacagacaaaacctgtgaaagtgcttcttatgaccctcagtctgtcaggatggaggagtgtggatcggacagtgattccagtgaggaggaagatagcagaaatgaactagattcaccacgtgaagaaaagcaggataaggaaaatcacactgaatctatagggaactctctgccacactaatgttacctggtttccttttagtttaaggaaaaattaggagaaagcgaggtgctgtatagaatattgaaattggaagaacattttattttctgttatttctgttgtgaattttaaaaacttttttttggacctaaataataataaaaaagccctttaaactttgtaagaaaatatttttgatttagaataagaagatttaaatgtgt

SEQ ID NO: 28785 - DNA, 608 bp, Macaca Mulatta
  misc_feature (1)...(608): n = A,T,C or G
ctcttccctgccactgatgactcgctctactataagggcacgccagggcccactgtcaggtggaagcggcccaaggnnnnntgcgaggacccccgcctctttgtggatggcatcagctcccacgacctgcaccagggccaggtgggcaactgctggtttgtggcagcctgctcgtcacttgcctcccgggagtcgctgtggcaaaaggnnnnnnnnnnnnnnnnnnnnnnnnnnnnnnnnnnnnnnnnnnnnnnnnnnnnnnnnnnnnnnnnnnnnnnnnnnnnnnnnnnnnnnnnnnnnnnnnnnnnnnnnnnnnnnnnnnnnnnnnnnnnnnnnnnnnnnnnnnnnnnnnnnnnnnnnnnnnnnnnnnnnnnnnnnnnnnnnnnnnnnnnnnnnnnnnnnnnnnnnnnnnnnnntggcaggctgctaccaggcgctggatggaggcaacacagcagacgcactggtggacttcacgggtggtgtttctgagcccattgacctgaccgagggtgactttgccagcgacgagactaagaggaaccagctctttgagcgcatgttaaaagtgcacagccggggcggcctcatcagtgcctccatcaagg

SEQ ID NO: 28786 - DNA, 246 bp, Macaca Mulatta
gctttgggaaggggatgcccctaagggtgccagtccagccagctgccccacccctcaggcccagcctggcccccgagctccgcactctggagccctgagcagccctgtgggcaagcagcccccggcatggccgagcacctggagctgctggcagagatgcccatggtgggcaggatgagcacgcaagagtggctgaagcacacccaggagcggcgcgctcagcaggtgaagatgtgggctcaggct

SEQ ID NO: 28787 - DNA, 158 bp, Macaca Mulatta
actgcgccggctcccctggcccttctgttattcatctgcagctctgtgatttcaaggcatccttcccacccgtttttagctcggccgccgaacttcactgcacagttgaggtaagaacgttgcattacaaccacgttttaacagacgaatcccttgga

SEQ ID NO: 28788 - DNA, 519 bp, Macaca Mulatta
  misc_feature (1)...(519): n = A,T,C or G
aatggcccatgagagagtaccacggaaactcaaatgcaccttcacgtctcccaannnnnnnnnnnnnnnnnnnnnnnnnnnnnnnnnnnnnnnnnnnnnnnnnnnnnnnnnnnnnnnnnnnnnnnnnnnnnnnnnnnnnnnnnnnnnnnnnnnnnnnnnnnnnnnnnnnnnnnnnnnnnnnnnnnnnnnnnnnnnnnnnnnnnnnnnnnnnnnnnnnnnnnnnnnnnnnnnnnnnnnnnnnnnnnnnnnnnnnnnnnnnnnnnnnnnnnnnnnnnnnnnnnnnnnnnnnnnnnnnnnnnnnnnnnnnnnnnnnnnnnnnnnnnnnnnnnnnnnnnnnnnnnnnnnnnnnnnnnagtcatctttgcccttgggatttccatgacctttatcaatatcccagtggaatggttttccatcgggttcgactggacctggatgctgctgttcggtgacatccgacagggcatcttctatgcgatgcttctgtccttctggatcatcttctgtggcgagcacatg

SEQ ID NO: 28789 - DNA, 406 bp, Macaca Mulatta
  misc_feature (1)...(406): n = A,T,C or G
ttgattattgagtctggagtagagggtttgaaatagccantagagaaaagtccattgangtcattttgttataatatgccagtttcatactgaatgaccactgnatatgactanttcagggaatatatattnttatatgaaagctatgaatgttactatcacggcttttccttatttttactnttatgtagcagcatttacagaaatgccaaaaatgtgcctcattaagaggcaggtcttagtttaatcagataaaaataaaatatatagcttaagatcaaaacagtcatatttttagatacagtgaaatcttttatgtttctctacagcaccttaaaaattagaacttgaatactttgagtacttagtacagtctcatcccaacaaactttaatggtagcatgtt

SEQ ID NO: 28790 - DNA, 812 bp, Macaca Mulatta
ggcaagacacagattggaaagaactgtacaggaagaggcacatacaaagaaaagaatcccccaaagggcggtttgtgatgctcctgccatcgtcaactcacggcattccattctatcccaaccccttgcaccctaggccatttcctagctcccgccttcctccaggaattatcgggggtgaatatgaccaaagaccaacacttccctatgttggagacccaatcaattcactcattcctggtcctggggagacgcccagccagttccctccactcagaccacgctttgatccaattggcccactcccaggacctaaccccatcttgccagggcgaggcggccccaatgacagatttcccttttaacccagtatgggtcggccaactgacggccgcctgtcattcatgtgattgatttgtaattttatttctggaactccattttgtattttgtttcaaaactacagatgtcaaactcccctggggtgctaatctccaagggtaattttccgaatggtaatggtgaaaaattggcactccccataaactctttttaataaaaattttttacaagccccttatggggtgggtggtgaacccaaaaagtttccatttgtaggcaagaggttggcccttggggaatagtaggggaggcattatactcccctagccattagggttcctcaactctaaaatagatagggatgtttttcaggatattatcgttattttacatgattcaggaacacaagtactacaactaagtcaaattaaagttcttttgtctttttctcgccattttacgccaaaaaa

SEQ ID NO: 28791 - DNA, 834 bp, Macaca Mulatta
gggttttggggttgtacattgccattccatttctcatcaaactatgtcctggaatacaggccaaactgattttcttgaatttcgtaagggttccctatttcattgatttgaaaaaaccacaggatcaaggtttgaatcacacatgtaactactacctgcagccagaggaagatgtgaccattggagtctggcataccgtccgcgcagtctggtggaagaacgcccaaggcaaagaccagatgtggtatgaggatgccttggcttccagccacgctatcattctgtacctgcatgggaacgcaggtaccagaggaggtgaccaccgcgtggagctttacaaggtgctgagttcccttggttaccatgtggtcacctttgactacagaggttggggtgactcggtgggaacgccatctgagcggggcatgacctatgacgcactccacgtttttgactggatcaaagcaagaagtggtgacaaccctgtgtacatctggggccactctctgggcactggtgtggcaacaaatctggtgcggcgtctctgtgagcgagagacgcctccagatgcccttatattggaatctccgttcactaatatccgtgaaagaagctaagagccaatccattttcagtgaatatatcgaatacattccctggggtttggactgggttccttcccttgatccctatttacaaagcagtgggaaattaaaattttgcataatgaacgaagtatggtgaagccacaatcttccttgtcccctcaaactcattccttggaaagccttggagggaacgaaacccggtggttgtgttcctagcttggcagaa

SEQ ID NO: 28792 - DNA, 1012 bp, Macaca Mulatta
  misc_feature (1)...(1012): n = A,T,C or G
gcttcctcggggcgcaaatcccgcgccccctccccgcgagcctcacgttttatggtannnnnnnnnnnnnnnnnnnnnnnnnnnnnnnnnnnnnnnnnnnnnnnnnnnnnnnnnnnnnnnncgggaggccccgcggctccgggctccgctgtcgcgggcgtcggatcggagccgccggnnnnnnnnnnnnnnnnnnnnnnngaacctccaggacttcagcccttccaggagaatctgatctcaggtgagggaggtcacttggggtgtggcccagcaggcaggcgggactccaggctgggaacagaagtcagccctgctggggctgggagctgaaggagctgttcctttctcacaggtgttagacgaggaaaagtgatcattgngccacaccaggagctgaagccatggcctcaaagcctgagaagagggtggcatcgtctgtctttatcaccctggcacccccgcgccgcgatgtggctgtggcggaggaagtgaggcaggcggtttgtgaggcccggcgtggccgcccctgggcgcctcctgccccagtgaagacacccgaggctggcttggcgaggaggcccagcccctggacaccccctggcaaggctgcaaccacagtgccagctgcacctctgcagctttccaatggagnnnnnnnnnnnnnnnnnnnnnnnnnnnnnnnnnnnnnnnnntggctgtggaggccatgaaaaggcagtaccatgcccagtgctttacatgccgcacctgccgccgccagctggctggacagagcttctaccagaaggatgggcgacccctctgcgaaccctgctaccaggnnnnnccaggacacgttggagaagtgcggcaagtgtggcgaagtggtccaggaccacatcatcagggccctgggccaggccttccacccctcctgcttcacgtgtgtgacctgcgcccggtgcattggggatgagagctttgccctgggcagccagaacgaggtgtactgcctggatgacttctacag

SEQ ID NO: 28793 - DNA, 178 bp, Macaca Mulatta
gccagttgctgcttccacctgttcagggaagaaaacaccccgtactggcaggcatggagccaacaaggagaacctggagctcaacggcagcatcctgagtggtgggtaccctggctcggcccccctccagcgcaacttcagcattaattctgttgccagcacctattctgagtttgcg

SEQ ID NO: 28794 - DNA, 460 bp, Macaca Mulatta
tttatttcggaggcagaagcattaaacagctgcttctgctgtgcgctaatgattgctgtaatttctgttctgcttatttgccattatttgaaaaacatgcaaaagggtctttctaaccacattcctatgttgtaacaacacccaaatgctgaggcagtgctgaggagtcagtgcctgggacttgcttaaaactgctgggactcgtggtccccaaacccttctctgagcagcaaaaggaataagacatgagattgtacttctcattctcaaagtactaaccatggttaagttagataaggttaggttatcctgtgacccttttgttgacttacagacaagaactgttgttgagctgaatgtatttgcatttgctccagataaactcagttctctgatttcccagcaaagaattgtcaagccaacaggcaagacgtctcactgggcacagccaggagtttct

SEQ ID NO: 28795 - DNA, 860 bp, Macaca Mulatta
  misc_feature (1)...(860): n = A,T,C or G
ggagaatagaaactacttcattttaattgtatattattcaagcacctttgttgaagctcaaaaaaaaatgcctctttaaactttagcaattataggagtatttatgtaactatctatgcttcaaaaaacaaaagtatttgtgtgcatgtgtatataatatatatacacatatatatttatacacatacaatttatgttttcctgttgaatgtatttttgagattttaaccngaacaaagacagataaacaggcattccatatcaatggctttgatcaccttaccaatttggttttgaaataaacacaaaaatcctccattcccaccccgggcaannnnnnnnnnnnnnnnnnnnnnnnnnnnnggttggtggaaaattaaattgatggttggattgaatgggttggtttttttggggtgggggggcgaaaacagcgcccaacacggcgccgcctttgtgtgggatgaaaccccacagattcttcctcacagagcccactttttgttggggccacaacaccccccctgggggactttataacacccgcggnnnnnnnnnnnnnnnnnnnnnnnnntgtaaatttttacccccctctttatttgtgaattttagaaaaaagaaattcccctctttcacccccactccaatattttggtgggagaaattttgtgcgcctcttttttctcagagatatcgttgggttttttttgtccacacatattttttggggcttccccacccgcgggagccacacaaaaataaacccacccctggaannnnnnnnnnnnnnnnnnncttaagaacctgggggccgtttccacctagaaaacccacgcccccccccggggaaattatttttt

SEQ ID NO: 28796 - DNA, 588 bp, Macaca Mulatta
  misc_feature (1)...(588): n = A,T,C or G
gggaggcggccgtgaccgacagctactccatggacgccttcttcatctnnnnnnnnnnnnnnnnnnnnnnnnnnnnnnnnnnnnnnnnnnnnnnnnnnnnnnnnnnnnnnnnnnnnnnnnnnnnnnnnnnnnnnnnnnnnnnnnnnnnnnaggcgggtggcgggcaccggcatgcgtgcgccgagtgtggcaagacctacgccacgtcgtcgaacctgagccgccacaagcagacgcaccgcagcctggacagccagctggcgcgcaagtgcccgacgtgcggcaaggcctacgtgtccatgccctttttcagaaagcacgtgctcacgcacaacctgcgccacaagtgcggcgtgtgtggcaaggccttctcgcggccctggctgctgcagggccacatgcgctcgcacactggcgagaagccgttcggctgcgcgcactgcggcaaggccttcgccgaccgctccaacctgcgcgcgcacatgcagacgcactcggccttcaagcactaccgctgccgccagtgcgactagagcttcgcgctcaagtcctacctccacaagcactgcgaggcagcctgcgtcaagg

SEQ ID NO: 28797 - DNA, 702 bp, Macaca Mulatta
ggttcataaattagagacatctgcaataaaaatgatgctttggtatatcaactctgaattcttgtttctttttaaagattatcaaaattgtcttagtataaaatattgagaactatatttatgaaacatgagggaagagaaatatgcaaaggttaaatgaattaaaacatgtagctgaaactagagtgtgtgcagttattgtagcatagtatttttcagtaaggtataataaaatagacagatatggaattagaacttgattattacaaggtgccacatttgtttcagaaggatagtgaacaaagcaatccgaaaagtggataatgaaaagtagataaacgggattgcaggagggtttgaacaaagcaatagaagtttcttacattaacaatattgatcatagaaaaggaaaaaatactaaagattctattggcaagtcagcaagtatagaatatccagtggtttcagggaaaacataaccatacgaaacaataattataataactatttgattttcctccaaagtactgcattccacagaaagcaaaatactttccttccaaccatcaacacatgataggtgccttctcctccctttcctcattatcgtatggctgtggaaaatggggctccagcagggtaacataggctgcagggatattctgtttgtcttattcatattggctacatgtgtacaaagta

SEQ ID NO: 28798 - DNA, 538 bp, Macaca Mulatta
gacttatagccagtaatgtcaccgaaaccatgggcattaatggcagtgcctaccagggtatgaccactacagtgtgttttatgtcttctacgaacagtacctgaccatcattgacgacactatcttcaacctcggtgtgtccctgggcgcgatatttctggtgaccatggtcctcctgggctgtgagctgtggtctgcagtcatcatgtgcaccaccatcgccatggtcttggtcaacatgtttggagttatgtggctctggggcatcagtctgaacgccgtgtccttggtcaacctggtgatgagctgtggcatctccgtggagttctgcagccacataaacagagcgttcacggtgagcacgaaaggcagccgcgtggagcgtgcagaagaggcactcgcccacatgggcagctccgtattcagtggaatcacgcttacaaaaatttggagggattgtggtgttggcttttgcccaatctcacattttccagatattctacttcaggatgtatctggctatggtcttactgggcgc

SEQ ID NO: 28799 - DNA, 103 bp, Macaca Mulatta
aggggcggctgctgcctggtgacagcaccaggaggcccaccaggacgtgccaccagtgaatgtgcctctggtggctgctgagaaaaatacactgtgcagttca

SEQ ID NO: 28800 - DNA, 267 bp, Macaca Mulatta
ggtatgtgccaggcagagactaccctttgtgaccagctcccattaaaaaccgcaggcactcagtctctaacaagcttttctggttgacggtgttgcacaagtgctgttacaactggttgctgggagaattaagctcatctgtgattccactggcagaggattcttggaagcttgcacttagtttcccctgacttcaccccatgtgttcttttttcctttgctgattttgctttgtatcctttaactgtaataaatcatggccgtgag

SEQ ID NO: 28801 - DNA, 767 bp, Macaca Mulatta
gggggggtgatgaaaattcctcaggaagaaaaggttatccagaaaatcagtgctgtggataaagatgagccatccaatggacatcagttttacttcagcttaacaacggatgcaacaaataaccacaacttttcattgaaagataacaaagacaatacagcctcaatattgaccaggagaaacggcttccggagacaagaacaatcggtttactatctgccaattttcattgtggacagtggatctccttcacttagcagcaccaacaccctcaccatccgcgtgtgtgactgtgatgccgacggtgtagcccagacctgcaatgcagaggcctatgtcttaccagctggcctcagtacaggagccctgatagcaatactcgcctgtgtcttgacattattggtgttgatcctccttatcgtcaccatgagaagacggaaaaaagagccccttatttttgacgaagaaagagacatcagagaaaatattgtgagatacgatgacgagggcgggggagaagaggacacggaagcctttgacatggctgcactgagaaacctcaacgtcatccgagacaccaagacccggagggatgtgactccagaaattcagttcctgagtcgaccagcttttaaaagcatcccagataatgtcatctttagggaatttattttgggaaagattaaaagaagccgatgtttgatcctgggggctccctccttatgacttccctggcaacttatgcttttcgaaaggaaatggctcaa

SEQ ID NO: 28802 - DNA, 1002 bp, Macaca Mulatta
  misc_feature (1)...(1002): n = A,T,C or G
cactcatggtggggacccatcgtgagatggtgtggccctgagaggcagccattctcttctgccaaaccaggttccagtcccacagcttcctgtccagtctgcgacttcccctgacctgaacccaccccaggacccttacagaggcatgccaccaggactacaggggcagagtgtctcctctggcagctctgagatcaaatccgacgacgagggcgatgagaacctgcaagacacgaaatcttcggaggacaagaaattagatgacgacaagaaggatatcaaatcaattactagcaataatgacgatgaggacctgacaccggagcagaaggcggagcgtgagaaggagcggagaatggccaacaacgcccgagagcgcctgcgggtccgtgacatcaacgaggctttcaaagagctcggccgcatggtgcagctccacctcaagagtgacaagccccagaccaagctcctgatcctccaccaggcggtggcggtcatcctcagtctggagcagcaagtccgagaaaggaatctgaatccgaaagctgcatgtctgaaaagaagggaggaagagaaggtgtcctcagagcctcccccactctccttggccggcccacaccctggaatgggagatgcatcgaatcacatgggacagatgtaaaagggtccaagttgccacattgcttcattaaaacaagagaccacttccttaacaagctgtattatcttaaacccacataaacacttcttcttaaaccccttttttgtaatataagacaagtctgagtagttatgaatcgcagacgcaagaggtttcagcattcccaattatcaaaacnnnnnnnnnnnnnnnnnnnnnnnnnnnnnnngcaacttgagggacgactttctttaacatatcattcagaatgtgcaaagcagtatgtacaggctgagacacagcccagagactgaacggcaatctttccacactgtggaacaatgcatntgtgcctaaacttc

SEQ ID NO: 28803 - DNA, 134 bp, Macaca Mulatta
cagggcactgaaattgacatcttcagctacaagcccacactgctcacctctaaaaccctggagaagatccgccctgtgtttgactaccgctgcatggtgtctggcagtgagcagaagttcctcatcggcctggg

SEQ ID NO: 28804 - DNA, 340 bp, Macaca Mulatta
cccagtcgatctgggggttagccaccccctcgtccagcccccaaacctccccttccttaccccctcctccggaagccaaggacagggtggccttactcaataaaggtgtttcctgcacctgcttcagcctggacatgccacccctggccccgcccatgaggactgggagcccagtcttgcaccctagtcgtactgggggacatgggaggggtctagctggctactgctggaggcagtactggtcaccacctgggtgtccagaggctggggtctgtgaaggtgaacccaggactacgagggggtcttgccctaccttccggtggagggagggtgaggagct

SEQ ID NO: 28805 - DNA, 504 bp, Macaca Mulatta
ttgcacagcttaaaaaaccattgtgacccttgccagaaatgtggcctttgaggagattgctgaggctgctgtggaccagttgctgcagtcccatgaagatctctcaaatgaggaactaatgcagctggaacaggagccggcagtgggggaggaggagaggaaagatgatccctgggcgctgcggcagttaaccacaggaagactgttggcagccctctcgcattttgaggctggcttgcaggtccttgctagtaacagccctaatgatgaaaacttagagtttccagagctatcaatgatgcaataaactgttaccagaagctgtacaatgagaaaaagcactgttcaaaacaactctcttaggtcatttttccatgtgtgtaaccaaacgttaatcagaacaaagcagaagcaccatgacgaactcaacagtggagacccagccaggcctctctgctctgcggtgttcgacatccctggaaacctttgctgttggtatttcca

SEQ ID NO: 28806 - DNA, 203 bp, Macaca Mulatta
gacccagggtgcacgcccatctccagcccagggcagctcccctgtaagctcggtgagctactgaagacaaggcgggaggcggctaacaatacctatggcccatacagaggtggtggaaaggctggactcagcagcaacaccaaatcccggaccaagcagaaaccacccaagactgaagggctcatgccagagcagtggccaca

SEQ ID NO: 28807 - DNA, 317 bp, Macaca Mulatta
  misc_feature (1)...(317): n = A,T,C or G
gtaatgaatgtggtaaagctttcattaaaatgtcaaatctcattagacatcaaagaattcatactggagagaagccctatgcatgtaaggaatgtgagaagtccttcagccagaaatcaaatcttattgatcatgaaaaaattcacactggagagaaaccttatgaatgtaatgagtgtggaanagcattcagccagaagcaaagcctcattgcacatcagaaagttcatactggggagaaaccttatgcatgtaatgaatgtggtaaagccttccctcgaattgcatctcttgctcttcatatgagaagtcataca

SEQ ID NO: 28808 - DNA, 2287 bp, Macaca Mulatta
  misc_feature (1)...(2287): n = A,T,C or G
gtaaactttggagtcggagtttaaaactagcttatactctacttaataaactgacaagtaagaacgaacctctgcttaaacctggagacagagnnnnnnnnnnnnnnnnnnnnnnnnnnnnnnnnnnnnnnnnnnnnnnnnnnnnnnnnnnnnnnnnnnnnnnnnnnnnnnnnnnnnnnnnnnnnnnnnnnnnnnnnnnnnnnnnnnnnnnnnnnnnnnnnnnnnnnnnnnnnnnnnnnnnnnnnnnnnnnnnnnnnnnnnnnnnnnnnnnnnnnnnnnnnnnnnnnnnnnnnnnnnnnnnnnnnnnnnnnnnnnnnnnnnnnnnnnnnnnnnnnnnnnnnnnnnnnnnnnnnnnnnnnnnnnnnnnnnnnnnnnnnnnnnnnnnnnnnnnnnnnnnnnnnnnnnnnnnnnnnnnnnnnnnnnnnnnnnnnnnnnnnnnnnnnnnnnnnnnnnnnnnnnnnnnnnnnnnnnnnnnnnnnnnnnnnnnnnnnnnnnnnnnnnnnnnnnnnnnnnnnnnnnnnnnnnnnnnnnnnnnnnnnnnnnnnnnnnnnnnnnnnnnnnnnnnnnnnnnnnnnnnnnnnnnnnnnnnnnnnnnnnnnnnnnnnnnnnnnnnnnnnnnnnnnnnnnnnnnnnnnnnnnnnnnnnnnnnnnnnnnnnnnnnnnnnnnnnnnnnnnnnnnnnnnnnnnnnnnnnnnnagctcgggccgcgctggtgaagtcgcgagacaggggctaaactctcctagctcagcgaggccagagggacgtcagcctcagctcactgcgcatgctgattgtggccgatggcgccaaccnnnnnnnnnnnnnnnnnnnnnnnnnnnnnnnnnnnnnnnnnnnnnnnnnnnnnnnnnnnnnnnnnnnnnnnnnnnnnnnnnnnnnnnnnnnnnnnnnnnnnnnnnnnnnnnnnnnggccacctgatctgggaggaccacctccaagaaaannnnnnnnnnnnnnnnnnnnnnnnnnnnnnnnnnnnnnnnnnnnnnnnnnnnnnnnnnnnnnnnnnnnnnnnnnnnnnnnnnnnnnnnnnnnnnnnnnnnnnnnnnnnnnnnnnnnnnnnnnnnnnnnnnnnnnnnnnnnnnnnnnnnnnnnnnnnnnnnnnnnnnnnnnnnnnnnnnnnnnnnnnnnnnnnnnnnnnnnnnnnnnnnnnnnnnnnnnnnnnnnnnnnnnnnnnnnnnnnnnnnnnnnnnnnnnnnnnnnnnnnnnnnnnnnnnnnnnnnnnnnnnnnnnnnnnnnnnnnnnnnnnnnnnnnnnnnnnnnnnnnnnnnnnnnnnnnnnnnnnnnnnnnnnnnnnnnnnnnnnnnnnnnnnnnnnnnnnnnnnnnnnnnnnnnnnnnnnnnnnnnnnnnnnnnnnnnnnnnnnnnnnnnnnnnnnnnnnnnnnnnnnnnnnnnnnnnnnnnnnnnnnnnnnnnnnnnnnnnnnnnnnnnnnnnnnnnnnnnnnnnnnnnnnnnnnnnnnnnnnnnnnnnnnnnnnnnnnnnnnnnnnnnnnnnnnnnnnnnnnnnnnnnnnnnnnnnnnnnnnnnnnnnnnnnnnnnnnnnnnnnnnnnnnnnnnnnnnnnnnnnnnnnnnnnnnnnnnnnnnnnnnnnnnnnnnnnnnnnnnnnnnnnnnnnnnnnnnnnnnnnnnnnnnnnnnnnnnnnnnnnnnnnnnnnnnnnnnnnnnnnnnnnnnnnnnnnnnnnnnnnnnnnnnnnnnnnnnnnnnnnnnnnnnnnnnnnnnnnnnnnnnnnnnnnnnnnnnnnnnnnnnnnnnnnnnnnnnnnnnnnnnnnnnnnnnnnnnnnnnnnnnnnnnnnnnnnnnnnnnnnnnnnnnnnnnnnnnnnnnnnnnnnnnnnnnnnnnnnnnnnnnnnnnnnnnnnnnnnnnnnnnnnnnnnnnnnnnnnnnnnnnnnnnnnnnnnnnnnnnnnnnnnnnnnnnnnnnnnnnnnnnnnnnnnnnnnnnnnnnnnnnnnnnnnnnnnnnnnnnnnnnnnnnnnnnnnnnnnnnnnnnnnnnnnnnnnnnnnnnnnnnnnnnnnnnnnnnnnnaggggtggacctcatcgccgcgttctatggctgcttgtactgtggctgcgtgcccgtcactgtgcggcccccgcaccctcagaaccttggcaccacactgcccaccgtcaagatgatcgtggaggtnaggtcagcaagtctgcatgcgtcctcaccacgcaggccgtcacacggctgcttaggtccaaggaggctgctgccgccgtggacatcaggacctggcccaccatcctagacacag

SEQ ID NO: 28809 - DNA, 657 bp, Macaca Mulatta
gggggcgtgggaggaaggtgactgtgaggaaggtgtgtgtccaccgagcacttggattcagctccttcatttccaacatggaagaaacttacactgactccctggaccctgagaagctattgcaatgcccctatgacaaaaaccatcaaatcagggcttgcaggtttccttatcatcttatcaagtgcagaaagaatcatcctgatgttgcaagcaaattggctacttgtcccttcaatgctcgccaccaggttcctcgagctgaaattagtcatcatatctcaagctgtgatgacagaagttgtattgagcaagatgttgtcaaccaaaccaggagccttagacaagagactctggctgagagcacttggcagtgccctccttgtgatgaagactgggataaagatttgtgggaacagaccagcaccccatttgtctggggcacaactcactactctgacaataacagccctgcaagcaacatagttacggaacataagaataacctggcttcaggcatgcgagttcccaaatctctgccgtatgttttgccatggaaaaacaatggaaatgcacagtaactgaatacctatctcatcaaatgccagaccctaaaagactcttgcttctctctgctacagtgggttcttcatttcc

SEQ ID NO: 28810 - DNA, 450 bp, Macaca Mulatta
atgaacctgtggctcctggcttgcctggtggccggcttcctgggagcctgggcccccactgtccacacccaaggtgtctttgaggactgctgcctggcctaccactaccccattgggtgggctgtgctccggcacgcctggacttatcggatccaggaggtgagcgggagctgcaatctgcctgctgcaatattctacctccccaagagacacaggaaagtgtgtgggaaccccaagaacaaggaggtgcagagagccatgaagctcctggatgctcgcaataagatttttgccaagttccgccacaacacgcagaccttcccaggctctcatgctgcaaagaagttgagttctgcaaactccaaactaccatcgtctaagtttagcaatcccaccagcagcagcaagaggaatgcctccctcctgacatcagctaattcaggactgtga

SEQ ID NO: 28811 - DNA, 280 bp, Macaca Mulatta
gcaggtatggcgaccgggagggcctcctccccgcggtgctgttgcgaccggaagggctgggcgcactcctgagcggaacgggattccgtggaggagacgacccggccggtgaggcccggggctcccgggaagcctcccaggccaccgcccctccccccaccgtgcccacccgaccttcggcgggcgccatccagagccgctgctgcaccgtcacacgcagggccctggagcggcgcccagggcgccagggcccgtctcgagggtgcgtggaccctgtgcc

SEQ ID NO: 28812 - DNA, 982 bp, Macaca Mulatta
  misc_feature (1)...(982): n = A,T,C or G
aggtttggacatggcacctttctgctgtgcctggaaaccatttaccagaaagtgacgggcaaggagctgagatacgagggcctgatgggcaaacccagcatcctcacttaccagtacgcccaggacctgatcnnnnnnnnnnnnnnnnnnnnnnnnnnnnnnnnnnnnnnnnnnnnnnnnnnnnnnnnnnnnnnnnnnnnnnnnnnnnnnnnnnnnnnnnnnnnnnnnnnnnnnnnnnnnnnnnnnnnnnnnnnnnnnnnnnnnnnnnnnnnnnnnnnnnnnnnnnnnnnnnnnnnnnnnnnnnnnnnnnnnnnnnnnnnnnnnnnnnnnnnnnnnnnnnnnnnnnnnnnnnacaatcccagcaacccgcagtccacggagcctgtccttggaggagagcagcctccatttcacgggctccgagacttgttcttcagtccagggctcatggaggcctcccacgtggtgaatgacgtgaatgaggctgtgcagctggtcttccgcgaggagggctgggcctcggagtgagggcagtgcgggggaggcgagggggtgagcctggacctgtgggtgagtccctttggctgggctctggcctgatcactgggctcaggtcagggcttggttcccttgccaccattcatgatgccccatgagtgtggcattactggtcacttagaagaagacagtggctctttttccctgctgggtagcattttgtatggaactgtcagaatcttctgggcacagttcccttgtgcctctcctggcagtctaaccccaggccattctcttcacctgtgtgcctcagtgtccttctcgtttcagtaggaacttctgaaaagggggaggcagtgtggaatactgtggatgtctgtgcagagcctttgccggcactgaaggcgtgcagcctgtcggcagagtgtctaacaccagatgctactttttactgtattgtagtttattgcccagagatttgggg

SEQ ID NO: 28813 - DNA, 142 bp, Macaca Mulatta
agagagggtgatcacttactgtcactaggactacagtttgtagactctcagggagagagactacaaactgtagttaaaaaaatcagaggtggaggtcagggggttagagccagaagaaaacctcggtagagcccaccctgca

SEQ ID NO: 28814 - DNA, 829 bp, Macaca Mulatta
gggccctttcccttcggcgcgccactgaagatcctggtgtcgccatgggccgccgccccgcccgttgttaccggtattgtaagaacaagccgtacccaaagtctcgcttctgccgaggtgtccctgatgccaagattcgcatctttgacctggggcggaagaaggcaaaagtggatgagtttccgctctgtggccacatggtgtcagatgaatatgagcagctgtcctctgaagccctggaggctgcccgaatttgtgccaataagtacatggtaaaaagttgtggcaaggatggcttccatatccgggtgcggctccaccccttccacgtcatccgcatcaacaagatgttgtcctgtgctggggccgacaggctccaaacgggcatgcgaggtgcttttggaaagccccagggcactgtggccagggttcacattggccaagttatcatgtccatccgcaccaagctgcagaacaaggagcatgtgattgaggccctgcgcagggccaagttcaagtttcctggccgccagaagatccacatctcaaagaagtggggcttcaccaaattcaatgctgatgaatttgaagacatggtggctgaaaagcggctcatcccagatggctgtggggtcaagtacatccccaatcgtggtcctctggacaaatggcgggccctgcactcatgagggcttccaatatgctgccccccacttaatactcaccaataaattctactttcctgtccacccaatgcaaaactaatagaaataacaataaatatgtctggcccgcctcggcccctcgagaaacttttctatggcctacg

SEQ ID NO: 28815 - DNA, 265 bp, Macaca Mulatta
cagaagaagctctcaacaaaagggctgcttcaggagataaaaaagatgataaaatgctcttcaaagtaatgcaaaacctgaatctggaaatgaataataataagatagaagcaaacgtcaagggggatatcagaatagtcacaagttaaaacgtctgaattgatattaaagttttatatttcacaaattggtttaataaatgattctcatatcccactgaaatggtagtttcaattcaaagcttaattaaaaaatatttaaatat

SEQ ID NO: 28816 - DNA, 1379 bp, Macaca Mulatta
  misc_feature (1)...(1379): n = A,T,C or G
ggaaagtacatgtcttctaaatgcactactacctctgacagtgtatgtctgccctgtggcccggatgaatacttggatacctggaatgaagaagataaatgcttgctgcataaagtttgtgatacaggnnnnnnnnnnnnnnnnnnnnnnnnnnnnnnnnnnnnnnnnnnnnnnnnnnnnnnnnnnnnnnnnnnnnnnnnnnnnnnnnnnnnnnnnnnnnnnnnnnnnnnnnnnnnnnnnnnnnnnnnnnnnnnnnnnnnnnnnnnnnnnnnnnnnnnnnnnnnnnnnnnnnnnnnnnnnnnnnnnnnnnnnnnnnnnnnnnnnnnnnnnnnnnnnnnnnnnnnnnnnnnnnnnnnnnnnnnnnnnnnnnnnnnnnnnnnnnnnnnnnnnnnnnnnnnnnnnnnnnnnnnnnnnnnnnnnnnnnnnnnnnnnnnnnnnnnnnnnnnnnnnnnnnnnnnnnnnnnnnnnnnnnnnnnnnnnnnnnnnnnnnnnnnnnnnnnnnnnnnnnnnnnnnnnnnnnnnnnnnnnnnnnnnnnnnnnnnnnnnnnnnnnnnnnnnnnnnnnnnnnnnnnnnnnnnnnnnnnnnnnnnnnnnnnnnnnnnnnnnnnnnnnnnnnnnnnnnnnnaggagtcctcaggcgacagttgtgtcagtccacacacggcagcctttggtcaacagggagtgtgtgaaggtgtcttactgctgactctggagaagacatttccagaagatatgtgctccccagatcaaggtggtgtctgtcagggcacgtgtgtaggaggtggtccctacgcacaaggggaagatgccaggatactctcattggtcagcgagaccgagacagaggaagaccgcttcagacaggtgcccacggaagatgaatacatggacaggccctcccagcccgcagaccgtttactgttcctcactgagcctggaagcaaatccacacctcctttctctgaacccctggaggtaggggagaatgacagtttaagccagtgcttcacagggacacagagcacagtgggttcagaaagctgcagctgcactgagcccctgtgcgggactgattggattcccatgtcctctgaaaactacttacaaaaagaggtggacggtggccattgcccgcactgggcagccagtcccagccctaactgggcagatgtctgcacaggctgccggaaccctcctggggaggactgtgaacccctcgtgggttccccgaaacgtggaaccttgccccagtgtgcctatggcatgggccttccccatgaagaagcagccggcaggacagaggccagagaccagcccgagaacgggactgatgggaggctcccaagctggacaagggcaggcgccgggtctggaag

SEQ ID NO: 28817 - DNA, 1064 bp, Macaca Mulatta
  misc_feature (1)...(1064): n = A,T,C or G
ggtaggaaatagtggggcacactactcagagacattatttagcagtaaagaaagacacaaataacaatgataaaaagacatcctaaaatgacgaagttgccatgacaataaaggtcatagaacctggtagtgtcaaatttaaccctttgaggactgtaattgcatttctgtgcctttcacttnnnnnnnnnnnnnnnnnnnnnnnnngcttaaaggcatttcattcagatcaaaagctgtgtcagacacaaaacttatttaataattaaaaaatgagcttttatatgcagaactggtttgtgaggaaacatgcatgcagctgtgggaagatagaaagctgtgtaggactcacggggtttggaagccacacctctacatgtctaaaacagaaaacaacaacagatacccactcgccactatgcccaaaccctctggatgcggaaaaatgccactttcaccnnnnnnnnnnnnnnnnnnnnnnnnnatgcaagctattatttaaaaatgtataaaaatgctatttctttttttcctgtaaaatattgcggtttatagttatttacaaatgtaagctttggtacaagctgacctttctatagcgtgctgcattggtnnnnnnnnnnnnnnnnnnnncaaacgttggagtccttttccttgtaaattgccagcatcagctttaaaaactcctgtatgttacatatcgtaaccattttaaatctcttcaactttcctttgtaccttctggctgtatgcttttcccttttaaatttttatattggtcattttatattaaatttctgtgtatataatgtaaaaccacaatttttgaataaaatttagttcctgcagcttgatttaaatagaggacttttactggcacctgcatctctccagatgcatgtactcagagggactgtcagacnaaaataaatacctaaaaacaaagcaagcaatgcactattaattatacatttttgatgttctatcattaatattgtacagtacattttggttcacaccattaaatcccactgtttttctcagatgtaaaataaacccccctg

SEQ ID NO: 28818 - DNA, 760 bp, Macaca Mulatta
  misc_feature (1)...(760): n = A,T,C or G
ggggcaaacgcctgtcctgtgacagcactttcagcttcaaatacatcatttaggtgaaagtcagtgttgctgtgcatgcactgatggagtagatgagtgagcttttccgtgcctctcctctccacctctcccttctcaaaatacttcatgaaaggcagtgtattctgaaaaagccttcaaataaaggttatcctggtgttttatgtgagcagtatttactcataggcctgaatgaggatccttactcttctcttgagtctttttctaagaacgcatgtaatgatttcctaaataagcagcatgaagaaactgccagattgctgcttttactgttgtcttggtcttgctctgtcacctgtgctggagtgcagtgctacattcacagctcactgcagcttctaactcctgggctcaagtcattgtcccagctcagcctcccaagtaactaggactacagacaagactggtatacaaggacagatcgagttgcataaaaaggatcttccaccctcaaaaaagttgaatatgaaagtctctcaggtttcaccggcccttangctatttgcttgacagcatctctgaaggaaaacatgttaagcttttctagtgagatacagctgatggcagccattgtcaaaagctatcagtggatttctttgtattagtaaaatgcagtttgacatctaacatggaaacctgtgcaattaatcctttattcatacaaaaatggttaaaaatctttaattaatccccttttata

SEQ ID NO: 28819 - DNA, 3618 bp, Macaca Mulatta
  misc_feature (1)...(3618): n = A,T,C or G
gcggggcggaacgggtcgggcgggttccaccgatctgggtgcttccgcgggctgcgggggtcgctggggcttcgtggccgggcagctccgcggggcttcgcccgctccctcacctcgctctaccctctcgcggcgcccggcggggcccgcgctgcagctggagacccggagaaagnnnnnnnnnnnnnnnnnnnnnnnnnnnnnnnnnnnnnnnnnnnnnnnnnnnnnnnnnnnnnnnnnnnnnnnnnnnnnnnnnnnnnnnnnnnnnnnnnnnnnnnnnnnnnnnnnnnnnnnnnnnnnnnnnnnnnnnnnnnnnnnnnnnnnnnnnnnnnnnnnnnnnnnnnnnnnnnnnnnnnnnnnnnnnnnnnnnnnnnnnnnnnnnnnnnnnnnnnnnnnnnnnnnnnnnnnnnnnnnnnnnnnnnnnnnnnnnnnnnnnnnnnnnnnnnnnnnnnnnnnnnnnnnnnnnnnnnnnnnnnnnnnnnnnnnnnnnnnnnnnnnnnnnnnnnnnnnnnnnnnnnnnnnnnnnnnnnnnnnnnnnnnnnnnnnnnnnnnnnnnnnnnnnnnnnnnnnnnnnnnnnnnnnnnnnnnnnnnnnnnnnnnnnnnnnnnnnnnnnnnnnnnnnnnnnnnnnnnnnnnnnnnnnnnnnnnnnnnnnnnnnnnnnnnnnnnnnnnnnnnnnnnnnnnnnnnnnnnnnnnnnnnnnnnnnnnnnnnnnnnnnnnnnnnnnnnnnnnnnnnnnnnnnnnnnnnnnnnnnnnnnnnnnnnnnnnnnnnnnnnnnnnnnnnnnnnnnnnnnnnnnnnnnnnnnnnnnnnnnnnnnnnnnnnnnnnnnnnnnnnnnnnnnnnnnnnnnnnnnnnnnnnnnnnnnnnnnnnnnnnnnnnnnnnnnnnnnnnnnnnnnnnnnnnnnnnnnnnnnnnnnnnnnnnnnnnnnnnnnnnnnnnnnnnnnnnnnnnnnnnnnnnnnnnnnnnnnnnnnnnnnnnnnnnnnnnnnnnnnnnnnnnnnnnnnnnnnnnnnnnnnnnnnnnnnnnnnnnnnnnnnnnnnnnnnnnnnnnnnnnnnnnnnnnnnnnnnnnnnnnnnnnnnnnnnnnnnnnnnnnnnnnnnnnnnnnnnnnnnnnnnnnnnnnnnnnnnnnnnnnnnnnnnnnnnnnnnnnnnnnnnnnnnnnnnnnnnnnnnnnnnnnnnnnnnnnnnnnnnnnnnnnnnnnnnnnnnnnnnnnnnnnnnnnnnnnnnnnnnnnnnnnnnnnnnnnnnnnnnnnnnnnnnnnnnnnnnnnnnnnnnnnnnnnnnnnnnnnnnnnnnnnnnnnnnnnnnnnnnnnnnnnnnnnnnnnnnnnnnnnnnnnnnnnnnnnnnnnnnnnnnnnnnnnnnnnnnnnnnnnnnnnnnnnnnnnnnnnnnnnnnnnnnnnnnnnnnnnnnnnnnnnnnnnnnnnnnnnnnnnnnnnnnnnnnnnnnnnnnnnnnnnnnnnnnnnnnnnnnnnnnnnnnnnnnnnnnnnnnnnnnnnnnnnnnnnnnnnnnnnnnnnnnnnnnnnnnnnnnnnnnnnnnnnnnnnnnnnnnnnnnnnnnnnnnnnnnnnnnnnnnnnnnnnnnnnnnnnnnnnnnnnnnnnnnnnnnnnnnnnnnnnnnnnnnnnnnnnnnnnnnnnnnnnnnnnnnnnnnnnnnnnnnnnnnnnnnnnnnnnnnnnnnnnnnnnnnnnnnnnnnnnnnnnnnnnnnnnnnnnnnnnnnnnnnnnnnnnnnnnnnnnnnnnnnnnnnnnnnnnnnnnnnnnnnnnnnnnnnnnnnnnnnnnnnnnnnnnnnnnnnnnnnnctgttcctaaaattcatggaagtagttttgtaacatctgctgtcaannnnnnnnnnnnnnnnnnnnnnnnnnnnnnnnnnnnnnnnnnnnnnnnnnnnnnnnnnnnnnnnnnnnnnnnnnnnnnnnnnnnnnnnnnnnnnnnnnnnnnnnnnnntgatcatcaaacaggaacctggtgaagcacctcacgtgcccgcaacaggagctgccagccagtcaccactcccgcagtatgtgactgtgaaagggggtcacatgatagctgtgtcccctcagaaacaggtcataactactggagaaggtattttccagtcaacaaaggttcagccctccaaggttnnnnnnnnnnnnnnnnnnnnnnnnnnnnnnnnnnnnnnnnnnnnnnnnnnnnnnnnnnnnnnnnnnnnnnnnnnnnnnnnnnnnnnnnnnnnnnnnnnnnnnnnnnnnnnnnnnnnnnnnnnnnnnnnnnnnnnnnnnnnnnnnnnnnnnnnnnnnnnnnnnnnnnnnnnnnnnnnnnnnnnnnnnnnnnnnnnnnnnnnnnnnnnnnnnnnnnnnnnnnnnnnnnnnnnnnnnnnnnnnnnnnnnnnnnnnnnnnnnnnnnnnnnnnnnnnnnnnnnnnnnnnnnnnnnnnnnnnnnnnnnnnnnnnnnnnnnnnnnnnnnnnnnnnnnnnnnnnnnnnnnnnnnnnnnnnnnnnnnnnnnnnnnnnnnnnnnnnnnnnnnnnnnnnnnnnnnnnnnnnnnnnnnnnnnnnnnnnnnnnnnnnnnnnnnnnnnnnnnnnnnnnnnnnnnnnnnnnnnnnnnnnnnnnnnnnnnnnnnnnnnnnnnnnnnnnnnnnnnnnnnnnnnnnnnnnnnnnnnnnnnnnnnnnnnnnnnnnnnnnnnnnnnnnnnnnnnnnnnnnnnnnnnnnnnnnnnnnnnnnnnnnnnnnnnnnnnnnnnnnnnnnnnnnnnnnnnnnnnnnnnnnnagggcacatttttagttggccagccatcaccccagacttctggaaaacaactcaccactgggtcagtggtccaaggaacactgggagtcagcacgtcttctgcacaaggacaacaaacgctaaaggtcatctctggacagaaaaccacgttgtttacacagnnnnnnnnnnnnnnnnnnnnnnnnnnnnnnnnnnnnnnnnnnnnnnnnnnnnnnnnnnnnnnnnnnnnnnnnnnnnnnnnnnnnnnnnnnnnnnnnnnnnnnnnnnnnnnnnnnnnnnnnnnnnnnnnnnnnnnnnnnnnnnnnnnnnnnnnnnnnnnnnnnnnnnnnnnnnnagtctgagggaatggctcccatgtcttcatctacggtcagttctgtaacgaaaacttctgggcagccgcaagtgtgtgtgagccagaccaccgtgggaacctgctaggctgccacccccaccgtcgtcagcgccacgtccctcgtgcccacaccaaaccccatctctgggaaagccacagtatcnnnnnnnnnnnnnnnnnnnnnnnnnnnnnnnnnnnnnnnnnnnnnnnnnnnnnnnnnnnnnnnnnnnnnnnnnnnnnnnnnnnnnnnnnnnnnnnnnnnnnnnnnnnnnnnnnnnnnnnnnnnnnnnnnnnnnnnnnnnnnnnnnnnnnnnnnnnnnnnnnnnnnnnnnnnnnnnnnnnnnnnnnnnnnnnnnnnnnnnnnnnnnnnnnnnnnnnnnnnnnnnnnnnnagtgaagactgaaccagaaacacctggaccgagctgcctctctcaggagggtcagacagcagtgaaaacagaagaaagttctgagctgggaaactatgtcattaa

SEQ ID NO: 28820 - DNA, 788 bp, Macaca Mulatta
  misc_feature (1)...(788): n = A,T,C or G
gggtcggaggactggctcttgtagtcacagggtggctgcaggcctttgaaaagtggaggaaagaaaagcccttctccttgccccgcacacatttcactcccactctactgggcttccaagctttggcattcaggcccctacattttctgtaggaaaaatcgttgagaacactttttttatataggtaattttaagaccatcattacgctgtgcgtaaagaatgtacagagaaatttgtaggtatttttggaagaacattaatttgttaatgatgtagctatttaatttttccctttcctattgtaatcattcannnnnnnnnnnnnnnnnnnnnnnnnnnnnnnngatctttttttttgtcgtagatttgtctgtaaaagtgcaggaacacagttattctatgagaacactgcatctgcattcatagccactagtttgttattgctacaggctactgagcgtcgtaacaggaaaacaacccactgctgaccggctcggtggaggacactcctgggacaggtctctctgtcagtgaacaagggcgtcactctgggagggtcggcggtgctggtggccggtcccctggtgcactgacctatctgggataggcagtaccctggaagggggccttgggcagagggggcagccagaaaaccaaacatttcacctgaaaaagaaccccctttccccgcctcttagaaggggctcccgtgaaagttctttggccagaacccaccccccgccctgcaagtggcgccttcctgaacggttctcctcccgtggggtaa

SEQ ID NO: 28821 - DNA, 777 bp, Macaca Mulatta
  misc_feature (1)...(777): n = A,T,C or G
ggatagaaaagatttaagtaattttgccaccctaggcttcaatgcaatattcctggtattatttacaatgcagaactttttgggtaattctagcttttaaaaattagtgaagttcttttactgtaactggtgacaatgtcacataatggatgctattgaaaaggttaacagatacagctcggagttgtgagcactctactgcaaggcttaaacaattcagtataaattgtcgtttttttcttgtgctgactaactataagcatgatcttgttaatgcatttttgatgggaagaaaaggtaaatgtttacaaagaggttttatgaaaggaataaaaattgacttcttgcttgtacatataggagcaatactattatattatttagtccgttaacaccacttaaaagtttagggttttctcttggttgtggagtggcccagaaatgcattctgaatgaataaaggttaaaaaanagnnaancacaantnaaangataaaaacaaagagagaaaataaagaaatcattgtgtcggccgcttccgacctttaaaaactttaaagatcctttttgctggaactgagaacacaaaaagtaagtgaatcttgtgtcccccccccgccccccacaaaaaaattnnnnnnnnnnnnnnnnnntttggggccccccccgccccattaaaaaaaatatgcgaaacggggcgcccctactgctttttctccaacaaagagaaaaccaaggggttctatacaaaaagggccgcttttagagggccaccct

SEQ ID NO: 28822 - DNA, 783 bp, Macaca Mulatta
ggaagtctgatcatgatattgcaaacaactgtaaatggtctctaggccttactttgtgattatacgttatctcctgctagaaaaagataatgtaataaagaactgacaaactgaaaaaaagaaacaaaaatcaaatgcctataataccctaatgccactttggtatagagtctaactttaaaacatgaattgctcgacagaattctattcagtaggtgtttctttgtattgccttttgtgaattttttatgaaaatgctgcagttgtgttgaatgaaaaagacccaaattatagcttatgaagaaataaagccaggattgatcacttaatcctgtttctcatgtccagccagaaaaaaagaacttcagtgaacgtaagataaataaataatacacatataatactttttttggtagtcaagtgctaattacctatatgtaatactttattaaaatttctgaaatatttggtaactaaaattttcttttttggaaaattaataaatctagatacatattaaggttgaatatgactaaaaaaacaagaagaaaagggaaaatttccctttcaccaaacctggtagaagccgcctatttttactaattttggaagaaaattggaaggggaaaaaattggaaaccccacaaaagggtttccactttggtggtttttccactggtaaaaaataacccctttcttccggatggaaaaagttctttgaaagggtccccctcaaaccaattatatcacacctttctcttgggaaaaaaaatagaggttccc

SEQ ID NO: 28823 - DNA, 414 bp, Macaca Mulatta
  misc_feature (1)...(414): n = A,T,C or G
caggtcagcgtttctcgcagcacacatcccactttttttgtacccctttttgcacactgtcagcaaaacacgtccctttgagtatcttcggctcaccagccttggagttattggnnnnnnnnnnnnnnnnnnnnnnnnnnnnnnnnnnnnnnnnnnnnnnnnnnnnnnnnnnnnnnnnnnnnnnnnnnnnnnnnnnnnnnnnnnnnnnnnnnnnnnnnnnnnnnnnnnnnnnnnnnnnnnnnnnnnnnnnnnnnnnnnnnnnnnnnnnnnnnnnnnnnnnnnnnnnnnnnnnnnnnnnnnnnnnnnnnnnnnnnnnnnnnngggtaagatggtcctgcagctatccaaagagccttctgcccgtctgctgaagcatgtagtgagatgttaccttcggctttcagataaccccag

SEQ ID NO: 28824 - DNA, 704 bp, Macaca Mulatta
atggagtgcagaaaaaccggaaaagacaaaaacagccttgacataatttcatagcattccaaagaagcaacagcaagagaaaaagacttattccgcagcgtaaaggacacagatttatcaagaaacattcctggcaaagtgaaagtgtctgcacccaatcttctgaatgtaaaaaggaaatagctgaaatgaaattctaaaatatttgagaagagccaattttatagccttttggaagttcaaagatgaaaacaccatgtatcaggacttctgcattataaaaatgaactaaacattgccttgctctattcaccaaaaggacttaattcttgttttttttcccagttttatatagaggaaacactgtctatgataggatttcctaaagtatttgtggatagttaaatgctaattatatacatctgtaattattctacattttcttgacatttgggaggttaataccaagtattcatttcatgatgtaaagaaactgaacagtgaagtggcttgattgcttagactactgacttgttaagtctactgtatataacatctaatatatatattacgggccagccacaggggtgtatataggattgtgtcttgaaaactaagtattggagtggattttcttctgctttcatctatacttgtcaaaaaatatattagacctaaatgtcacatgttagtaataattctca

SEQ ID NO: 28825 - DNA, 229 bp, Macaca Mulatta
ttggcgggaggtgggaagacaagtgcgcccgccaggtgaggcctctgtggtcagtgaagaaaggggagcgcggggctgcagtcgccgccccggcgccccagcggctgggagccggttcttgtagcagggtaatgtcccccttgctcttggctatttagtcgcaggcagcctcttgtatttcgaatctggcttgtcgccgagttatgccgccaggttgcgatgcaagatc

SEQ ID NO: 28826 - DNA, 766 bp, Macaca Mulatta
tgcccactgaccactggaaagggtagaataatatataattacattctagatacttaaagatatttaatttatttacctttttgaatgattctcatttctctctcctaagctcttccaaaaaagatttttaaatcactccagcccacagagattatgttttaaaaacaattgtacatcaaaatgatgatctgttatcagccatttagcatttaccttaagagggatagctctgaggtcatagcatcatgtctacagttcacacaggaaagctaatcttgtggcgatgtgctaactttattgctattttttctgttcatgttgtttgtctagctaactaagtcaatgcctttggaggcagtaaccaagtcttttgctcctcaccgagcctgacaccatgtcctgcacatggtaaaccctgaaaaaataggtgatgcaaaaaatctatgcagagaggtggtgattgaattatttcaatgcctgctttgtcttccaggtgaaggcttccataattaccatcacacctttccctttgactactctgcgagtgaatttggcttaaattttaacccaaccacctggttcattgatctcatgtgctggctggggctggccactgaccgcaaacgggcaaccaagccgatgatcgaggcccggaaggccaggactggagacagcagtgcttgaacctggaacagccatcccacatgtctgccattgcaccctcggttcatggctttggttacaatagttctcttgtacattggat

SEQ ID NO: 28827 - DNA, 2458 bp, Macaca Mulatta
  misc_feature (1)...(2458): n = A,T,C or G
tcttgcaggagagagagttactgcctgtgaagaaatttgaaagtgagattctggaagcaatcagtcaaaattcagttgtcattattagaggtgctactgggtgtgggaaaaccacacaggttccccagttcattctagatgactttatccagaatgaccgagcagcagagtgtaacattgtagtaactcagnnnnnnnnnnnnnnnnnnnnnnnnnnnnnnnnnnnnnnnnnnnnnnnnnnnnnnnnnnnnnnnnnnnnnnnnnnnnnnnnnnnnnnnnnnnnnnnnnnnnnnnnnnnnnnnnnnnnnnnnnnnnnnnnnnnnnnnnnnnnnnnnnnnnnnnnnnnnnnnnnnnnnnnnnnnnnnnnnnnnnnnnnnnnnnnnnnnnnnnnnnnnnnnnnnnnnnnnnnnnnnnnnnnnnnnnnnnnnnnnnnnnnnnnnnnnnnnnnnnnnnnnnnnnnnnnnnnnnnnnnnnnnnnnnnnnnnnnnnnnnnnnnnnnnnnnnnnnnnnnnnnnnnnnnnnnnnnnnnnnnnnnnnnnnnnnnnnnnnnnnnnnnnnnnnnnnnnnnnnnnnnnnnnnnnnnnnnnnnnnnnnnnnnnnnnnnnnnnnnnnnnnnnnnnnnnnnnnnnnnnnnnnnnnnnnnnnnnnnnnnnnnnnnnnnnnnnnnnnnnnnnnnnnnnnnnnnnnnnnnnnnnnnnnnnnnnnnnnnnnnnnnnnnnnnnnnnnnnnnnnnnnnnnnnnnnnnnnnnnnnnnnnnnnnnnnnnnnnnnnnnnnnnnnnnnnnnnnnnnnnnnnnnnnnnnnnnnnnnnnnnnnnnnnnnnnnnnnnnnnnnnnnnnnnnnnnnnnnnnnnnnnnnnnnnnnnnnnnnnnnnnnnnnnnnnnnnnnnnnnnnnnnnnnnnnnnnnnnnnnnnnnnnnnnnnnnnnnnnnnnnnnnnnnnnnnnnnnnnnnnnnnnnnnnnnnnnnnnnnnnnnnnnnnnnnnnnnnnnnnnnnnnnnnnnnnnnnnnnnnnnnnnnnnnnnnnnnnnnnnnnnnnnnnnnnnnnnnnnnnnnnnnnnnnnnnnnnnnnnnnnnnnnnnnnnnnnnnnnnnnnnnnnnnnnnnnnnnnnnnnnnnnnnnnnnnnnnnnnnnnnnnnnnnnnnnnnnnnnnnnnnnnnnnnnnnnnnnnnnnnnnnnnnnnnnnnnnnnnnnnnnnnnnnnnnnnnnnnnnnnnnnnnnnnnnnnnnnnnnnnnnnnnnnnnnnnnnnnnnnnnnnnnnnnnnnnnnnnnnnnnnnnnnnnnnnnnnnnnnnnnnnnnnnnnnnnnnnnnnnnnnnnnnnnnnnnnnnnnnnnnnnnnnnnnnnnnnnnnnnnnnnnnnnnnnnnnnnnnnnnnnnnnnnnnnnnnnnnnnnnnnnnnnnnnnnnnnnnnnnnnnnnnnnnnnnnnnnnnnnnnnnnnnnnnnnnnnnnnnnnnnnnnnnnnnnnnnnnnnnnnnnnnnnnnnnnnnnnnnnnnnnnnnnnnnnnnnnnnnnnnnnnnnnnnnnnnnnnnnnnnnnnnnnnnnnnnnnnnnnnnnnnnnnnnnnnnnnnnnnnnnnnnnnnnnnnnnnnnnnnnnnnnnnnnnnnnnnnnnnnnnnnnnnnnnnnnnnnnnnnnnnnnnnnnnnnnnnnnnnnnnnnnnnnnnnnnnnnnnnnnnnnnnnnnnnnnnnnnnnnnnnnnnnnnnnnnnnnnnnnnnnnnnnnnnnnnnnnnnnnnnnnnnnnnnnnnnnnnnnnnnnnnnnnnnnnnnnnnnnnnnnnnnnnnnnnnnnnnnnnnnnnnnnnnnnnnnnnnnnnnnnnnnnnnnnnnnnnnnnnnnnnnnnnnnnnnnnnnnnnnnnnnnnnnnnnnnnnnnnnnnnnnnnnnnnnnnnnnnnnnnnnnnnnnnnnnnnnnnnnnnnnnnnnnnnnnnnnnnnnnnnnnnnnnnnnnnnnnnnnnnnnnnnnnnnnnnnnnnnnnnnnnnnnnnnnnnnnnnnnnnnnnnnnnnnnnnnnnnnnnnnnnnnnnnnnnnnnnnnnnnnnnnnnnnnnnnnnnnnnnnnnnnnnnnnnnnnnnnnnnnnnnnnnnnnnnnnnnnnnnnnnnnnnnnnnnnnnnnnnnnnnnnnnnnnnnnnnnnnnnnnnnnnnnnnnnnnnnnnnnnnnnnnnnnnnnnnnnnnnnnnnnnnnnnnnnnnnnnnnnnnnnnnnnnnnnnnnnnnnnnnnnnnnnnnnnnnnnnnnnnnnnnnnnnnnnnnnnnnnnnnnnnnnnnnnnnnnnnnnnnnnnnnnnnnnnnnnnnnnnnnnnnnnnnnnnnnnnnnnnnnnnnnggtatggagatggtccacgtcctcccaagatggcccgatacgacaatggaagcggatatagaaggggaggttctagttacagcggtggaggctatggcggtggctataccagtggaggctatggtggcggaggctatgg

SEQ ID NO: 28828 - DNA, 216 bp, Macaca Mulatta
gggaaatgcggagaggcatttcatgcaagagacagctgttaagaaaatctctactgggaaaagacacaatgaatttagtaattttgggagaagcataccccggaaatcagtatttttaacgcaacagaaagttcctaccatagagcaagtacataaatttgatatttatgataaactcttcccccaaaattcagtcataattgaatataaaagact

SEQ ID NO: 28829 - DNA, 152 bp, Macaca Mulatta
  misc_feature (1)...(152): n = A,T,C or G
gcatgctttcataccggtccgtggacatccggaagagcttgcagctggaggagctcctggcgagggagcagctggagtacaccatagaggaggaggtggccaagcagaccatccgcatgtggctcaagaagtgcctgaagcgcatcagagcn

SEQ ID NO: 28830 - DNA, 501 bp, Macaca Mulatta
tccctacaatataacgtgcacaggcctgcttgtgaatcagaactgaatgtgaaagggaagcattgagtgaggacattcccaaaaccaaaggacaactgaggagactgcccagcacataatgaataaataaaatgagtgaagagttattaacatttgttggaaaaaagatttcccattcacttgatattgtttgttcactcatttagtcattaaaagtgagattaataaaatctgaaatgttatataataacttttaaaaagccaggtaattaataatctgcactgatattatatccacagtaccacagtatttatgtatatgaattaaggattaaaagatagtgtggataaataaactattgatctatttctgtgtagaacctgtgtatttcctgcctacttaaatatctctgtagtaatgattaatatttaaggaacattaaaacacaaggagggagattatcagatagttctagaagattcaggcaaggctgcagcacc

SEQ ID NO: 28831 - DNA, 797 bp, Macaca Mulatta
  misc_feature (1)...(797): n = A,T,C or G
taggcgctgtgctggggtcgcggcggcgcgggcgctgggnnnnnnnnnnnnnnnnnnnnnnnnnnnnnnnnnnnnnnnnnnnnnnnnnnnnnnnnnnnnnnnnnnnnnnnnnnnnnnnnnnnnnnnnnnnnnnnnnnnnnnnnnnnnnnnnnnnnnnnnnnnnnnnnnnnnnnnnnnnnnnnnnnnnnnnnnnnnnnnnnnnnnnnnnnnnnnnnnnnnnnnnnnnnnnnnnnnnnnnnnnnnnnnnnnnnnnnnnnnnnnnnnnnnnnnnnnnnnnnnnnnnnnnnnnnnnnnnnnnnnnnnnnnnnnnnnnnnnnnnnnnnnnnnnnnnnnnnnnnnnnnnnnnnnnnnnnnnnnnnnnnnnnnnnnnnnnnnnnnnnnnnnnnnnnnnnnnnnnnnnnnnnnnnnnnnnnnnnnnnnnnnnnnnnnnnnnnnnnnnnnnnnnnnnnnnnnnnnnnnnnnnnnnnnnnnnnnnnnnnnnnnnnnnnnnnnnnnnnnnnnnnnnnnnnnnnnnnnnnnnnnnnnnnnnnnnnnnnnnnnnnnnnnnnnnnnnnnnnnnnnnnnnnnnnnnnnnnnnnnnnnnnnnnnnnnnnnnnnnnnnnnnnnnnnnnnnnnnnnnnnncagagtcaagggtccagagaaggaggagaagttgaggcaggcggtcaagcaggtgctgaagtgtgacgtgactcagagccagccgctgggggccgtccccttacccctgaggactgcctgcttagcacgctgtgtctggatgccgcctgtacggacctccccacctaccgcaggg

SEQ ID NO: 28832 - DNA, 299 bp, Macaca Mulatta
  misc_feature (1)...(299): n = A,T,C or G
naggctgactgtgctgtcctgattgttgctgctggtgttggtgaatttgaagctggtatctccaagaatgggcagacccgagagcatgctcttctggcttacacactgggtgtgaaacaactaattgttggtgttaacaaaatggattccactgagccaccctacagccagaagagatacgaggaaattgttaaggaagtcagcacttacattaagaaaattggctacaaccccgacacagtagcatttgtgccaatttctggttggaatggtgacaacatgctggagccaagtgctaa

SEQ ID NO: 28833 - DNA, 279 bp, Macaca Mulatta
atgcaggtctccactgctgcccttgctgtcctcctctgcaccgtggctctctgcaaccggatctcagcaacatttgctgctgacaccccgacctcctgctgcttcagctacatctcccggcagattccacagaatttcatagctgactactttgagaccaacagccagtgctccaagcccggtgtcatcttcctaaccaagagaggccggcaggtctgtgctgaccccagtaaggagtgggtccagaaatacgtcagcgacctagagctgagtgcctga

SEQ ID NO: 28834 - DNA, 3636 bp, Macaca Mulatta
  misc_feature (1)...(3636): n = A,T,C or G
tttacccgcagtgcatggtggggcggtctcctccggcaacctcggcccaacggccggccagaggctgtgccgagctggcacagcgacagcagcatgaactggaccctcgcatcgtccgtgcctcagtcgagtcccgactactacgagaggctgggccaactccagcatgggctgcgggacagnnnnnnnnnnnnnnnnnnnnnnnnnnnnnnnnnnnnnnnnnnnnnnnnnnnnnnnnnnnnnnnnnnnnnnnnnnnnnnnnnnnnnnnnnnnnnnnnnnnnnnnnnnnnnnnnnnnnnnnnnnnnnnnnnnnnnnnnnnnnnnnnnnnnnnnnnnnnnnnnnnnnnnnnnnnnnnnnnnnnnnnnnnnnnnnnnnnnnnnnnnnnnnnnnnnnnnnnnnnnnnnnnnnnnnnnnnnnnnnnnnnnnnnnnnnnnnnnnnnnnnnnnnnnnnnnnnnnnnnnnnnnnnnnnnnnnnnnnnnnnnnnnnnnnnnnnnnnnnnnnnnnnnnnnnnnnnnnnnnnnnnnnnnnnnnnnnnnnnnnnnnnnnnnnnnnnnnnnnnnnnnnnnnnnnnnnnnnnnnnnnnnnnnnnnnnnnnnnnnnnnnnnnnnnnnnnnnnnnnnnnnnnnnnnnnnnnnnnnnnnnnnnnnnnnnnnnnnnnnnnnnnnnnnnnnnnnnnnnnnnnnnnnnnnnnnnnnnnnnnnnnnnnnnnnnnnnnnnnnnnnnnnnnnnnnnnnnnnnnnnnnnnnnnnnnnnnnnnnnnnnnnnnnnnnnnnnnnnnnnnnnnnnnnnnnnnnnnnnnnnnnnnnnnnnnnnnnnnnnnnnnnnnnnnnnnnnnnnnnnnnnnnnnnnnnnnnnnnnnnnnnnnnnnnnnnnnnnnnnnnnnnnnnnnnnnnnnnnnnnnnnnnnnnnnnnnnnnnnnnnnnnnnnnnnnnnnnnnnnnnnnnnnnnnnnnnnnnnnnnnnnnnnnnnnnnnnnnnnnnnnnnnnnnnnnnnnnnnnnnnnnnnnnnnnnnnnnnnnnnnnnnnnnnnnnnnnnnnnnnnnnnnnnnnnnnnnnnnnnnnnnnnnnnnnnnnnnnnnnnnnnnnnnnnnnnnnnnnnnnnnnnnnnnnnnnnnnnnnnnnnnnnnnnnnnnnnnnnnnnnnnnnnnnnnnnnnnnnnnnnnnnnnnnnnnnnnnnnnnnnnnnnnnnnnnnnnnnnnnnnnnnnnnnnnnnnnnnnnnnnnnnnnnnnnnnnnnnnnnnnnnnnnnnnnnnnnnnnnnnnnnnnnnnnnnnnnnnnnnnnnnnnnnnnnnnnnnnnnnnnnnnnnnnnnnnnnnnnnnnnnnnnnnnnnnnnnnnnnnnnnnnnnnnnnnnnnnnnnnnnnnnnnnnnnnnnnnnnnnnnnnnnnnnnnnnnnnnnnnnnnnnnnnnnnnnnnnnnnnnnnnnnnnnnnnnnnnnnnnnnnnnnnnnnnnnnnnnnnnnnnnnnnnnnnnnnnnnnnnnnnnnnnnnnnnnnnnnnnnnnnnnnnnnnnnnnnnnnnnnnnnnnnnnnnnnnnggcaacagcattattgagaaaagcccctacagaagagtgtggccataggtcagctattcacagtagtgaatcatcttgcagcttgccgtctattctgaatgacaatagtggaataaaggaagccaaatctgctgtatggctcaacaacgttcctacaagggaacaagnnnnnnnnnnnnnnnnnnnnnnnnnnnnnnnnnnnnnnnnnnnnnnnnnnnnnnnnnnnnnnnnnnnnnnnnnnnnnnnnnnnnnnnnnnnnnnnnnnnnnnnnnnnnnnnnnnnnnnnnnnnnnnnnnnnnnnnnnnnnnnnnnnnnnnnnnnnnnnnnnnnnnnnncaggtttgaatattggcagcggtgcaaaggagacaaagacagctaacaaaattgcgtcggaagctaattgtcatctagtgaagnnnnnnnnnnnnnnnnnnnnnnnnnnnnnnnnnnnnnnnnnnnnnnnnnnnnnnnnnnnnnnnnnnnnnnnnnnnnnnnnnnnnnnnnnnnnnnnnnnnnnnnnnnnnnnnnnnnnnnnnnnnnnnnnnnnnnnnnnnnnnnnnnnnnnnnnnnnnnnnnnnnnnnnnnnnnnnnnnnnnnnnnnnnnnnnnnnnnnnnnnnnnnnnnnnnnnnnnnnnnnnnnnnnnnnnnnnnnnnnnnnnnnnnnnnnnnnnnnnnnnnnnnnnnnnnnnnnnnnnnnnnnnnnnnnnnnnnnnnnnnnnnnnnnnnnnnnnnnnnnnnnnnnnnnnnnnnnnnnnnnnnnnnnnnnnnnnnnnnnnnnnnnnnnnnnnnnnnnnnnnnnnnnnnnnnnnnnnnnnnnnnnnnnnnnnnnnnnnnnnnnnnnnnnnnnnnnnnnnnnnnnnnnnnnaccaagtatttaggctagattattctttcctttttaatactttcttgcttattttccataaagaacaaaatttatctcttcacatttgtcaaactgtagcactcacttcttgtaagttttttgaccagtgctaagagagttgtgtgccgaatttgtcattaacataaaatactaatcacagtagcttcaggtcacttagaatttatagatgggaatatcagccgtcatctgatgaaataccttgctcttttgttttgagctaaatattgtttaaaatggcatagcaactttccttttggaacagcattgctcagtaaaaagatgtccttcagatgattatattacatttgaattaactgcttgtttgtgatgaaattttagaacaggaactttacatttctagtataacatacaatgttccataagagaaaatgatttgagccaggaatgtcgaattttttaaataaaaaaatcctatttttattcatattttataaaacaatacagtgtttttagaacctggagtatatattaaaatgagactgaatttctaaaattatgggttttagaaacttgacaagttcagttttagggagataactcatttaattatcagaagttattatttttagtgcctgagttttcatccatatttttgannnnnnnnnnnnnnnnnnnnnnnnnnnnnnnnnnnnnnnnnnnnnnnnnnnnnnnnnnnnnnnnnnnnnnnnnnnnnnnnnnnnnnnnnnnnnnnnnnnnnnnnnnnnnnnnnnnnnnnnnnnnnnnnnnnnnnnnnnnnnnnnnnnnnnnnnnnnnnnnnnnnnnnnnnnnnnnnnnnnnnnnnnnnnnnnnnnnnnnnnnnnnnnnntctttgggaaatgtttaaagacattaagaaagcaattggattttgtagaacatttctcagcctaataatttcacatcttgactatatttcactaaactaaaatcaaactgtttttcctccttcaaattgaggcagaggccttttgttattaatatttctgtatgaaatgaatttcctaataaattacaagtaatctcatcatccgctttaagaaaacaannnnnnnnnnacacaaaaaggccttcaaggaactcttggttctaggcacttgataataatccagtgatgaaaaggtctgggcccagagtgcgtaggcttggcgtgctgtttgtcacagtttggttcttgtgctgggtttggtgttg

SEQ ID NO: 28835 - DNA, 388 bp, Macaca Mulatta
ccctctctgaatctctgtatatttgattcttaactaaaattgttctcttaaataatctgaatcctggtaattaaaagtttgggtatattttctttacctccaagggaagaactaccagctacaaaaaatattttggaataagcactgttttggtataaggtacatattttggttgaagacaccagactgaagtaaacagctgtgcatccaatttattatagttttgtaagtaacaatatgtaatcaaacttccaggtgacttgagtggaacctcctacatccttatttatcaccatttatgacagtaaacatttcagtgtattgtttattataccacttatatcaacttatttttcaccaggttaaaattttaatttctacaaaatag

SEQ ID NO: 28836 - DNA, 1418 bp, Macaca Mulatta
  misc_feature (1)...(1418): n = A,T,C or G
cccctgccaccagcccactgagggggtgggcttactccctgggtagacttgggggccagagctgactctgggggccagtccatatatagtggctgggctgcttttttcagtagcccctagcattgtctgggattcccgtccctgagtgcgcctccacctatcttccgatgcttcctggctgcggtggagtgggaacctcagtttcccccgaagtcttccctggatgctggcttcaggttgaagtccctggttcttccagttcctcacgggttagataggggctcctgcatcaccttcagaatccagttccaacccccaccctcaggccttgtgccctgctctgccctgccaggctgcccttgtccatgtgagtagcatgggcgggaggtggggacgacagtggtgatgaagggggtgcaccacaggcctcatatggagcagttcccacaggggcgtgtggcgggggcctggccaccacagagcacatggctgtgtctaggcgcaagcactttagcagtatctgtttacatgcgcaaggatcnnnnnnnnnnnnnnnnnnnnnnnnnnnnnnnnnnnnnnnnnnnnnnnnnnnnnnnnnnnnnnnnnnnnnnnnnnnnnnnnnnnnnnnnnnnnnnnnnnnnnnnnnnnnnnnnnnnnnnnnnnnnnnnnnnnnnnnnnnnnnnnnnnnnnnnnnnnnnnnnnnnnnnnnnnnnnnnnnnnnnnnnnnnnnnnnnnnnnnnnnnnnnnnnnnnnnnnnnnnnnnnnnnnnnnnnnnnnnnnnnnnnnnnnnnnnnnnnnnnnnnnnnnnnnnnnnnnnnnnnnnnnnnnnnnnnnnnnnnnnnnnnnnnnnnnnnnnnnnnnnnnnnnnnnnnnnnnnnnnnnnnnnnnnnnnnnnnnnnnnnnnnnnnnnnnnnnnnnnnnnnnnnnnnnnnnnnnnnnnnnnnnnnnnnnnnnnnnnnnnnnnnnnnnnnnnnnnnnnnnnnnnnnnnnnnnnnnnnnnnnnnnnnnnngctgggggccccaagacctgcagcgtggagtccggggcagagcccggagcggcgtgcnnnnnnnnnnnnnnnnnnnnnnnnnnnnnnnnntggctttctccctgtctggattcagagatacacgttggtgctacacagctagaatagatatatttagagagagagatatttttaagacaaaacccacaattagctgtcctttaacgccgcagaaccccctcccagaagaagagcgatccctcggacggtccgggcgggcaccctcagccggggttttttgcagaagcagcaccaatgactgtagacaaaaacttcagatgcctacatatacggctatatactattttactgttcctcagatttagtacttgtaaataaacacacacattaaggagagattaaacattt

SEQ ID NO: 28837 - DNA, 1101 bp, Macaca Mulatta
  misc_feature (1)...(1101): n = A,T,C or G
agattctgattctggatctgactcagattctgatcaagagaatgctgcctctggcagtaatgcctctggaagtgaaagtgatcaggatgaaagaggtgattcaggacaaccaagtaataaggaactgtttggagatgacagtgaggacgagggagcttcacatcacagtggtagtgataatcactctgaaagatcagacaatagatcagaagcctctgagcgttccgaccatgaggacaatgacccctcggatgtagatcagcacagtggatcagaagcccctaatgatgacgaagacgaaggtcacagatctgatggagggagccatcactcagaagcagaaggctctgaaaaagcacattcagatgatgaaaaatggggcagagaagataaaagtgaccagtcagatgatgaaaagatacaaaattctgatgatgaggagagggcacaaggatctgatgaagataagctgcagaattctgacgacgatgagaaaatgcagaacacagatgatgaggagaggcctcagctttccgatgatgagagacagcagctatctgaggaggaaaaggctaattctgaaaggaacggccagtagcttctgataatgatgatgagaaacagagttctgatgatgaagaacaaccacagctgtctgannnnnnnnnnnnnnnnnnnnnnnnnnnnnnnnnnnnnnnnnnnnnnnnnnnnnnnnnnnnnnnnnnnnnnnnnnnnnnnnnnnnnnnnnnnnnnnnnnnnnnnnnnnnnnnnnnnnnnnnnnnnnnnnnnnnnnnnnnnnnnnnnnnnnnnnnnnnnnnnnnnnnnnnnnnnnnnnnnnnnnnnnnnnnnnnnnnnnnnaagataatggtggaaccatggatctatttggaggtgcagatgatatctcttcagggagtgatggagaagacaaaccacctactccaggacagcctgttatgaaaatggattgcctcaggatcaacaggaagaggagccaattcctgagaccagaatagaagtagaaatacccaaagtaaacactgatttaggaaacgacttatattttgttaaattgcccaactttctcagtgtagagcccag

SEQ ID NO: 28838 - DNA, 587 bp, Macaca Mulatta
  misc_feature (1)...(587): n = A,T,C or G
acttggttactgtcctcgtgtgtactgtgagaaccagccaatgcttcccatcggcctttcagacatcccaggtgaagccatggtgaagctctactgccccaagtgcatggatgtgtacacacccaagtcatcgagacaccatcacacggatggcgcctactttggcactggtttccctcacatgctcttcatggtgcatcccgagtaccggcccaagagacccgccaaccagtttgtgcccaggctctacggtttcaagattcatccaatggcctaccagctgcagctccaagccgccagcaacttcaagagcccagtcaagacgattcgctgattccctaccccacctgtcctgcacttcctttcctttttgccaccctttcaggaaccctgtatggtttttagtttaaattaaaggagtcattattgtggtgggaatatgaaataaagtggaagaaaannnnnnnnnnnnnnnnnnnnnnnnnnnnnnnnnnnnnnnnnnnnnnnnnnnnnnnnnnnnnnnnnnnnnnnnnnnnnnnnnnnnnnnnnnnnnnnnnnnnnnnnnnnnnnnnnnnnnnnnnnntggc

SEQ ID NO: 28839 - DNA, 843 bp, Macaca Mulatta
ggggcagttcggcggtcctgcgggtctgtctcttgcttcaacagtgtttggacggaacagatccggggactctttcttccagcctccgagcgccctccgatttcctctccacttgcaacctccgggaccatcttctcggccatctcctgcttctgggacctgccagcaccgtttttgtggttagctccgtcttgccgaccaaccatgagctcccagattcgtcagaattattccaccgacgtggaggcagccgtcaacagcctggtcaatatgtacctgcaggcctcctacacctacatctctctgggcttctatttcgaccgcgatgatgtggctctggaaggcgtgagccacttcttcagcgaattggccgaggagaagcgcgagggctacgagcgtctcctgaagatgcaaaaccagcgtggcggccgcgctctttttcaggacgtcaagaagccagctgaagatgagtgggggtaaaaccccggatgccatgaaaagccgccatggcccttggagaaaaaactgaatcaagccttttttggatcttcatgcccctggggttctgcccacaacggattccccaatctcttgtgaactttcctgggagaactcactttcccttagattagaggaaagttgtaatcttcaattcgttaaagattggggtgtgaaccaagcttggaggtatacacatcttaataataggtctttggggccgggggccccgagaaagagccttggggggctcatgagaggacataaataatattttcttcatcgcaaaaaaggggggttcaccctgtcctccaatggtcaccggaaaaatttaaataagatccc

SEQ ID NO: 28840 - DNA, 680 bp, Macaca Mulatta
taaggagaagaaagagaggacaactgatcgacgtacagaacctcctaactacacagtctccttccttgaggtctttggcagttcccacaacaatagaggagctggaagatgaagaggagagagaccaaaggcagatgataaaggaagcttttgctggggatgatgtcatcagaaatttcttgaaagagaagagagaagctgtggaggcgagtacgccaaaggacgtggacctgacactacctggctggggcgagtggggtggtgtgggcctaaagcctagtaccaagaaaagacgccagtttctcaaagcccctgagggtcctccaagaaaagataagaatttgccaaatgtgattatcagtgagaagcgcaacatccacgcagcagctcatcaggtacaagtgcttccatatccatttacccaccatcggcaatttgaaaggaccatccagacccctgtaggatccacatggaacacccagagggctttccaaaagctgactactcccaaggtcatcaccaagccaggtcatatcattaagcccataaaagcagaggatgtgggctaccggtcttcctcaaggtcagacctgtctgtcatacagtggaatccaaaacaaatcaccacacgtcacagtaaagagttgaagacaaactctgtaggttgagtagctggaaaa

SEQ ID NO: 28841 - DNA, 378 bp, Macaca Mulatta
gacaagttttagcagttgaaaaatatgctctatgtatatttcagagtgattctgagaatgaaataaggtaatgtagtgaaagtactttgcaaactaagtgctggtcaaatgtagttacatatgtgtatttaactgtttaaagtgctggtaagacaaacactgaagaaaggtaattgcaaaggtcaacttattaagtacatttttactcatctagaagacgttacttgtctttaaacttgctttttatccttgatatcattttccattagctgtaatatacaaataacataaaaatatcttaaaggtgtttttatttaacatttaaatgtttattttgataacttgtgattatagtaattatatatttgtaaaattggt

SEQ ID NO: 28842 - DNA, 117 bp, Macaca Mulatta
caactttaataacagacccatcctttctcgtcggaataccgtctggctgtgctacgaagtgaaaacaaggggcccctcaatgcccacttgggacacaaagatctttcgaggccaggt

SEQ ID NO: 28843 - DNA, 3846 bp, Macaca Mulatta
  misc_feature (1)...(3846): n = A,T,C or G
tgctcttcctcatgttggcacccccggccacggaggccaccgtccccatgtcccagactgaggccgacctggcgctgcggcccccgccgcctcttgccaccgcggggcagccccgcctcgggccccctcctcgccgagcgcgccgcttctccgggaaggctgagcctcggccgcgctcttctcgtgtcagccgccgtagctcagtcgacttggggctgctgagctcttggtccctgccaccctcacccgctccggaaccccccgatcctccggactcctctggtcctggccccgcaaggagcccaccgcctagctccaaagaaacctccgagggcacgtggaccaagggagcccctgtgaaggctgcagaagactccgcgcgtcccaagcttccggactctgcagtggacccggggtccagggagccgctgagggtccctgaagctgtggccctagagcggcggcgggagcaggaagaaaaggaggacatggagacccaggctgtggcaacgtcccccgatggccgatacctcaagtttgacatcgagataggacgtggctccttcaagacggnnnnnnnnnnnnnnnnnnnnnnnnnnnnnnnnnnnnnnnnnnnnnnnnnnnnagactcggaaactatctagagctgagcggcagcgcttctcagaggaggtggagatgctcaaggggctgcagcaccccaacatcgtccgcttctacgattcgtggaagtcagtgctgaggggccaggtttgcatcgtgttggtcaccgaactcatgacctcgggcacacttaagacgtnnnnnnnnnnnnnnnnnnnnnnnnnnnnnnnnnnnnnnnnnnnnnnnnnnnnnnnnnnnnnnnnnnnnnnnnnnnnnnnnnnnnnnnnnnnnnnnnnnnnnnnnnnnnnnnnnnnnnnnnnnnnnnnnnnnnnnnnnnnnnnnnnnnnnnnnnnnnnnnnnnnnnnnnnnnnnnnnnnnnnnnnnnnnnnnnnnnnnnnnnnnnnnnnnnnnnnnnnngggaccccggaattcatggcccccgagatgtacgaggaaaagtacgatgaggccgtggacgtgtacgcgttcggcatgtgcatgctggagatggccacctctgagtacccgtactccgagtgccagaatgccgcgcaaatctaccgcaaggtcacttcgnnnnnnnnnnnnnnnnnnnnnnnnnnnnnnnnnnnnnnnnnnnnnnnnnnnnnnnnnnnnnnnnnnnnnnnnnnnnnnnnnnnnnnnnnnnnnnnnnnnnnnnnnnnnnnnnnnnnnnnnnnnnnnnnnnnnnnnnnnnnnnnnnnnnnnnnnnnnnnnnnnnnnnnnnnnnnnnnnnnnnnnnnnnnnnnnnnnnnnnnnnnnnnnnnnnnnnnnnnnnnnnnnnnnnnnnnnnnnnnnnnnnnnnnnnnnnnnnnnnnnnnnnnnnnnnnnnnnnnnnnnnnnnnnnnnnnnnnnnnnnnnnnnnnnnnnnnnnnnnnnnnnnnnnnnnnnnnnnnnnnnnnnnnnnnnnnnnnnnnnnnnnnnnnnnnnnnnnnnnnnnnnnnnnnnnnnnnnnnnnnnnnnnnnnnnnnnnnnnnnnnnnnnnnnnnnnnnnnnnnnnnnnnnnnnnnnnnnnnnnnnnnnnnnnnnnnnnnnnnnnnnnnnnnnnnnnnnnnnnnnnnnnnnnnnnnnnnnnnnnnnnnnnnnnnnnnnnnnnnnnnnnnnnnnnnnnnnnnnnnnnnnnnnnnnnnnnnnnnnnnnnnnnnnnnnnnnnnnnnnnnnnnnnnnnnnnnnnnnnnnnnnnnnnnnnnnnnnnnnnnnnnnnnnnnnnnnnnnnnnnnnnnnnnnnnnnnnnnnnnnnnnnnnnnnnnnnnnnnnnnnnnnnnnnnnnnnnnnnnnnnnnnnnnnnnnnnnnnnnnnnnnnnnnnagctatgcctcagatgcagcttcaggccttagcgatgtgggagaagggatgggacaaatgaggagacccccagggaggaatctccggcgcagaccccgatcccggctgcgggtcactagtgtngtctcagaccagaatgacagagtggttgagtgccagctacagacccataacagcaagatggtgaccttccgatttgatctggatggggacagcccggaagagnnnnnnnnnnnnnnnnnnnnnnnnnnnnnnnnnnnnnnnnnnnnnnnnnnnnnnnnnnnnnnnnnnnnnnnnnnnnnnnnnnnnnnnnnnnnnnnnnnnnnnnnnnnnnnnnnnnnnnnnnnnnnnnnnnnnnnnnnnnnnnnnnnnnnnnaggaggagccagcaccattacctcccttgaccatccccctcccagacccatccaatgnagagctccagagcagcaactccctggagcacaggagctgggcagccttctccacctcatcttctcctggaactcctttgtctcctggaaacccattttcccctggaacccccattttcccaggtcccatcttccccatcgcttctcccccatgtcatcctagcccttccccattctcccccatttcttcccaggtctcctcaaatccctctccacaccccaccagctctccacttccattctcctccagcacacctgagtttccagtcccactctctcagtttccccggagttctctccccatgacttctccacctacattctctcccacttgttctcaggtcactcttagtccccctttctttcctccatgcccctccacttcttccctcccctccaccacagcagcccctctcctctctctggctagtgcattctcactggctgtgatgactgtggcccagtccctgctgtccccctcacccgggctcctttcccannnnnnnnnnnnnnnnnnnnnnnnnnnnnnnnnnnnnnnnnnnnnnnnnnnnnnnnnnnnngtggccaggagagtccttcaccccacacagctnnnnnnnnnnnnnnnnnnnnnnnnnnnnnnnnnnnnnnnnnnnnnnnnnnnnnnnnnnnnnnnnnnnnnnnnnngagggaaagccgcagcttgttgggcgtttccaagtgacttcatccaaggaaccagctgagcctcttcccctgcagccaacatcccccactctctccggttctccgaaaccttcaacccctcagcttacttcagagagctcagacacagaggacagtgctggagccgggccagagaccagggaagctctggctgagagcgaccgtgcagctgagggtctgggggctggagttgaggaggaaggagatgatgggaaggaaccccaagttgggggcagccccccacccctgagccatcccagcccagtgtggatgaactactcctacaacagcctgtgtctgagcagcgaggagtcannnnnnnnnnnnnnnnnnnnnnnnnnnnnnnnnnnnnnnnnnnnnnnnnnnnnnnnnnnnnnnnnnnnnnnnnnnnnnnnnnnnnnnnnnnnnnnnnnnnnnnnnnnnnnnnnnnnnnnnnnnnnnnnnnnnnnnnnnnnnnnnnnnnnnnnnnnnnnnnnnnnnnnnnnnnnnnnnnnnnnnnnnnnnnnnnnnnnnnnnnnnnnnnnnnnnnnnnnnnnnnnnnnnnnnnnnnnnnnnnnnnnnnnnnnnnnnnnnnnnnnnnnnnnnnnnnnnnnnnnnnnnnnnnnnnnnnnnnnnnnnnnnnnnnnnnnnnnnnnnnnnnnnnnnnnnnnnnnnnnnnnnnnnnnnnngtgaattcagaacagaagccatgtatctcccccacaccagggcccaccatggagcttgtgttctcagaatctgatgcttttctgaccaacacaactgagcaaggaagatccc

SEQ ID NO: 28844 - DNA, 189 bp, Macaca Mulatta
gaactggactcagaggatgccccgccatgctgccgtctggccttgggagagccccctccctatggcgctgcacctatcggtattccccgacctccaccccctcgacctggcatgcattcgccaccgccgcgcccagccccctcacctggtacctgggagagccagcccgcccggtcggtgaggctggga

SEQ ID NO: 28845 - DNA, 1522 bp, Macaca Mulatta
  misc_feature (1)...(1522): n = A,T,C or G
gcccgagtctgtggcttcgtccccacagttcagcgatccttacctgtacgtctggaacgccactggcaacagactgttgcaccgagtggaaggggtgaggctgaaaacacgacccgctcaatgcacagattttgtaaacatcaaaaaacaacttgagatgttggcaagaatgaaagtcacccactaccggtttgctctggattgggcctcggtccttcccactggcaacctgtccgcggtgaaccgacaggccctgaggtactacagatgcgtggtcagtgaggggctgaagcttggcatctccgcgatggtcaccctgtactatccgaaccacgcccannnnnnnnnnnnnnnnnnnnnnnnnnnnnnnnnnnnnnnnnnnnnnnnnnnnnnnnnnnnnnnnnnnnnnnnnnnnnnnnnnnnnnnnnnnnnnnnnnnnnnnnnnnnnnnnnnnnnnnnnnnnnnnnnnnnnnnnnnnnnnnnnnnnnnnnnnnnnnnnnnnnnnnnnnnnnnnnnnnnnnnnnnnnnnnnnnnnnnnnnnnnnnnnnnnnnnnnnnnnnnnnnnnnnnnnnnnnnnnnnnnnnnnnnnnnnnnnnnnnnnnnnnnnnnnnnnnnnnnnnnnnnnnnnnnnnnnnnnnnnnnnnnnnnnnnnnnnnnnnnnnnnnnnnnnnnnnnnnnnnnnnnnnnnnnnnnnnnnnnnnnnnnnnnnnnnnnnnnnnnnnnnnnnnnnnnnnnnnnnnnnnnnnnnnnnnnnnnnnnnnnnnnnnnnnnnnnnnnnnnnnnnnnnnnnnnnnnnnnnnnnnnnnnnnnnnnnnnnnnnnnnnnnnnnnnnnnnnnnnnnggcacggtcgacttctgcgcgctcaaccacttcaccactaggttcgtgatgcacgagcagctggccggcagccgctacgactcggacagggacatccagtttctgcaggacatcacccggctgagctcccctacgcgcctggctgtgattccctggggggtgcgcaagttactgcggtgggtccggaggaactatggcgacatggacatttacatcacggccagcggcattgacgaccaggctctggaggatgaccggctccggaagtactacctggaaaagtaccttcaggaggtgctgaaannnnnnnnnnnnnnnnnnnnnnnnnnnnnnnnnnnnnnnnnnnnnnnnnnnnnnnnnnnnnnnnnnnnnnnnnnnnnnnnnnnnnnnnnnnnnnnnnnnnnnnnnnnnnnnnnnnnnnnnnnnnnnacaaaatgatcagcagcagtggcttcccttctgagaacagtagttctagatgcagtcagacccaaaaaaacacagagtgcactgtctgtttattccttgtgcagaagaacccactgatattcttgggttgttgcttcttctccaccctggttctactcttatcaatcacctatttttcataggcaaaagagaagaaagttttggaaagcgaaaaaacttgcaacatataccattaaagaaaggcaagagagt

SEQ ID NO: 28846 - DNA, 597 bp, Macaca Mulatta
gcccaggccaacaactgcctgaccttcacctttggccactgccaccgcaacctcaaccactttgagacctatgaggcctgcatgctggcctgcatgagtgggccgctggccgcgtgcagcctgcccgccctgcaggggccctgcaaagcctacgcgcctcgctgggcttacaacagccagacgggccagtgccagtcctttgtctatggtggctgcgagggcaatggcaacaactttgagagccgtgaggcctgtgaggagtcgtgccccttccctagagggaaccagcgctgtcgggcctgcaagcctaggcagaagctcgttaccagcttctgtcgcagcgactttgtcatcctgggccgagtctctgagctgaccgaggagcctgactcgggccgcgccctggtgactgtggacgaagtcttaaaggatgagaaaatgggcctcaagttcctgggccgggagccgttggaggttactctgctccacgtggactgggcatgcccctgccctaacgtgaccgtgagcgagacaccactcatcatcatgggggaggtggacggcggcatggccatgctgcgccctgatagctttgtg

SEQ ID NO: 28847 - DNA, 492 bp, Macaca Mulatta
aaggattggagcacagaggctcagaagcaagtccagctctcccggggctgaaactgagtgcagatcagctggccctggtctacagcacgctggggctctgcctgtgtgccgtcctctgctgcttcctggtgacagtggcctgcttcctcaagaagaggggggatccctgctcctgccagccccgctcaaggtcctgtcaaaatccggccaagtcttcccaggatcacgcgatggaagctggcagccctgtgggcacatcccctgagccagtggagacctgcagcttctgcttccccgagtgcagggcgcccacccaggagagtgcagtcatgcctgggacccccgaccccacttgtgctggaaggtgggggtgccacaccaggaccacagtcctgcagccttgcccccacatcccagacagtggtcttggcattgtgtgtgtgcctgcccaggaagggggcccaggtgcataaatgggggtcagggagggaa

SEQ ID NO: 28848 - DNA, 3106 bp, Macaca Mulatta
  misc_feature (1)...(3106): n = A,T,C or G
cgcgggggcatccgctgggtccccgcgccgtcattcagaccggagacccggacgcagccgagagaggtaccgccgcccgccccgtccagtcgccgcgcgcagnnnnnnnnnnnnnnnnnnnnnnnnnnnnnnnnnnnnnnnnnnnnnnnnnnnnnnnnnnnnnnnnnnnnnnnnnnnnnnnnnnnnnnnnnnnnnnnnnnnnnnnnnnnnnnnnnnnnnnnnnnnnnnnnnnnnnnnnnnnnnnnnnnnnnnnnnnnnnnnnnnnnnnnnnnnnnnnnnnnnnnnnnnnnnnnnnnnnnnnnnnnnnnnnnnnnnnnnnnnnnnnnnnnnnnnnnnnnnnnnnnnnnnnnnnnnnnnnnnnnnnnnnnnnnnnnnnnnnnnnnnnnnnnnnnnnnnnnnnnnnnnnnnnnnnnnnnnnnnnnnnnnnnnnnnnnnnnnnnnnnnnnnnnnnnnnnnnnnnnnnnnnnnnnnnnnnnnnnnnnnnnnnnnnnnnnnnnnnnnnnnnnnnnnnnnnnnnnnnnnnnnnnnnnnnnnnnnnnnnnnnnnnnnnnnnnnnnnnnnnnnnnnnnnnnnnnnnnnnnnnnnnnnnnnnnnnnnnnnnnnnnnnnnnnnnnnnnnnnnnnnnnnnnnnnnnnnnnnnnnnnnnnnnnnnnnnnnnnnnnnnnnnnnnnnnnnnnnnnnnnnnnnnnnnnnnnnnnnnnnnnnnnnnnnnnnnnnnnnnnnnnnnnnnnnnnnnnnnnnnnnnnnnnnnnnnnnnnnnnnnnnnnnnnnnnnnnnnnnnnnnnnnnnnnnnnnnnnnnnnnnnnnnnnnnnnnnnnnnnnnnnnnnnnnnnnnnnnnnnnnnnnnnnnnnnnnnnnnnnnnnnnnnnnnnnnnnnnnnnnnnnnnnnnnnnnnnnnnnnnnnnnnnnnnnnnnnnnnnnnnnnnnnnnnnnnnnnnnnnnnnnnnnnnnnnnnnnnnnnnnnnnnnnnnnnnnnnnnnnnnnnnnnnnnnnnnnnnnnnnnnnnnnnnnnnnnnnnnnnnnnnnnnnnnnnnnnnnnnnnnnnnnnnnnnnnnnnnnnnnnnnnnnnnnnnnnnnnnnnnnnnnnnnnnnnnnnnnnnnnnnnnnnnnnnnnnnnnnnnnnnnnnnnnnnnnnnnnnnnnnnnnnnnnnnnnnnnnnnnnnnnnnnnnnnnnnnnnnnnnnnnnnnnnnnnnnnnnnnnnnnnnnnnnnnnnnnnnnnnnnnnnnnnnnnnnnnnnnnnnnnnnnnnnnnnnnnnnnnnnnnnnnnnnnnnnnnnnnnnnnnnnnnnnnnnnnnnnnnnnnnnnnnnnnnnnnnnnnnnnnnnnnnnnnnnnnnnnnnnnnnnnnnnnnnnnnnnnnnnnnnnnnnnnnnnnnnnnnnnnnnnnnnnnnnnnnnnnnnnnnnnnnnnnnnnnnnnnnnnnnnnnnnnnnnnnnnnnnnnnnnnnnnnnnnnnnnnnnnnnnnnnnnnnnnnnnnnnnnnnnnnnnnnnnnnnnnnnnnnnnnnnnnnnnnnnnnnnnnnnnnnnnnnnnnnnnnnnnnnnnnnnnnnnnnnnnnnnnnnnnnnnnnnnnnnnnnnnnnnnnnnnnnnnnnnnnnnnnnnnnnnnnnnnnnnnnnnnnnnnnnnnnnnnnnnnnnnnnnnnnnnnnnnnnnnnnnnnnnnnnnnnnnnnnnnnnnnnnnnnnnnnnnnnnnnnnnnnnnnnnnnnnnnnnnnnnnnnnnnnnnnnnnnnnnnnnnnnnnnnnnnnnnnnnnnnnnnnnnnnnnnnnnnnnnnnnnnnnnnnnnnnnnnnnnnnnnnnnnnnnnnnnnnnnnnnnnnnnnnnnnnnnnnnnnnnnnnnnnnnnnnnnnnnnnnnnnnnnnnnnnnnnnnnnnnnnnnnnnnnnnnnnnnnnnnnnnnnnnnnnnnnnnnnnnnnnnnnnnnnnnnnnnnnnnnnnnnnnnccatgactggcggctgcgctgccactccgccctcccagggggaccaggtgcagctgaccttgaagccaccagcacagtgaaccccgtgtggcacagaacccccagttttcccctctcatcccacagtcccttctctcaaggtctggtgtatgcaaattgtatggaaaaagggctatgttaatataagaatacaagaacttaggaagagtgaggttggtgtgtcgctggtcaacttttgtgctcccagatgccatcacagtttggcagttgtggaaggcctcctggaggaggagatgagtaaannnnnnnnnnnnnnnnnnnnnnnnnnnnnnnnnnnnnnnnnnnnnnnnnnnnnnnnnnnnnnnnnnnnnnnnnnnnnnnnnnnnnnnnnnnnnnnnnnnnnnnnnnnnnnnagacagggtctcgctgtgtcacccaggctggagtgcagtattgcaatcgtggctcactgcagcttccacctcctgggctccagagatccacatcagcctcccgagtagctgggaccacaaatgtgcgccaccatgcctggctaatttttgtactttttgtagagacggagtctcactatgtttcccaggctgatcttgaactcctgggctcaagagatcctcctgcctcggcctcccaaagtgcttggattagagatgtgagccaccatgtctggccagataaattaagtcaaacatttggtttccagaaaataaagacaaatagagtaggttagannnnnnnnnnncaacaagtggataaaagtctgtgactcagggagaaagtggaaggagaaatacagaggatatagaatcattatgtttgtaaagcccctggtcatacaggnnnnnnnnnnnnnnnnnnnnnnnnnnnnnnnnnnnnnnnnnnnnnnnnnnnnnnnnnnnnnnnnnnngaagagggagaatgtcagaactcaagcgatttgcaatcagggcagactgcctggaggagtgatgcaggcttgtttgggaagaaggtttgggacaagannnnnnntatttattcattcattcaacagaggtttatgtagcacactgtgctgggtggggctgggatacagcaatgactgaggcagcctggccttgccttcacagggctcaccatacacaagtaaataaaaaatatgtaatgtt

SEQ ID NO: 28849 - DNA, 245 bp, Macaca Mulatta
gtagtgatcaggctgggacttgctgtcgagtgtggatgagaaattgagtcttcacccaggggatagaagtggagaaggagagggcatcgagatggtgtattttaagcaaaaactaattaacacttttccccaaaaaagctgggctaattaaattattaccaaccatatcctataaagaattcatcttagcatctgcttgctaagaagtgtatgattttccccagtttcaataaatccagtggcaa

SEQ ID NO: 28850 - DNA, 620 bp, Macaca Mulatta
gggcattacggccttcatcttgatgccactaagctgctacttcaagctttggtcatcaatagctctgagcctctgacctttttgagcctgggaaatgcttaccttgctctgaagaatatcagtggagcacttgaggcctttagacaggccttgaaattaaccaccaaatgcccagagtgtgaaaacagcctgaagttgatccgctgtatgcagttttatccttttctgtacaacatcacttcttctgtttgcagtggtaattgtcatgaaaaaaccctggacaacagccatgacaaacagaaatattttgacaactcacagtcactggatgctgctgaagaagagccctctgagagaggaacagaggaggaccctgtgttctctgttgagaattcagggagggactcagatgcccttagacttgaaagtacggtggttgaggagagcaatggctctgacgagatggagaactcagatgaaaccaaaatgtcagaagaaatactggctttggtggatgaatttcagcaggcatggcctttggaaggctttgggggtgcactggagatgaaagggcggcgtctagacttacaaggaatacgggtgctgaagaaagtccccag

SEQ ID NO: 28851 - DNA, 327 bp, Macaca Mulatta
  misc_feature (1)...(327): n = A,T,C or G
aagaaaaacaaggacttcctgggaggctgtggatcaattaccaatggacatccagaagcaaattcataagactcacaattcaaagaaccaatttttaacaannnnnnnnnnnnnnnnnnnnnnnnnnnnnnnnnnnnnnnnnnnnnnnnnnnnnnnnnnnnnnnnnnnnnnnnnnnnnnnnnnnnnnnnnnnnnnnnnnnnnnnnnnnggaactgcagacgctgcagataaaacagagccagaatgctttgctgccagctggaactttgacccaaaccccagtgcgacagtctccagtgctcactcaactggaatgcatcaatgaag

SEQ ID NO: 28852 - DNA, 1035 bp, Macaca Mulatta
atggccaattacacgctggcaccagaggatgaatatgatgtcctcatagaaggtgaactggagagcgacgaggcagagcaatgtgacaggtatgatacctgggcgctctcagcccagctggtgccgtcgctctgctctgctgtgttcgtggtcggtgtcctggacaatctcctggttgtgcttatcctggtaaaatataaaggactcaaacgcgtggaaaatatctatcttctaaacttggcagtttctaacttgtgtttcttgcttaccctgcccttctgggctcacgctggtggcgatcccatgtgtaaaattctcattggactgtactttgtaggcctgtacagtgagacatttttcaattgccttctgaccctgcaaaggtacctagtgtttttgcacaagggaaactttttctcagtcaggaggagggtgccctgtggcatcgtcacaagtgccgtggcgtgggtaacagccattctggccactgtgcccgaatttgcggtttataaacctcagatggaagacccgaaatacaagtgtgcatttagcagaactcccttcctgccagctgatgagacattctggaagcattttctgactttaaaaatgaatgtttcggttcttgtctttcccctatttatttttacatttctctatgtgcaaatgagaaaaacactaaggttcggggagcagaggtatagccttttcaagcttgtttttgccataatggtagtcttccttctgatgtgggcgccctacaatatcgcacttttcctgtccactttcaaagaacatttctccctgagtgactgcaagagcaactacaacctggacaaaagtgttctcatcactaaactcatcgccaccacccactgctgcgtcaaccctctcctgtatgtctttcttgatgggacatttaggaaatacctctgccgttttttccatcggcgtagtaacaccccacgtcaacccaggcggcggtttgcacaaggcacatcgagggaagaacctgaccgttccaccgaagtgtaa

SEQ ID NO: 28853 - DNA, 587 bp, Macaca Mulatta
aagatcttttcttgctttggattgggatcctgatttgaaaaaacgatattttgatgaaaatgctgctgaggactttgaaaaacatgaaagtgtggagtataaacctcctaaaaaaccctttgtgaaattaaaagattgcattgaactttttacaacaaaagaaaagctaggtgctgaagatccctggtattgtccgaattgtaaagaacatcagcaagccacaaagaaattggatttatggtccttgcctccagtacttgtagtacatctcaagcgattttcttacagtcgatacatgagagacaagttggataccttagttgatttccctatcaatgacttggatatgtcggaattcttaattaatccaaatgcaggtccttgccgctataatttgattgctgtttccaaccactatggagggatgggaggaggacactatactgcttttgcaaaaaataaagatgatggaaaatggtactattttgatgacagtagtgtctccactgcatctgaagaccaaattgtgtccaaagcagcatatgtactcttctaccagagacaagacactttcagtggaactggct

SEQ ID NO: 28854 - DNA, 203 bp, Macaca Mulatta
gtgcagccaggataccctgcccaccggcgcatcgtagaggccttcggcactgaggtcttgctggagaacggcgacataaatcgcaaggtcctgggggatctgatctttaaccaacctgaccggcggcagctgctcaacgccatcacccaccctgagatccgcaaggagatgatgaaggagaccttcaagtacttcctccgggg

SEQ ID NO: 28855 - DNA, 911 bp, Macaca Mulatta
tctgagttttgtatctatacaatggtatgtggcttccattttcttctgagttctcttccatgtcctcagtcccctcctgcttccagtgtcgagtgtgtcctgtgacttgagctccttcctcatgccgggccctgtccttctctccccacgccctctgcaggtgcccctcccagggtacatcgaggcctacccccgatcacggtacccacagagctctccctccaggcttcctcgccagtacagccagccagtcaacctgcaccccagcctggagcaggccccggcaccctccgcagcagcctcgcagcagagcctggcagaaaatgacccatcagacgctcccctgaccaacatctccactgcggccctcgtgaaggccatccgggaggaggtggccaagctggccaaaaaacagacagatatgtttgagttccaggtctaatgccttagcccatgggactctggacttctgaactctgaggacacagcctttgggtttcccatgcctacatgttaggacttgagacatagcaatgggtgagtctttctcaccctccgtttctgaaaaggtgaactatggggcttctgggaacaggaaactcttgaacgactagattcttggctcatccaacggactgtgggtcaagaagtccctgcttggggccttatgtttggtaatctctcacgtcaaatgtttgaactgtggccgtattccctatggaagcttagtcatgagaggcactagctaatctacagattcctatccaatgccacattttaatcaatcaccggaagcgggagaacttagctcttatcttcggtgacctctgcatgttaactctgtttctgcgttaaaggcaatgcaggagtgtggattaagcaccagactgtattctcagtcagccatgacc

SEQ ID NO: 28856 - DNA, 7388 bp, Macaca Mulatta
  misc_feature (1)...(7388): n = A,T,C or G
tcaggctgacattcttcatctgttcagttggtttcacatccccaatgctgtttgatgagaggaagtatccctaccacctcatgctgcanaaatttctctgctctggaggccacaatgctctttttgannnnnnnnnnnnnnnnnnnnnnnnnnnnnnnnnnnnnnnnnnnnnnnnnnnnnnnnnnnactcggacttgcctgatggcacaggagaattcctagatgcctggcttatgctggtggagaagatggtgaatcccaccacggtgcttgagtctccacattcactgcctgccaaattgcctggaggtgtccagaactttccccaattcagtgccctccgcttccttgtggtaactcagaaannnnnnnnnnnnnnnnnnnnnnnnnnnnnnnnnnnnnnnnnnnnnnnnnnnnnnnnnnnnnnnnnnnnnnnnnnnnnnnnnnnnnnnnnnnnnnnnnnnnnnnnnnnnnnnnnnnnnnnnnnnnnnnnnnnnnnnnnnnnnnnnnnnnnnnnnnnnnnnnnnnnnnnnnnnnnnnnnnnnnnnnnnnnnnnnnnnnnnnnnnnnnnnnnnnnnnnnnnnnnnnnnnnnnnnnnnnnnnnnnnnnnnnnnnnnnnnnnnnnnnnnnnnnnnnnnnnnnnnnnnnnnnnnnnnnnnnnnnnnnnnnnnnnnnnnnnnnnnnnnnnnnnnnnnnnnnnnnnnnnnnnnnnnnnnnnnnnnnnnnnnnnnnnnnnnnnnnnnnnnnnnnnnnnnnnnnnnnnnnnnnnnnnnnnnnnnnnnnnnnnnnnnnnnnnnnnnnnnnnnnnnnnnnnnnnnnnnnnnnnnnnnnnnnnnnnnnnnnnnnnnnnnnnnnnnnnnnnnnnnnnnnnnnnnnnnnnnnnnnnnnnnnnnnnnnnnnnnnnnnnnnnnnnnnnnnnnnnnnnnnnnnnnnnnnnnnnnnnnnnnnnnnnnnnnnnnnnnnnnnnnnnnnnnnnnnnnnnnnnnnnnnnnnnnnnnnnnnnnnnnnnnnnnnnnnnnnnnnnnnnnnnnnnnnnnnnnnnnnnnnnnnnnnnnnnnnnnnnnnnnnnnnnnnnnnnnnnnnnnnnnnnnnnnnnnnnnnnnnnnnnnnnnnnnnnnnnnnnnnnnnnnnnnnnnnnnnnnnnnnnnnnnnnnnnnnnnnnnnnnnnnnnnnnnnnnnnnnnnnnnnnnnnnnnnnnnnnnnnnnnnnnnnnnnnnnnnnnnnnnnnnnnnnnnnnnnnnnnnnnnnnnnnnnnnnnnnnnnnnnnnnnnnnnnnnnnnnnnnnnnnnnnnnnnnnnnnnnnnnnnnnnnnnnnnnnnnnnnnnnnnnnnnnnnnnnnnnnnnnnnnnnnnnnnnnnnnnnnnnnnnnnnnnnnnnnnnnnnnnnnnnnnnnnnnnnnnnnnnnnnnnnnnnnnnnnnnnnnnnnnnnnnnnnnnnnnnnnnnnnnnnnnnnnnnnnnnnnnnnnnnnnnnnnnnnnnnnnnnnnnnnnnnnnnnnnnnnnnnnnnnnnnnnnnnnnnnnnnnnnnnnnnnnnnnnnnnnnnnnnnnnnnnnnnnnnnnnnnnnnnnnnnnnnnnnnnnnnnnnnnnnnnnnnnnnnnnnnnnnnnnnnnnnnnnnnnnnnnnnnnnnnnnnnnnnnnnnnnnnnnnnnnnnnnnnnnnnnnnnnnnnnnnnnnnnnnnnnnnnnnnnnnnnnnnnnnnnnnnnnnnnnnnnnnnnnnnnnnnnnnnnnnnnnnnnnnnnnnnnnnnnnnnnnnnnnnnnnnnnnnnnnnnnnnnnnnnnnnnnnnnnnnnnnnnncctagagggtacaaacactgaaaaagagacaagcctggaggaaacaaaaatcggggagatcctgatccagggcttgacagaagatatggtgactgttttaatccgggcctgtgtgagcatgctgggagtccctgtggacccagatactttgcatgccacccttcgtctctgcctgaggctcacccgggaccacaaatatgccatgatgtttgcagaactgaagagtacccgcatgatcttgaatttgacccagagctcaggcttcaatgggtttactcccctggtcacccttctcttaagacacatcattgaggacccctgtacccttcgtcataccatggaaaaggnnnnnnnnnnnnnnnnnnnnnnnnnnnnnnnnnnnnnnnnnnnnnnnnnnnnnnnnnnnnnnnnnnnnnnnnnnnnnnnnnnnnnnnnnnnnnnnnnnnnnnnnnnnnnnnnnnnnnnnnnnnnnnnnnnnnnnnnnnnnnnnnnnnnnnnnnnnnnnnnnnnnnnnnnnnnnnnnnnnnnnnnnnnnnnnnnnnnnnnnnnnnnnnnnnnnnnnnnnnnnnnnnnnnnnnnnnnnnnnnnnnnnnnnnnnnnnnnnnnnnnnnnnnnnnnnnnnnnnnnnnnnnnnnnnnnnnnnnnnnnnnnnnnnnnnnnnnnnnnnnnnnnnnnnnnnnnnnnnnnnnnnnnnnnnnnnnnnnnnnnnnnnnnnnnnnnnnnnnnnnnnnnnnnnnnnnnnnnnnnnnnnnnnnnnnnnnnnnnnnnnnnnnnnnnnnnnnnnnnnnnnnnnnnnnnnnnnnnnnnnnnnnnnnnnnnnnnnnnnnnnnnnnnnnnnnnnnnnnnnnnnnnnnnnnnnnnnnnnnnnnnnnnnnnnnnnnnnnnnnnnnnnnnnnnnnnnnnnnnnnnnnnnnnnnnnnnnnnnnnnnnnnnnnnnnnnnnnnnnnnnnnnnnnnnnnnnnnnnnnnnnnnnnnnnnnnnnnnnnnnnnnnnnnnnnnnnnnnnnnnnnnnnnnnnnnnnnnnnnnnnnnnnnnnnnnnnnnnnnnnnnnnnnnnnnnnnnnnnnnnnnnnnnnnnnnnnnnnnnnnnnnnnnnnnnnnnnnnnnnnnnnnnnnnnnnnnnnnnnnnnnnnnnnnnnnnnnnnnnnnnnnnnnnnnnnnnnnnnnnnnnnnnnnnnnnnnnnnnnnnnnnnnnnnnnnnnnnnnnnnnnnnnnnnnnnnnnnnnnnnnnnnnnnnnnnnnnnnnnnnnnnnnnnnnnnnnnnnnnnnnnnnnnnnnnnnnnnnnnnnnnnnnnnnnnnnnnnnnnnnnnnnnnnnnnnnnnnnnnnnnnnnnnnnnnnnnnnnnnnnnnnnnnnnnnnnnnnnnnnnnnnnnnnnnnnnnnnnnnnnnnnnnnnnnnnnnnnnnnnnnnnnnnnnnnnnnnnnnnnnnnnnnnnnnnnnnnnnnnnnnnnnnnnnnnnnnnnnnnnnnnnnnnnnnnnnnnnnnnnnnnnnnnnnnnnnnnnnnnnnnnnnnnnnnnnnnnnnnnnnnagtcccaacatggccaacacagtcaatgctgctctgaagcctttggaaacactttcccggattgtgaaccagcccagtagcctttttggcagtaagagtgcttctagcaagaacaagtctgagcaggatgcccaaggagcctctcaagattccaatagcaaccagcaggacccaggnnnnnnnnnnnnnnnnnnnnnnnnnnnnnnnnnnnnnnnnnnnnnnnnnnnnnnnnnnnnnnnnnnnnnnnnnnnnnnnnnnnnnnnnnnnnnnnnnnnnnnnnnnnnnnnnnnnnnnnnnnnnnnnnnnnnnnnnnnnnnnnnnnnnnnnnnnnnnnnnnnnnnnnnnnnnnnnnnnnnnnnnnnnnnnnnnnnnnnnnnnnnnnnnnnnnnnnnnnnnnnnnnnnnnnnnnnnnnnnnnnnnnnnnnnnnnnnnnnnnnnnnnnnnnnnnnnnnnnnnnnnnnnnnnnnnnnnnnnnnnnnnnnnnnnnnnnnnnnnnnnnnnnnnnnnnnnnnnnnnnnnnnnnnnnnnnnnnnnnnnnnnnnnnnnnnnnnnnnnnnnnnnnnnnnnnnnnnnnnnnnnnnnnnnnnnnnnnnnnnnnnnnnnnnnnnnnnnnnnnnnnnnnnnnnnnnnnnnnnnnnnnnnnnnnnnnnnnnnnnnnnnnnnnnnnnnnnnnnnnnnnnnnnnnnnnnnnnnnnnnnnnnnnnnnnnnnnnnnnnnnnnnnnnnnnnnnnnnnnnnnnnnnnnnnnnnnnnnnnnnnnnnnnnnnnnnnnnnnnnnnnnnnnnnnnnnnnnnnnnnnnnnnnagacatccccccatccccaggatatatccctaccacccatccactgatggtgcgccatgcagaccacagttctctgacactgggcagtggctcttcaacaactcgtctcacccagggcatcgggcgcagtcagaggaccctaaggcagctgacagccaatactggccacaccattcatgttcactaccctgggaatcgccagcccaaccctcctcttatactccagaggtnaggttgcttggtccctcagctgctgctgacatccttcagctgagcagcagccttcccctacaaagccggggtcgggcccgcctcctggtaggcaacgatgacgtccacatcatcgcccgttctgatgatgagctgctggatgactttttccatgatcagagcacagctaccagccaagcaggcaagtttgtgtgngcatccccacagccctgacccgctggacagaagaatgcaaagttctcgatgctgagagcatgcacgactgtgtttcagnnnnnnnnnnnnnnnnnnnnnnnnnnnnnnnnnnnnnnnnnnnnnnnnnnnnnnnnnnnnnnnnnnnnnnnnnnnnnnnnnnnnnnnnnnnnnnnnnnnnnnnnnnnnnnnnnnnnnnnnnnnnnnnnnnnnnnnnnnnnnnnnnnnnnnnncagtgtactgaatgtaagacaaatgactctactgaacagaatctctcgatgggacgcctatgcctgacagctacccaacaaccccatcttcaactgatgcagctacatctgagtccaaggagacccttggcactctgcagtcctcacaacagcaaccaacactcccaaccccaccagctttgggagaggttcctcaggagctgcagtccccagctggagaagggggcagctctacacagctattgatgcctgtagagccagaggaattgggtcccacaaggccaagtggggaagcagaaacaacgcagatggagttatccccagctcccactataannnnnnnnnnnnnnnnnnnnnnnnnnnnnnnnnnnnnnnnnnnnnnnnnnnnnnnnnnnnnnnnnnnnnnnnnnnnnnnnnnnnnnnnnnnnnnnnnnnnnnnnnnnnnnnnnnnnnnnnnnnnnnnnnnnnnnnnnnnnnnnnnnnnnnnnnnnnnnnnnnnnnnnnnnnnnnnnnnnnnnnnnnnnnnnnnnnnnnnnnnnnnnnnnnnnnnnnnnnnnnnnnnnnnnnnnnnnnnnnnnnnnnnnnnnnnnnnnnnnnnnnnnnnnnnnnnnnnnnnnnnnnnnnnnnnnnnnnnnnnnnnnnnnnnnnnnnnnnnnnnnnnnnnnnnnnnnnnnnnnnnnnnnnnnnnnnnnnnnnnnnnnnnnnnnnnnnnnnnnnnnnnngtatcagtctccctgaaggcgtggacccctcttttctggctgccctgcctgatgacatccgtcgggaagttctacagaaccagctaggcattcgtccaccaacccggactgccccctccacaaatagctcagcgcctgcagtggtggggaatcctggtgtgactgaagtgagccctgagtttctggctgccctgcctccagctattcaggaggaagtangtactggcacagcagagagctgagcagcagcgacgagaactggcacagaatgccagctcagacacccctatggaccctgtgaccttcatccagactctgccctcagacctgcgccgtagtgtcctagaggatatggaggacagcgtgttagctgtgatgccacctgacattgcagctgaggctcaagccctgagacgagagcaggaagcccggcagcgacagctcatgcatgagcgtctgtttgggcacagtagcacctctgcactctctgctattctccnnnnnnnnnnnnnnnnnnnnnnnnnnnnnnnnnnnnnnnnnnnnnnnnnnnnnnnnnnnnnnnnnnnnnnnnnnnnnnnnnnnnnnnnnnnnnnnnnnnnnnnnnnnnncaggccttctggcagtaatgtagatactctcctccgcctccgaggacggctccttctggaccacgaagccctttcttgtctcctggtcctactttttgtggatgagccaaagctcaatactagccgtctacaccgagtactgagaaatctctgctaccatgcccagacccgccactgggtcatccgcagtctgctctccatcttgcagcgcagcagtgagagtgagctatgcattgaaacacccaaactcactacaagtgaggaaaagggcaaaaagtcgagcaagagctgtgggtcaagtagccatgagannnnnnnnnnnnnnnnnnnnnnnnnnnnnnnnnnnnnnnnnnnnnnnnnnnnnnnnnnnnnnnnnnnnnnnnnnnnnnnnnnnnnnnnnnnnnnnnnnnnnnnnnnnnnnnnnnnnnnnnnnnnnnnnnnnnnnnnnnnnnnnnnnnnnnnnnnnnnnnnnnnnnnnnnnnnnnnnnnnnnnnnnnnnnnnnnnnnnnnnnnnnnnnnnnnnnnnnnnnnnnnnnnnnnnnnnnnnggtatttcccagccacttcacacagcagcggaccaaagaaacaaactgtgagagtgatcgggaaaggggcagtaaggcctgtagcccatgctcctcacagtcctccagcagtggcatttgcacagacttctgggacttattggtaaaactggacaacatgaatgtcagccggaaaggcaagaactccgtgaagtcagtgccagtgagcgctggnnnnnnnnnnnnnnnnnnnnnnnnnnnnnnnnnnnnnnnnnnnnnnnnnnnnnnnnnnnnnnnnnnnnnnnnnnnnnnnnnnnnnnnnnnnnnnnnnnnnnnnnnnnnnnnnnnnnnnnnnnnnnnnnnnnnnnnnnnnnnnnnnnnnnnnnnnnnnnnnnnnnnnnnnnnnnnnnnnnnnnnnnnnnnnnnnnnnnnnnnnnnnnnnnnnnnnnnnnnnnnnnnnnnnnnnnnnnnnnnnnnnnnnnnnnnnnnnnnnnnnnnnnnnnnnnnnnnnnnnnnnnnnnnnnnnnnnnnnnnnnnnnnnnnnnnnnnnnnnnnnnnnnnnnnnnnnnnnnnnnnnnnnnnnnnnnnnnnnnnnnnnnnnnnnnnnnnnnnnnnnnnnnnnntttctgccactactaagggcagcaaatctccagcgaaggtgggtgatgggggcagcagcagtacagactttaagatggtgtcctctggcctcactgaaaaccagctacagctctctgtagaggt

SEQ ID NO: 28857 - DNA, 701 bp, Macaca Mulatta
  misc_feature (1)...(701): n = A,T,C or G
tctaatgtttcctgatttcacatcttgttgctgaaatgcagaagaaacagctacagcaggagcagaaggaacattccttagacttaatgtctcgcaattgcaagaattgtttcactaaagaaacagtcatcattcaactactgaatttgaaagcctcagcagtttcaacaacaaaaatcattttgcttttttaaaattaatcccaactgcatgataaattttcatataaaaagtaaagtttcgatttagtttttaataatggtttaatgccttttttgaataactggtttaaccnnnnnnnnnnnnnnnnnnaatgtaatgtattaatgcatataccataatcaaaagtttgaaatatccgtttcttaaataatgaggacattaatcacatttagcaaacatttgtacattcaaacctggatattaaagtgaaatgattactttgaatcactgtctgccaaggttcatgattcacattttgagatggattcttttcttaatgtaatacctaacttttgataattttttaaaactaatatttgatcagataatgtaagtcaaaatgcagacaatcctttaaaaggatgcattgtctgtgtatgtagcaacagctccaaagtatttttgggcagtttgataccttttatatctgaagtagccttaaccagaaaaatgataatctacaattgacaaaatgatat

SEQ ID NO: 28858 - DNA, 760 bp, Macaca Mulatta
ttttcaggattgtaggtgaaaaagcccagccaatcctagaaaatagtatggaaaccgaatgcttcagaatagggctgggcactggttcaggcttggacgagatggcaaggggatctctgagccaattcaagccatgcagaggccaaagggattaggacttggatttcctctaccaaaaagtacttccgcaactaatacccccaatgcaggaaaatccgcctaagaaaagcaaagaaaaaatgttttacagactttattcagtatgtcccattgttctaaaatgataacatgacttctgtttttgaagcaaaaatctacattgcctcaaacacatcactctagcttccttactgcatacagtcctaccatagtgagagaaatgggatttcatcacaattcatggtgctaaaatgaaaacctctgccctttaatttttttcagtaatttccagctatttctaggtataaagagcagctcgtctctcttatttattttaatctcatgtgtcagtactttctgatgctttgcttaattcatgtatgtgtgcagtgctgcaatgcccagacaaatgtgagcacacccaccggtttctaaaatgggataggcaggaaaggattgtgttttatatcatccctatctattgtaacccaatagacctgccatcccatcagtgaagtccgaacacatctttgtttgaaaggcttgtcaatttcacattccttgaatttgggttatttgtgaggattttctgacagagtga

SEQ ID NO: 28859 - DNA, 133 bp, Macaca Mulatta
agtgcaggtcagctctgcggacgctcggctcatggtctttgacaagacggaagggacgtggcggctgctatgctcctcacgctccaacaccagggtagccggactcagctgcgaggagatgggcttcctcagg

SEQ ID NO: 28860 - DNA, 2840 bp, Macaca Mulatta
  misc_feature (1)...(2840): n = A,T,C or G
aggcatgtggggaccccaaggcaaaaccatcctaccttatcgacaaaaacctggaatctgctgtgaaattcatagtcagaaaattccctgctgtagaaacccgcaacaacaannnnnnnnnnnnnnnnnnnnnnnnnnnnnnnnnnnnnnnnnnnnnnnnnnnnnnnnnnnnnnnnnnnnnnnnnnnnnnnnnnnnnnnnnnnnnnnnnnnnnnnnnnnnnnnnnnnnnnnnnnnnnnnnnnnnnnnnnnnnnnnnnnnnnnnnnnnnnnnnnnnnnnnnnnnnnnnnnnnnnnnnnnnnnnnnnnnnnnnnnnnnnnnnnnnnnnnnnnnnnnnnnnnnnnnnnnnnnnnnnnnnnnnnnnnnnnnnnnnnnnnnnnnnnnnnnnnnnnnnnnnnnnnnnnnnnnnnnnnnnnnnnnnnnnnnnnnnnnnnnnnnnnnnnnnnnnnnnnnnnnnnnnnnnnnnnnnnnnnnnnnnnnnnnnnnnnnnnnnnnnnnnnnnnnnnnnnnnnnnnnnnnnnnnnnnnnnnnnnnnnnnnnnnnnnnnnnnnnnnnnnnnnnnnnnnnnnnnnnnnnnnnnnnnnnnnnnnnnnnnnnnnnnnnnnnnnnnnnnnnnnnnnnnnnnnnnnnnnnnnnnnnnnnnnnnnnnnnnnnnnnnnnnnnnnnnnnnnnnnnnnnnnnnnnnnnnnnnnnnnnnnnnnnnnnnnnnnnnnnnnnnnnnnnnnnnnnnnnnnnnnnnnnnnnnnnnnnnnnnnnnnnnnnnnnnnnnnnnnnnnnnnnnnnnnnnnnnnnnnnnnnnnnnnnnnnnnnnnnnnnnnnnnnnnnnnnnnnnnnnnnnnnnnnnnnnnnnnnnnnnnnnnnnnnnnnnnnnnnnnnnnnnnnnnnnnnnnnnnnnnnnnnnnnnnnnnnnnnnnnnnnnnnnnnnnnnnnnnnnnnnnnnnnnnnnnnnnnnnnnnnnnnnnnnnnnnnnnnnnnnnnnnnnnnnnnnnnnnnnggcactttttgtttttatggcgttatcctttgcccgtgatgaaatcatctggctacttcgtcatgcagataacatgccaaagaagagtgcagacgactttatagataagnnnnnnnnnnnnnnnnnnnnnnnnnnnnnnnnnnnnnnnnnnnnnnnnnnnnnnnnnnnnnnnnnnnnnnnnnnnnnnnnnnnnnnnnnnnnnnnnnnnnnnnnnnnnnnnnnnnnnnnnnnnnnnnnncagaatctttctgtttgccctgaagatgaatcaatcatcatgtcctcttttgtgaacactatgacttccctaagtgtaaaacaannnnnnnnnnnnnnnnnnnnnnnnnnnnnnnnnnnnnnnnnnnnnnnnnnnnnnnnnnnnnnnnnnnnnnnnnnnnnnnnnnnnnnnnnnnnnnnnnnnnnnnnnnnnnnnnnnnnnnnnnnnnnnnnnnnnnnnnnnnnnnnnnnnnnnnnnnnnnnnnnnnnnnnnnnnnnnnnnnnnnnnnnnnnnnnnnnnnnnnnnnnngtttttatagtcgtgcttttgagaagatgtttcaacagtgtttggagttaccctctcaatcaagatactcaattgcatttccactactttgcactcattttatgagttgcacgcatgaactatgtccagaagannnnnnnnnnnnnnnnnnnnnnnnnnnnnnnnnnnnnnnnnnnnnnnnnnnnnnnnnnnnnnnnnnnnnnnnnnnnnnnnnnnnnnnnnnnnnnnnnnnnnnnnnnnnnnnnnnnnnnagttgctgcccaagcattgtgccaaaactatcagtcaagcagtgaataagaaatcaaaaaaacagactggtaagaaaggggaacctgaaagggagaaaccaggtgttgagagcatgaggaaaaacaggctggttgtgaccannnnnnnnnnnnnnnnnnnnnnnnnnnnnnnnnnnnnnnnnnnnnnnnnnnnnnnnnnnnnnnnnnnnnnnnnnnnnnnnnnnnnnnnnnnnnnnnnnnnnnnnnnnnnnnnnnnnnnnnnnnnnnnnnnnnnnnnnnnnnnnnnnnnnnnnnnnnnnnnnnnnnnnnnnnnnnnnnnnnnnnnnnnnnnnnnnnnnnnnnnnnnnnnnnnnnnnnnnnnnnnnnnnnnnnnnnnnnnnnnnnnnnnnnnnnnnnnnnnnnnnnnnnnnnnnnnnnnnnnnnnnnnnnnnnnnnnnnnnnnnnnnnnnnnnnnnnnnnnnnnnnnnnnnnnnnnnnnnnnnnnnnnnnnnnnnnnnnnnnnnnnnnnnnnnnnnnnnnnnnnnnnnnnnnnnnnnnnnnnnnnnnnnnnnnnnnnnnnnnnnnnnnnnnnnnnnnnnnnnnnnnnnnnnnnnnnnnnnnnnnnnnnnnnnnnnnnnnntcagaaatgaggtcattatcagaactactaggcccatacggtatgaagtttctaagtgaaagccttatgtggcatatttcatcacaagttgctgaacttaannnnnnnnnnnnnnnnnnnnnnnnnnnnnnnnnnnnnnnnnnnnnnnnnnnnnnnnnnnnnnnnnnnnnnnnnnnnnnnnnnnnnnnnnnnnnnnnnnnnnnnnnnnnnnnnnnnnnnnnnnnnnnnnnnnnnnnnnnnnnnnnnnnnnnnnnnnnnnnnnnnnnnnnnnnnnnnnnnnnnnnnnnnnnnnnnnnnnnnnnnnnnnnnnnnnnnnnnnnnnnnnnnnnnnnnnnnnnnnnnnnnnnnnnnnnnnnnggttgcaatgaatgtgtatgaattatcgtcagctgctggattaccttgtgagattgatcctgcgttggtcgtagctctttcttcacaaaaatcgg

SEQ ID NO: 28861 - DNA, 613 bp, Macaca Mulatta
tgatatctatatgcgctggccagttgagccgattacagaaagggcatgccacagatgaatggtttctgctcagctcccatataccattaaaaggtattgaaccagggtccctgcgtgttcgagcacgatactctatggaaaaaatcatgccagaagaagagtacagtgaattcaaagagcttatactgcaaaaggaacttcatgtagtctacgctttatcacatgtatgtggacaagaccgaacactattggccagcatcctactgaggatttttcttcacgaaaagcttgaatcgttgttgttatgcacactaaatgacagagaaataagcatggaagatgaagccactaccctatttcgagccacaacacttgcaagcaccttgatggagcagtatatgaaagccactgctacacagtttgttcatcatgctttgaaagactctattttaaagatcatggaaagcaagcagtcttgtgagttaagtccatcaaagttagacaaaaatgaagatgtgaacacttaattagcacacctattgaacatactttcagagcttgtggagaaaatattcatggcttccagacatacttccaccgacactgagatata

SEQ ID NO: 28862 - DNA, 237 bp, Macaca Mulatta
  misc_feature (1)...(237): n = A,T,C or G
gtcagcccattaaagcagatgtcctttttattcatggccttatgggagcagcattcaaaacatggcgccagcaggacagtgagcaggctgtaattgaaaagcctatggaggaggaagacagatacacaacgtgttggcccaagnnnnnnnnnnnnaagactgttctcctctccgaattatatctgtggagtatgacaccaccctcagcgactggagagcaaggtgccctatggaaag

SEQ ID NO: 28863 - DNA, 390 bp, Macaca Mulatta
  misc_feature (1)...(390): n = A,T,C or G
agtactgggaagagaaggaacagaccctgctgcagttccagaagagtaagatggcctgccagctctacagggagaaggtgaacgcgctgcaggcccaggtgtgcgagctgcagaaggagcgagaccaggnnnnnnnnnnnnnnnnnnnnnnnnnnnnnnnnnnnnnnnnnnnnnnnnnnnnnnnnnnnnnnnnnnnnnnnnnnnnnnnnnnnnnnnnnnnnnnnnnnnnnnnnnnnnnnnnnnnnnnnnnnnnnnnnnnnnnnnnnnnnnnnnnnnngctcaagcaggaagccaggaccagggagccctgtccacgggagaagcagcggctggtgcggatgcacgccatccgccccagaggcgacagcgacggcagcctcgtcagctcca

SEQ ID NO: 28864 - DNA, 965 bp, Macaca Mulatta
  misc_feature (1)...(965): n = A,T,C or G
gtggattggactctaaatattggagagcaggccctcgatatatgtattgtctctttcaatcagtcggcatcctctgtttttgttcttggtgagagaaacttcttttgccttaaggataatggacaaattcggttcatgaagaagcttgactggagcccaagttgttttctgccgtattgctcannnnnnnnnnnnnnnnnnnnnnnnnnnnnnnnnnnnnnnnnnnnnnnnnnnnnnnnnnnnnnnnnnnnnnnnnnnnnnnnnnnnnnnnnnnnnnnnnnnnnnnnnnnnnnnnnnnnnnnnnnnnnnnnnnnnnnnnnnnnnnnnnnnnnnnnnnnnnnnnnnnnnnnnnnnnnnnnnnnnnnnnnnnnnnnnnnnnnnnnnnnnnnnnnnnnnnnnnnnnnnnnnnnnnnnnnnnnnnnnnnnnnnnnnnnnnnnnnnnnnnnnnnnnnnnnnnnnnnnnnnnnnnnnnnnnnnnnnnnnnnnnnnnnnnnnnnnnnnnnnnnnnnnnnnnnnnnnnnnnnnnnnnnnnnnnnnnnnnnnnnnnnnnnnnnnnnnnnnnnnnnnnnnnnnnnnnnnnnnnnnnnnnnnnnnnnnnnnnnnnnnnnnnnnnnnnnnnnnnnnnnnnnnnnnnnnnnnnnnnnnnnnnnnnnnnnnnnnnnnnnnnnnnnnnnnnnnnnnnnnnnnnnnnnnnnnnnnnnnnnnnnnnnnnnnnnnnnnnnnnnnnnnnnnnnnnnnnnnnnnnnnnnnnnnnnnnnnnnnnnnnnnnnnnnnnnnnnnnnnnnnnnnnnnnnnnnnnnnnnnnnnnnnnnnnnnnnnnnnnnnnnnnnnnnnnnnnnnnnnnnnnnnnnnnnnnnnnnnnnnnnnnggttttgccagtcagtcagatgatgatcaggtgaatgtaatgggttttcacttcttaggaggtgcccgagttactcttcttgcttccaaaacttctc

SEQ ID NO: 28865 - DNA, 4047 bp, Macaca Mulatta
gacagatgactctgccggtcggagtgcgtgtcctcccaccgtgccggcgctgaactgacagtccgctgccagggaaagtgacagccgcagccggctcgcagccagcggccagacgcccgcggaccatgctctgcagtccgcagaactggggcggctcctatcagcgggtccgcggggggcttgatgcgcagaaatgcagtccagagaaaagtgcctcatttttcagtaaagtgacatattcctggtttagcagagtaattactttaggctataagagacctttggaaagagaggatctttttgaactaaatgaaagtgattcttcctacactgtgtgccctacctttgaaaaacaatggagaaaggaagttttaaggaatcaagagaggcaaaaagtaaaggcatctttttatattgaggcacataccaagaaaccatctctactctatgcattgtggaacacctttaagtctgtcctgattcaagttgccttattcaaagtgtttgctgacattctgtccttcactagcccactcataatgaagcaaatgatcattttctgtgaacacagctcagattttggctggaatggctacggctatgcaatggcactttttgttgtagtctttctgcaaactctgattcttcagcgatatcaatgttttaacatgctcacctcagcaaaagttaaaacagctgtaaatggactgatctacaaaaaggccctacttttatcaaatgtttctcgacaaaagttttccactggggaaattattaacttgatgtcagcggatgctcagcaactcatggacttgacagcaaacctcaatctcctctggtctgccccttttcaaatcctaatggccatatatctcctttggcaagagctgggcccagcagtgttagcaggggtggcagtccttgtgtttgttataccaataaatgctttagctgcaactaaaataaaaaagttaaagaaaagccaaagaaagaacaaagataaacagataaagctactcaaagaaatcctacatggaattaagatcctcaaactttatgcatgggaaccctcttataaaaataagattatcaaaattcgagatcaggaattggaatttcaaaaatcagccaggtatcttactgtattttccatgctgacattaacttgcattccattcttggtgtccctggcaaccttgtgtgtctatttcttactggatgaaggaaacattttaacagccactaaagtgttcacatcgatgtctttgtttaatattttaaggattcctctgtttgagttaccaaccgtgatctcaactgtggtccagacaaagatatccctggggcgtttggaagactttctccacactgaggagcttcttcctcaaaatattgaaacaaactatataggagatcatgctattgagtttacagatgctacttactcctggaataaaacaggaatgccagttctaaaagacttgaacataaagatcccagaaggagctttagtggctgttgtagggcaagttgggtctggaaaatcatccatgctttctgccattctgggggaaatggagaaacttaccggagtagtccaaagaaagggttctgtggcttatgtttctcagcaggcctggattcagaattgcattttgcaagtaaacattctctttggctccatcatgaagaaagagttttatgagcaagtattggaagcctgtgctctccttccagatttggagcagttgccaaagggagatcaaactgagattggagaaagaggtgtgaatataagtgggggccagcaacatcgagtaagcctggctagagctgtctacagtggagccgacatctacctcctggatgaccccttgtctgctgttgatgttcacgttggaaagcagctttttgaaaaagtgatagggtccttgggccttttgaaaaacaagactcgtattttagtgacacacaatctcacacttctgccacaaatggatcttattgttgtaatggaaagtggcagaatagctcaaatggggacataccaggagctgctgtctaaaactagaaacctcactaatttgcaccaagtcatcagtgaagaagaaaaagctcatgctctaaagcgagccagtgcagtcaactccagaactagaccaaaagacaaaatcctggaacaaaaacctaggccctcattggatcaaggaaaacagctgtcaatgaaaaaagaaaagatccctgttggtggggtgaagttctccatcattctgcagtacctccaagcctttggctggctctgggtgtggctgactatggtcacttacttagggcagaatttggtgggcattggacagaatctatggcttagtgcatgggcaaaagaagcaaaaaacatgaatgacttcacagaatggaagcaaataagaagcaataaacttaatatctatggaatattgggattaataaaaggtctctttgtctgctctggagcctacgtaatcactagaggatccctggctgcctctcgaaccatgtatgttcaactgttgaataatgtactgcacctccccatccagttttttgaaacaaattccacaggccagatcatcagtcgtttcactaaggacatatttataattgatatgcgtttgcattactatttacggctgtgggtgaattgtacattggatgttattggaacaattttggtcattataggagctttgcccctcttcattctggggattattccctcagtgttcttctatttctctatacaaagatactatgtggcaagctctcggcaaatccggaggctgacaggagcgtcccgttctcctgtcatttcccacttcagtgagactttatcaggagtgtccaccatcagagcatttggacatcaacagaggtttatccagcaatacaaagaggtggtgaatgaaaacttggtctgtttctacaataatgtaatttctaaccggtggctgtctgttagacttgaatttcttggcaacttaatggtgctttttgctgcactgcttgctgtgttggctggcaattctatagattcagcaacagttggtttgtccatatcctatgccctaaatataactcattctctgaatttttgggtaaagaaagcatgtgaaattgaaaccaatgcagttgctgttgaaagagtttgtgaatatgaaaatatggataaagaggcaccttggataatgtctagaagacccccattacaatggcccaataaaggtgtagtggaatttattaattatcaggctcgataccgagatgagcttggtttagcattgcaagatatcactttccagactcatggggaagagaagattggaattgtgggaaggactggagcaggcaaatccacactatcaaattgcttatttagaattgtggagagagcaggaggcaaaattattattgacggaatcgatatatcaactattggacttcatgaccttcgtggcaaacttaatattattccacagcacccggttttattttctggaacccttcaaatgaacctggatcccctaaacaaatattctgatagcaagctgtgggaagcgctggaattgtgtcacttaaaagagtttgtgcagtcccttcctgagaagctacggcatgagatttcagagggtggcgagaacctcagcatgggacaacggcagctggtctgtcttgctcgtgctttgcttcgaaaaacaaaaattctcatcttggatgaagcaacagcctccatcgactttgagacggacaagttggtgcagactacaatcaggaaggagttttctgattgcaccatcctgaccattgctcacagactgcagtctatcattgattcagacagggtgcttgttctagactcaggaagcattgtggaattcgaagcgcctcagaatttgatacgtcagaaaggacttttctatgaaatgacaacggacgctggaataacacaagaatcaggcacagaaaagaaattactttagctgtatgttaatttgcataataaaaaatcac

SEQ ID NO: 28866 - DNA, 192 bp, Macaca Mulatta
gtcctttccccccttgtggttcccttgtgagccttgcgacaactaatctagtctgcagtagtgcggactagagcaacccaaatagcatctagacagccatgagtttgaaagggcccatcacaggcactttcctacccaattacccaggtcataaggtatgtctgtgtgacacttatctctgtgtatatcagc

SEQ ID NO: 28867 - DNA, 2301 bp, Macaca Mulatta
  misc_feature (1)...(2301): n = A,T,C or G
ggcattaaaaaatatttaatcattcatgtgttgagactcattcttgagttatggatgacaaggcttctgttggaaaaatcagtgtctcttcagactcagtatctactcttaatagtgaagattttgtcttggtttccaggcaaggagatgagacaccatctacaaataatggaagtgatgatgagaaaacaggactcaangattgtagggaatggaagtgaacagcagctgcaaaaagagctagcagatgtactgatggatcctccaatggacgaccagccaggggaaaaggagcctgtgaaaaggtcacaactggatggtgaaggagatgggcctctttctaatcagctctccgcttcatccaccattaaccctgtgccattagtagggctccaaaaaccagagatgagcctgccagtgaaacctggacaaggagnnnnnnnnnnnnnnnnnnnnnnnnnnnnnnnnnnnnnnnnnnnnnnnnnnnnnnnnnnnnnnnnnnnnnnnnnnnnnnnnnnnnnnnnnnnnnnnnnnnnnnnnnnnnnnnnnnnnnnnnnnnnnnnnnnnnnnnnnnnnnnnnnnnnnnnnnnnnnnnnnnnnnnnnnnnnnnnnnnnnnnnnnnnnnnnnnnnnnnnnnnnnnnnnnnnnnnnnnnnnnnnnnnnnnnnnnnnnnnnnnnnnnnnnnnnnnnnnnnnnnnnnnnnnnnnnnnnnnnnnnnnnnnnnnnnnnnnnnnnnnnnnnnnnnnnnnnnnnnnnnnnnnnnnnnnnnnnnnnnnnnnnnnnnnnnnnnnnnnnnnnnnnnnnnnnnnnnnnnnnnnnnnnnnnnnnnnnnnnnnnnnnnnnnnnnnnnnnnnnnnnnnnnnnnnnnnnnnnnnnnnnnnnnnnnnnnnnnnnnnnnnnnnnnnnnnnnnnnnnnnnnnnnnnnnnnnnnnnnnnnnnnnnnnnnnnnnnnnnnnnnnnnnnnnnnnnnnnnnnnnnnnnnnnnnnnnnnnnnnnnnnnnnnnnnnnnnnnnnnnnnnnnnnnnnnnnnnnnnnnnnnnnnnnnnnnnnnnnnnnnnnnnnnnnnnnnnnnnnnnnnnnnnnnnnnnnnnnnnnnnnnnnnnnnnnnnnnnnnnnnnnnnnnnnnnnnnnnnnnnnnnnnnnnnnnnnnnnnnnnnnnnnnnnnnnnnnnnnnnnnnnnnnnnnnnnnnnnnnnnnnnnnnnnnnnnnnnnnnnnnnnnnnnnnnnnnnnnnnnnnnnnnnnnnnnnnnnnnagataaagtcctgtttatgaccacagctgtagatttggtaataacagaagtacaggagcctgttcgatttctcctggagacaaaagtccgtgtttgctcacctaatgaaagattattctggcccttcagcaaacggagtactactgaaaatttctttttgaaactaaaacannnnnnnnnnnnnnnnnnnnnnnnnnnnnnnnnnnnnnnnnnnnnnnnnnnnnnnnnnnnnnnnnnnnnnnnnnnnnnnnnnnnnnnnnnnnnnnnnnnnnnnnnnnnnnnnnnnnnnnnnnnnnnnnnnnnnnnnnnnnnnnnnnnnnnnnnnnnnnnnnnnnnnnnnnnnnnnnnnnnnnnnnnnnnnnnnnnnnnnnnnnnnnnnnnnnnnnnnnnnnnnnnnnnnnnnnnnnnnnnnnnnnnnnnnnnnnnnnnnnnnnnnnnnnnnnnnnnnnnnnnnnnnnnnnnnnnnnnnnnnnnnnnnnnnnnnnnnnnnnnnnnnnnnnnnnnnnnnnnnnnnnnnnnnnnnnnnnnnnnnnnnnnnnnnnnnnnnnnnnnnnnnnnnnnnnnnnnnnnnnnnnnnnnnnnnnnnnnnaggagtctccccaggacagtgctatcacccgggatattaaccgaacgttcccagcccatgactactttaaggacacaggaggagatggacaagattccttatataaaatatgcaagnnnnnnnnnnnnnnnnnnnnnnnnnnnnnnnnnnnnnnnnnnnnnnnnnnnnnnnnnnnnnnnnnnnnnnnnnntgcctgaagaacaggcattcagtgttctggtcaagatcatgtttgactatgggctgagggaacttttcaagcaaaactttgaagatttgcattgcaaattttaccaattggagcgcctcatgcaggnnnnnnnnnnnnnnnnnnnnnnnnnnnnnnnnnnnnnnnnnnnnnnnnnnnnnnnnnnnnnnnnnnnnnnnnnnnnnnnnnnnnnnnnnnnnnnnnnnnnnnnnnnnnnnnnnnnnnatatcatcgacctgcttttatgtgag

SEQ ID NO: 28868 - DNA, 374 bp, Macaca Mulatta
cataggtgttctgtctaatcaccattacagatgtttagggtcttgctttggtctgttaagtgatgcaagtttaagtgacaaggtctacaggctgtaatctggagcacatgggtcccgtcagcactgagcacacgccctctgtggtggaagaggacacagtgcgcagccgtgactttcagtgcattgggtttaagtctttgaaaatagttcgagacagtcttcctcaggtggactcgggtgtttagaaatctgccggtcggatcatcatggttgtgcccttgagcgagtagcctgagcctttccagtagtaccacttaatgccgttgaacttatttgtgttctgcctttgtggatagtacattccgttcaagttg

SEQ ID NO: 28869 - DNA, 541 bp, Macaca Mulatta
tacagattttgaagttctagacacacaaagtctcagcatggctatgatctaaacgaacatgggcgggttactaaagctcccaaactaatttcctcatctatagtcacctcccctgtatccctgagcacctgggtgtcgggggatgttgggtccacagtaggtgttcctccagaagcagctcttcttggtccatatcctgcccatctgctctgcagccttcttggtcctaaaaacatgtacttgtcctttgtcctttatttccagctttaagcttctagaagttacactgatacaatacctcactgtgcccaaaatctaattcatcatttctccataggtaagttttggattttcttacttttaaagaaaaatcacattgttgagtgggtttgttttggtgcccaccagccattctgtctcagaatcagtgaaaatggaactcctatcccaggatagcctctcgtgggttagtatatgtaagtggctgtggatattcagtcaaccaggggcaagtacggcaatcatgaaaacctcatcatgt

SEQ ID NO: 28870 - DNA, 1436 bp, Macaca Mulatta
  misc_feature (1)...(1436): n = A,T,C or G
ggaattctccattctaaaccagaactcatcaggcggctagagcaaggggaagcgccctggggagaagagagaagatgccggccaggcccccgtgcaggnnnnnnnnnnnnnnnnnnnnnnnnnnnnnnnnnnnnnnnnnnnnnnnnnnnnnnnnnnnnnnnnnnnnnnnnnnnnnnnnnnnnnnnnnnnnnnnnnnnnnnnnnnnnnnnnnnnnnnnnnnnnnnnnnnnnnnnnnnnnnnnnnnnnnnnnnnnnnnnnnnnnnnnnnnnnnnnnnnnnnnnnnnnnnnnnnnnnnnnnnnnnnnnnnnnnnnnnnnnnnnnnnnnnnnnnnnnnnnnnnnnnnnnnnnnnnnnnnnnnnnnnnnnnnnnnnnnnnnnnnnnnnnnnnnnnnnnnnnnnnnnnnnnnnnnnnnnnnnnnnnnnnnnnnnnnnnnnnnnnnnnnnnnnnnnnnnnnnnnnnnnnnnnnnnnnnnnnnnnnnnnnnnnnnnnnnnnnnnnnnnnnnnnnnnnnnnnnnnnnnnnnnnnnnnnnnnnnnnnnnnnnnnnnnnnnnnnnnnnnnnnnnnnnnnnnnnnnnnnnnnnnnnnnnnnnnnnnnnnnnnnnnnnnnnnnnnnnnnnnnnnnnnnnnnnnnnnnnnnnnnnnnnnnnnnnnnnnnnnnnaggctacaccagtaagtcatacctcactgtgcatgagagaacacacacaggagagnaagccttatgaatgccaggagtgtgggcgaaggtttaatgataagtcctcatacaacaagcacttgaaggcacattcaggggagaagccttttgtgtgcaaggagtgtgggcgaggctatactaataagtcatacttcgttgtgcacaagagaatacactcaggagagaagccttacagatgccaggagtgtggccgaggctttagcaataagtcacacctcatcacacaccagaggacacactcaggggagaagcccttcgcgtgcaggcagtgtgagcaaagttttagcgtgaaaggaagtctcctcagacaccagagaacacactcaggggagaagccttttgtgtgcaaggattgtgagcgaagctttagccaaaagtcaactctcatctaccaccagagaacacactcaggggagaaacctttcgtttgtagagaatgtgggcaagggtttattcagaagtcaactctcgtgaaacatcagatcacacactcagaggagaagccttttgtgtgcaaggactgtggacgaggctttatccaaaagtcaaccttcacattacaccagaggacacactcagaggagaagccttatggatgtcgggagtgtgggcgaaggtttcgggataagtcctcgtataacaagcacctgagggcacacttgggagagaaacgttttttctgcagggatttgggcgaggctataccttgaagccaaa

SEQ ID NO: 28871 - DNA, 153 bp, Macaca Mulatta
gatactgtatggagtttaagacagagtccttgactcctcactgtgctctggaaaaccggcccttgactagatggatgcagtatctccgagagggatacacggtgtgtgtggattgtcagcctccagctatgaactctgtgagccttcgttgtt

SEQ ID NO: 28872 - DNA, 678 bp, Macaca Mulatta
cactctgcaaccattttacttattactttatgggaaaatttagatgtgcaaagcaatgcagataccaaaatatgctttccaagtgcttcgtggctgagtttgtctcttttagcagttctgaaccctaagatatatacttatatggaaaaagctatggataaaaataaataaaatacatcttaatcatccacatatagacaaaattgaataaaaaagtaagaacattacaaagcatgaaaatgtatataaaattattcctgaatgtgagggttgaaagactctggaggcctaaaacctatttgaaagagaaactttcaagaaaaggaaaaaagcattcctctacttcgaatagatatgctatgatctgattctgaagcaaggggattgaactgaatgatatattgaggtttcttccatggtccactgatttagatgatagcagtaaaaaatatatcagtgaaaatcatttaatactgtaaaaggacaggaattcagtaaaactacatgtagatattcagtctaaatacatttttaaaatacaacatattttgactgaactgacaggatatgaacagctcattcacttgacagtcatctgttatcaagccatcattatgtcactttaaaactcatatttacagacttaaaacattacgataatgcttacatgtatatcag

SEQ ID NO: 28873 - DNA, 169 bp, Macaca Mulatta
agcttgataaacaagcgtaccaccctgttggtgcctgggacagcaaagagcatctttcacaggctactggaattctaacagagagaattaaggcaatccagaaaaaattccccacgtggagtgctgctcagcacctcagaggtaggctgtattctgagcactttgttta

SEQ ID NO: 28874 - DNA, 661 bp, Macaca Mulatta
gagtcataatttatattaaaaagttgttggactttgaaatacatttttcaaatgaaaaaatttaagcaaaatagttgcacagtaatcactgcaggtgtgtgttggattaaaggatggatgtggctaatgaagataactcctccaaagtggccaagatggaattttgtaccaacattgcccttctgaggagagagggccaagtattatgaaggcaagaagaccaatgtcatctttcaagggctcaactccttgttcttcctactcccttttcttagcgtttatttgagatttttcaagcctgtaaaagaagtagttgttttaaaacaatgttggaaatgaggaaaatgagcaatatcaacattttatcctgagggacagggagtagggaataagccagaggctgctagttacacagttcagtcttagtgatgaagagatttacgtctctcctccctcaggtacctctgtaaagaaacacaagaccaaacaatgtattttccagttttgtttttctgttctgaaaatatctagtgggtgctaggattgaaagggcatgagaggttgagatgctgatatctcctcatgtggatgaagtggccattacctctggtttctgtctattggttgcatctctgtgacactgaagagaggctattccaaa

SEQ ID NO: 28875 - DNA, 669 bp, Macaca Mulatta
tatttccctaaaaaagaggctgtcacatttgaccaagcaaaccctacacaaatattaggtaaactgaaggaacttaatggaactgcacctgaagagaagaagttaactgaggatgacttgatactacttgagaagatactgtctctaatatgtaacagttcttcagaaaaacccacagtccagcaacttcagattttgtggaaagctattaactggcctgaagatattgtctttcctgcacttgacattcttcggttgtcaattaaacaccccagtgtgaatgagaacttctgcaatgaaaaggaagggactcagttcagcagtcatcttatcaatcttctgaaccctaaaggaaagccagcaaaccagctgcttgctctcaggactttttgcaattgttttattggccaggcaggacaaaaactcatgatgtcccagagggaatcactgatgtcccatgcaatagaactgaaatcagggagcaataagaacattcacattgctctggctacattggccctgaactattctgtttgttttcataaagaccataacattgaagggaaagctcaatgtttgtcactaattagcacaatcttggaagtagtacaagacttagaagccacttttagacttcttgtggctcttggaacacttatcagtgatgat

SEQ ID NO: 28876 - DNA, 79 bp, Macaca Mulatta
tcgtaggcatgatccgccactacgtgtccatcctgctgcagagcgacaagaacctcttccaggaacaagtatctgacag

SEQ ID NO: 28877 - DNA, 1980 bp, Macaca Mulatta
  misc_feature (1)...(1980): n = A,T,C or G
gattcttaatgcttttcggactcctgatggcatgcctgtaaagaacttgcagttgaaggagtataacacaggtnnnnnnnnnnnnnnnnnnnnnnnnnnnnnnnnnnnnnnnnnnnnnnnnnnnnnnnnnnnnnnnnnnnnnnnnnnnnnnnnnnnnnnnnnnnnnnnnnnnnnnnnnnnnnnnnnnnnnnnnnnnnnnnnnnnnnnnnnnnnnnnnnnnnnnnnnnnnnnnnnnnnnnnnnnnnnnnnnnnnnnnnnnnnnnnnnnnnnnnnnnnnnnnnnnnnnnnnnnnnnnnnnnnnnnnnnnnnnnnnnnnnnnnnnnnnnnnnnnnnnnnnnnnnnnnnnnnnnnnnnnnnnnnnnnnnnnnnnnnnnnnnnnnngataaggaacctgaacccaggaagagggaagaaggacaagagtcacgcttaggacatcaaaagagagaagcagaaaggtatctgcctccttctcgaagggaagggccaactttccgaagagaccgagagaaggagtcatggtctggagagacacgccaggacggagagagcaaaannatcatgctaaagcgtatctatcgttccacaccacctgaggtgatagtggaagtgctggagccctatnnnnnnnnnnnnnnnnnnnnnnnnnnnnnnnnnnnnnnnnnnnnnnnnnnnnnnnnnnnnnnnnnnnnnnnnnnnnnnnnnnnnnnnnnnnnnnnnnnnnnnnnnnnnnnnnnnnnnnnnnnnnnnnnnnnnnnnnnnnnnnnnnnnnnnnnnnnnnnnnnnnnnnnnnnnnnnnnnnnnnnnnnnnnnnnnnnnnnnnnnnnnnnnnnnnnnnnnnnnnnnnnnnnnnnnnnnnnnnnnnnnnnnnnnnnnnnnnnnnnnnnnnnnnnnnnnnnnnnnnnnnnnnnnnnnnnnnnnnnnnnnnnnnnnnnnnnnnnnnnnnnnnnnnnnnnnnnnnnnnnnnnnnnnnnnnnnnnnnnnnnnnnnnnnnnnnnnnnnnnnnnnnnnnnnnnnnnnnnnnnnnnnnnnnnnnnnnnnnnnnnnnnnnnnnnnnnnnnnnnnnnnnnnnnnnnnnnnnnnnnnnnnnnnnnnnnnnnnnnnnnnnnnnnnnnnnnnnnnnnnnnnnnnnnnnnnnnnnnnnnnnnnnnnnnnnnnnnnnnnnnnnnnnnnnnnnnnnnnnnnnnnnnnnnnnnnnnnnnnnnnnnnnnnnnnnnnnnnnnnnnnnnnnnnnnnnnnnnnnnnnnnnnnnnnnnnnnnnnnnnnnnncctaaagtggtaaacccactgattggcctcttgggtgaatatggaggagacagtgactatgaggaggaagaagaggaagaacagacccctcccccacagccccgcatagcacagccccagaagcgagaggagctcaccaagaaggagaatgaagaagacaaactcactgactggaataaactggcttgtctgctctgcagaaggcagtttcccaataaagaagttctgatcaaacaccagcagctgtcagacctgcacaannnnnnnnnnnnnnnnnnnnnnnnnnnnnnnnnnnnnnnnnnnnnnnnnnnnnnnnnnnnnnnnnnnnnnnnnnnnnnnnnnnnnnnnnnnnnnnnnnnnnnnnnnnnnnnnnnnnnnnnnnnnnnnnnnnnnnnnnnnnnnnnnnnnnnnnnnnnnnnnnnnnnnnnnnnnnnnnnnnnnnnnnnnnnnnnnnnnnnnnnnnnnnnnnnnnnnnnnnnnnnnnnnnnnnnnnnnnnnnnnnnnnnnnnnnnnnnnnnnnnnnnnnnnnnnnnnnnnnnnnnnnnnnnnnnnnnnnnnnnnggctgaaggccggatgagggtccccagtgttggagccccaggaagaaccagcaaaagacagtccaatgagacttaccgagatgctgttcgaagagtcatgtttgctcggtataaagaactcgattaagaatggagacaagttccatggga

SEQ ID NO: 28878 - DNA, 235 bp, Macaca Mulatta
caggctccatgaagaagaaaagatcttgaaagttcagtcctcacacaagccttctgaaattctggaatgcagtgaaacttctttacaggaagtagctagtaaagcagcagtactaacagagacccctcgtacaactgacagtgagaagactttaatagaaaaaatgtttggaggaaaattacgaactcacatatgttgtttgaactgcaggagtgctaacaaaaagtggaagcct

SEQ ID NO: 28879 - DNA, 342 bp, Macaca Mulatta
  misc_feature (1)...(342): n = A,T,C or G
ggaacgacagattcagctgattcgagagatgctcatgtgtgacacatctggcagcattcaactaagcgaggagcaaaaatcagctctggcttttctcaacagaggccaaccatccagcagcaatgctgggaacaaaannnnnnnnnnnnnnnnnnnnnnnnnnnnnnnnnnnnnnnnnnnnnnnnnnnnnnnnnnnnnnnnnnnnnnnnnnnnnnnnnnnnnnnnnnnnnnnnnnnnnnnnnnnnnnnnnnnnnnnnnnngcgctctagtagccgacagtttgttgatggtccccctggacctgtaaagaaaactcgttccattggctccacagtagaccag

SEQ ID NO: 28880 - DNA, 268 bp, Macaca Mulatta
tgccacctttactgcacaggctggacacatggctgttccaggctcacctctcctggatttgccactaaagggcagccaaggcacctggtggctggtctagagttaagtctcagggaaggactctgattggctgagccagggttagtttccagggcaaggccaattaatgggtcttgaaaagcaaaggactagagtcctccttagaactcgacactgggagttgaggagtctaattggctcaactgggtagagaagaacctagccaatc

SEQ ID NO: 28881 - DNA, 157 bp, Macaca Mulatta
tgccgggagcagcgctagcggcttttggacgtccagcttcagggtccccagcccctcagcctgcatggagcctcccaggccctggactcctctccagccgggtctacaccaccgtcccccgtcatcttcttctgggttactgagcagcttcttttaa

SEQ ID NO: 28882 - DNA, 1618 bp, Macaca Mulatta
  misc_feature (1)...(1618): n = A,T,C or G
agaggaaagacccaaaccaggtggaactgtggggactcaaggaaggcacctacctgttccagctgacagtgaccagctcagaccacccagaggacacggccaacgtcacagtcactgtgctgtccaccaagcagacagaannnnnnnnnnnnnnnnnnnnnnnnnnnnnnnnnnnnnnnnnnnnnnnnnnnnnnnnnnnnnnnnnnnnnnnnnnnnnnnnnnnnnnnnnnnnnnnnnnnnnnnnnnnnnnnnnnnnnnnnnnnnnnnnnnnnnnnnnnnnnnnnnnnnnnnnnnnnnnnnnnnnnnnnnnnnnnnnnnnnnnnnnnnnnnnnnnnnnnnnnnnnnnnnnnnnnnnnnnnnnnnnnnnnnnnnnnnnnnnnnnnnnnnnnnnnnnnnnnnnnnnnnnnnnnnnnnnnnnnnnnnnnnnnnnnnnnnnnnnnnnnnnnnnnnnnnnnnnnnnnnnnnnnnnnnnnnnnnnnnnnnnnnnnnnnnnnnnnnnnnnnnnnnnnnnnnnnnnnnnnnnnnnnnnnnnnnnnnnnnnnnnnnnnnnnnnnnnnnnnnnnnnnnnnnnnnnnnnnnnnnnnnnnnnnnnnnnnnnnnnnnnnnnnnnnnnnnnnnnnnnnnnnnnnnnnnnnnnnnnnnnnnnnnnnnnnnnnnnnnnnnnnnnnnnnnnnnnnnnnnnnnnnnnnnnnnnnnnnnnnnnnnnnnnnnnnnnnnnnnnnnnnnnnnnnnnnnnnnnnnnnnnnnnnnnnnnnnnnnnnnnnnnnnnnnnnnnnnnnnnnnnnnnnnnnnnnnnnnnnnnnnnnnnnnnnnnnnnnnnnnnnnnnnnnnnnnnnnnnnnnnnnnnnnnnnnnnnnnnnnnnnnnnnnnnnnnnnnnnnnnnnnnnnnnnnnnnnnnnnnnnnnnnnnnnnnnnnnnnnnnnnnnnnnnnnnnnnnnnnnnnnnnnnnnnnnnnnnnnnnnnnnnnnnnnnnnnnnnnnnnnnnnnnnnnnnnnnnnnnnnnnnnnnnnnnnnnnnnnnnnnnnnnnnnnnnnnnnnnnnnnnnnnnnnnnnnnnnnnnnnnnnnnnnnnnnnnnnnnnnnnnnnnnnnnnnnnnnnnnnnnnnnnnnnnnnnnnnnnnnnnnnnnnnnnnnnnnnnnnnnnnnnnnnnnnnnnnnnnnnnnnnnnnnnnnnnnnnnnnnnnnnnnnnnnnnnnnnnnnnnnnnnnnnnnnnnnnnnnnnnnnnnnnnnnnnnnnnnnnnnnnnnnnnnnnnnnnnnnnnnnnnnnnnnnnnnnnnnnnnnnnnnnnnnnnnnnnnnnnnnnnnnnnnnnnnnnnnnnnnnnnnnnnnnnnnnnnnnnnnnnnnnnnnnnnnnnnnnnnnnnnnnnnnnnnnnnnnnnnnnnnnnnnnnnnnnnnnnnnnnnnnnnnnnnnnnnnnnnnnnnnnnnnnnnnnnnnnnnnnnnnnnnnnnnnnnnnnnttcccctaagattgggctccctgcccttgaccagccccaacctggcctggaccggcagacagaaccaggagaggctcagctgcatcccgcagcccccacccccagggttctccaacatcacagtccagcccgcccacagggtaataaaagtggtttgtgg

SEQ ID NO: 28883 - DNA, 898 bp, Macaca Mulatta
  misc_feature (1)...(898): n = A,T,C or G
gggattctgtgggccagctgcagctatatcgccacccagaccgttcgcagccagcgttcttggatgcaattgaccgacgggaagacacgttttatgttgtctctttccgaagnnnnnnnnnnnnnnnnnnnnnnnnnnnnnnnnnnnnnnnnnnnnnnnnnnnnnnnnnnnnnnnnnnnnnnnnnnnnnnnnnnnnnnnnnnnnnnnnnnnnnnnnnnnnnnnnnnnnnnnnnnnnnnnnnnnnnnnnnnnnnnnnnnnnnnnnnnnnnnnnnnnnnnnnnnnnnnnnnnnnnnnnnnnnnnnnnnnnnnnnnnnnnnnnnnnnnnnnnnnnnnnnnnnnnnnnnnnnnnnnnnnnnnnnnnnnnnnnnnnnnnnnnnnnnnnnnnnnnnnnnnnnnnnnnnnnnnnnnnnnnnnnnnnnnnnnnnnnnnnnnnnnnnnnnnnnnnnnnnnnnnnnnnnnnnnnnnnnnnnnnnnnnnnnnnnnnnnnnnnnnnnnnnnnnnnnnnnnnnnnnnnnnnnnnnnnnnnnnnnnnnnnnnnnnnnnnnnnnnnnnnnnnnnnnnnnnnnnnnnnnnnnnnnnnnnnnnnnnnnnnnnnnnnnnnnnnnnnnnnnnnnnnnnnnnnnnnnnnnnnnnnnnnnnnnnnnnnnnnnnnnnnnnnnnnnnnnnnnnnnnnnnnnnnnnnnnnnnnnnnnnnnnnnnnnnnnnnnnnnnnnnnnnnnnnnnnnnnnngttatggcagtggaggtgggaatttagtccccaggtgggacaagggaagtttttgcattttggagctagttactgggagtaagggagggtggcggggggagtacaggtttatgtgtgtgcatttcttttttattattattaaataaacaacttggagggagttgaagg

SEQ ID NO: 28884 - DNA, 426 bp, Macaca Mulatta
cgtctttttcaggaactgtgcaaattgcagccgtcgttgatattattcgggaattaggcatctgccctaatgatgctgctgtaacccccatcagtaaaaaccggttttatactattaaaaccctagtggtagcataatggaagtccagtctgtttgccacatccagatgatttcctctaaggaaacctggctggaatttctgttgtggtctataaaataaacttcttaacacgcttctccatgttctgttgtatctccaaaatctgcccctaaagaaccccagattacctgaaatttctagaacatttgtctttcaaagaacatttactgagcagattgtacaggttctcactgcccactggtatgaagagggagagaagaagaaactgggaagaggagctatgctcacagagaggaaaagcagtg

SEQ ID NO: 28885 - DNA, 925 bp, Macaca Mulatta
  misc_feature (1)...(925): n = A,T,C or G
atgggggccccctcagcccctccctgcacactgcacatcagctggaaggagctcctgctcacannnnnnnnnnnnnnnnnnnnnnnnnnnnnnnnnnnnnnnnnnnnnnnnnnnnnnnnnnnnnnnnnnnnnnnnnnnnnnnnnnnnnnnnnnnnnnnnnnnnnnnnnnnnnnnnnnnnnnnnnnnnnnnnnnnnnnnnnnnnnnnnnnnnnnnnnnnnnnnnnnnnnnnnnnnnnnnnnnnnnnnnnnnnnnnnnnnnnnnnnnnnnnnnnnnnnnnnnnnnnnnnnnnnnnnnnnnnnnnnnnnnnnnnnnnnnnnnnnnnnnnnnnnnnnnnnnnnnnnnnnnnnnnnnnnnnnnnnnnnnnnnnnnnnnnnnnnnnnnnnnnnnnnnnnnnnnnnnnnnnnnnnnnnnnnnnnnnnnnnnnnnnnnnngctgcccaagtcctacatcaccagcaacaacttcaaccccatggagaataagaatgttgtagcattaactgtgaacctaagactcagggctacacctatgtgtgatgggtaaatggtcagagcgtcctggtcagttcccaggttaaagcaacccggtaaaaacagtatcctcattctagcaaatgtcacaagaaatgacacaagaccctatgaatgtaaaatacgggatcgagttggtagcatccccagtgacccagtcaccctgnnnnnnnnnntggtccagacgtccccaggattttcccttcattgatcgactaccgttcaggacaaaacctctacttgtcatgcttcgcggactctaatccaccggcagagtatacttggacgataaatgggaagtttctgcaatcaggaccaaggatctatatccccaaaattactacaaagcatagcgggctctatcgttgctctgctcgtaactcagccactggca

SEQ ID NO: 28886 - DNA, 3075 bp, Macaca Mulatta
  misc_feature (1)...(3075): n = A,T,C or G
aggcctcccacaagttactgccgaatcgtcctcgtcacccccggggtccaaagtagcctcccttacacagcctgagaagaccacaggccgagagcctgcccgggacaccacccacagggagcccaccaggcaagcagcctcccgagagaccgaggaggccgggggcgccggnggcgggcccccagcaggcgtgcgatctatcatgaaacggaaagaggaggttgcagaccccacggcccaccggaggagcctccagtttgtgggggtcaacggcgggtnnnnnnnnnnnnnnnnnnnnnnnnnnnnnnnnnnnnnnnnnnnnnnnnnnnnnnnnnnnnnnnnnnnnnnnnnnnnnnnnnnnnnnnnnnnnnnnnnnnnnnnnnnnnnnnnnnnnnnnnnnnnnnnnnnnnnnnnnnnnnnnnnnnnnnnnnnnnnnnnnnnnnnnnnnnnnnnnnnnnnnnnnnnnnnnnnnnnnnnnnnnnnnnnnnnnnnnnnnnnnnnnnnnnnnnnnnnnnnnnnnnnnnnnnnnnnnnnnnnnnnnnnnnnnnnnnnnnnnnnnnnnnnnnnnnnnnnnnnnnnnnnnnnnnnnnnnnnnnnnnnnnnaaagtggcctacaccacagtgctgcaggagtggctgcgcctggcctgccgcagcgatgcacacgccgagctggtgcggcggcacctggtcacgttccgggccatgtctgcgcggctgctggactacgtggtcaacatcgccgacagcaacggcaacacggcgctgcactactccgtgtctcatgccaacttccccgtggtgcagcagctgctcgatagcggtgnnnnnnnnnnnnnnnnnnnnnnnnnnnnnnnnnnnnnnnnnnnnnnnnnnnnnnnnnnnnnnnnnnnnnnnnnnnnnnnnnnnnnnnnnnnnnnnnnnnnnnnnnnnnnnnnnnnnnnnnnnnnnnnnnnnnnnnnccaggcaggacagacggccctgatgctggcagtcagccacgggcgggtggacgttgtcaaagccctgctggcctgtgaggcagacatcaatgtgcaagatgatgatggctccacggccctcatgtgcgcctgtgagcacggccacaaggagattgcagggctgctgctggctgtacccagctgtgacatctcactcacagatcgcgatgggagcacagctctgatggtggccttggacgcggggcagagtgagattgcgtccatgctgtattcccgcatgaacatcaaatgctcnnnnnnnnnnnnnnnnnnnnnnnnnnnnnnnnnnnnnnnnnnnnnnnnnnnnnnnnnnnnnnnnnnnnnnnnnnnnnnnnnnnnnnnnnnnnnnnnnnnnnnnnnnnnnnnnnnnnnnnnnnnnnnnnnnnnnnnnnnnnnnnnnnnnnnnnnnnnnnnnnnnnnnnnnnnnnnnnnnnnnnnnnnnnnnnnnnnnnnnnnnnnnnnnnnnnnnnnnnnnnnnnnnnnnnnnnnnnnnnnnnnnnnnnnnnnnnnnnnnnnnnnnnnnnnnnnnnnnnnnnnnnnnnnnnnnnnnnnnnnnnnnnnnnnnnnnnnnnnnnnnnnnnnnnnnnnnnnnnnnnnnnnnnnnnnnnnnnnnnnnnnnnnnnnnnnnnnnnnnnnnnnnnnnnnnnnnnnnnnnnnnnnnnnnnnnnnnnnnnnnnnnnnnnnnnnnnnnnnnnnnnnnnnnnnnnnnnnnnnnnnnnnnnnnnnnnnnnnnnnnnnnnnnnnnnnnnnnnnnnnnnnnnnnnnnnnnnnnnnnnnnnnnnnnnnnnnnnnnnnnnnnnnnnnnnnnnnnnnnnnnnnnnnnnnnnnnnnnnnnnnnnnnnnnnnnnnnnnnnnnnnnnnnnnnnnnnnnnnnnnnnnnnnnnnnnnnnnnnnnnnnnnnnnnnnnnnnnnnnnnnnnnnnnnnnnnnnnnnnnnnnnnnnnnnnnnnnnnnnnnnnnnnnnnnnnnnnnnnnnnnnnnnnnnnnnnnnnnnnnnnnnnnnnnnnnnnnnnnnnnnnnnnnnnnnnnnnnnnnnnnnnnnnnnnnnnnnnnnnnnnnnnnnnnnnnnnnnnnnnnnnnnnnnnnnnnnnnnnnnnnnnnnnnnnnnnnnnnnnnnnnnnnnnnnnnnnnnnnnnnnnnnnnnnnnnnnnnnnnnnnnnnnnnnnnnnnnnnnnnnnnnnnnnnnnnnnnnnnnnnnnnnnnnnnnnnnnnnnnnnnnnnnnnnnnnnnnnnnnnnnnnnnnnnnnnnnnnnnnnnnnnnnnnnnnnnnnnnnnnnnnnnnnnnnnnnnnnnnnnnnnnnnnttacccagaaacctctcccttccccacatggaggtcttggcaaatgttaattttcctagaaaatccttcagacctggagacgaagaaaagaatctggctctcagggtgacttctgtgtccccccgccaggccccggagtatggtcacagggccgtcctgttcctccctgggactccagaatttctctcctcaaaggaaagaaaacagggcatgtgcttgttggcaaaacgcagggccagctcccaagaaccccatgtgtgcacgattaaaagttggccgttcccaggcctcccggcgcaaacttaaagagacagggctttgctgaaaaccaaacgtgggccagctggcctttttaacaacctagaggctttccggagctgcctggaacagagcctgcgggaaacagagcttgccagagacgctcacagtttccttcgtggcctgttttggtcccccaagaatctccacatcattttctttcttgtgccttttccttggtgagcaacagaaagggaagggttccaagcctctaaaaatgtgccttgtgatcaggagtgtgctccaaaccaaatatgtgcgctgccctttcgaggccagtgagctcagcccccaaggctttaaaagccacatttcagcaagagaaagcgccgagagctcgcaggttcattaaagaaggcaaagcactggtttctctccttagaaaagtaggtttcttggcttgatgtagattggcttgctttgatttttagtgaagggaatgtacgaaaacaaa

SEQ ID NO: 28887 - DNA, 2884 bp, Macaca Mulatta
  misc_feature (1)...(2884): n = A,T,C or G
agtgtgtggcccagcccttcccccgtggccaagcagagagggtggccttgaggaagccatagcagcatggcctctgctgcctctgtgaccagcctggcagatgaagtcaactgccccatctgccagggtaccctgagggagccggtcactatcgactgcggccacaacttctgccggggctgccttactcgctactgtgagatcccaggcccagacctggaggagtcccctacttgcccactctgcaaagaacccttccgtcctgggagcttccggcccaactggcagctggctaacgtggtggagaacatcgagcgcctccagctggtgtccacactgggtttgggagaggaggatgcctgccaggagcacnnnnnnnnnnnnnnnnnnnnnnnnnnnnnnnnnnnnnnnnnnnnnnnnnnnnnnnnnnnnnnnnnnnnnnnnnnnnnnnnnnnnnnnnnnnnnnnnnnnnnnnnnnnnnnnnnnnnnnnnnnggaacaaatacataagtgtcttaaatgtctaagaaaagagagagaggagattcaagaaatccagtcaagagaaaataaaaggatgcaagtcctcctnnnnnnnnnnnnnnnnnnnnnnnnnnnnnnnnnnnnnnnnnnnnnnnnnnnnnnnnnnnnnnnnnnnnnnnnnnnnnnnnnnnnnnnnnnnnnnnnnnnnnnnnnnnnnnnnnnnnnnnnnnnnnnnnnnnnnnnnnnnnnnnnnnnnnnnnnnnnnnnnnnnnnnnnnnnnnnnnnnnnnnnnnnnnnnnnnnnnnnnnnnnnnnnnnnnnnnnnnnnnnnnnnnnnnnnnnnnnnnnnnnnnnnnnnnnnnnnnnnnnnnnnnnnnnnnnnnnnnnnnnnnnnnnnnnnnnnnnnnnnnnnnnnnnnnnnnnnnnnnnnnnnnnnnnnnnnnnnnnnnnnnnnnnnnnnnnnnnnnnnnnnnnnnnnnnnnnnnnnnnnnnnnnnnnnnnnnnnnnnnnnnnnnnnnnnnnnnnnnnnnnnnnnnnnnnnnnnnnnnnnnnnnnnnnnnnnnnnnnnnnnnnnnnnnnnnnnnnnnnnnnnnnnnnnnnnnnnnnnnnnnnnnnnnnnnnnnnnnnnnnnnnnnnnnnnnnnnnnnnnnnnnnnnnnnnnnnnnnnnnnnnnnnnnnnnnnnnnnnnnnnnnnnnnnnnnnnnnnnnnnnnnnnnnnnnnnnnnnnnnnnnnnnnnnnnnnnnnnnnnnnnnnnnnnnnnnnnnnnnnnnnnnnnnnnnnnnnnnnnnnnnnnnnnnnnnnnnnnnnnnnnnnnnnnnnnnnnnnnnnnnnnnnnnnnnnnnnnnnnnnnnnnnnnnnnnnnnnnnnnnnnnnnnnnnnnnnnnnnnnnnnnnnnnnnnnnnnnnnnnnnnnnnnnnnnnnnnnnnnnnnnnnnnnnnnnnnnnnnnnnnnnnnnnnnnnnnnnnnnnnnnnnnnnnnnnnnnnnnnnnnnnnnnnnnnnnnnnnnnnnnnnnnnnnnnnnnnnnnnnnnnnnnnnnnnnnnnnnnnnnnnnnnnnnnnnnnnnnnnnnnnnnnnnnnnnnnnnnnnnnnnnnnnnnnnnnnnnnnnnnnnnnnnnnnnnnnnnnnnnnnnnnnnnnnnnnnnnnnnnnnnnnnnnnnnnnnnnnnnnnnnnnnnnnnnnnnnnnnnnnnnnnnnnnnnnnnnnnnnnnnnnnnnnnnnnnnnnnnnnnnnnnnnnnnnnnnnnnnnnnnnnnnnnnnnnnnnnnnnnnnnnnnnnnnnnnnnnnnnnnnnnnnnnnnnnnnnnnnnnnnnnnnnnnnnnnnnnnnnnnnnnnnnnnnnnnnnnnnnnnnnnnnnnnnnnnnnnnnnnnnnnnnnnnnnnnnnnnnnnnnnnnnnnnnnnnnnnnnnnnnnnnnnnnnnnnnnnnnnnnnnnnnnnnnnnnnnnnnnnnnnnnnnnnnnnnnnnnnnnnnnnnnnnnnnnnnnnnnnnnnnnnnnnnnnnnnnnnnnnnnnnnnnnnnnnnnnnnnnnnnnnnnnnnnnnnnnnnnnnnnnnnnnnnnnnnnnnnnnnnnnnnnnnnnnnnnnnnnnnnnnnnnnnnnnnnnnnnnnnnnnnnnnnnnnnnnnnnnnnnnnnnnnnnnnnnnnnnnnnnnnnnnnnnnnnnnnnnnnnnnnnnnnnnnnnnnnnnnnnnnnnnnnnnnnnnnnnnnnnnnnnnnnnnnnnnnnnnnnnnnnnnnnnnnnnnnnnnnnnnnnnnnnnnnnnnnnnnnnnnnnnnnnnnnnnnnnnnnnnnnnnnnnnnnnnnnnnnnnnnnnnnnnnnnnnnnnnnnnnnnnnnnnnnnnnnnnnnnnnnnnnnnnnnnnnnnnnnnnnnnnnnnnnnnncccaagcttagaattcaattgagaagttctgttgttcatccttagctcagcaggtagaaaagagggggagatcagaagccagggattagagattgaattgctttccctggaagtgtgcagtatctcattaaaatgttgtatattcaaaaaaatatagacacacacaagtgcctatataatgataaaacatatccaaaacacccaaacctgtgattccactcaaaagtagatcctatttttctgtttatttttattggctttagccatgtcttttgaaaggactgttatcctctaaaatgtatgtgtatgaagatcctggcttgctgttggggagctttacacaccttgtgtcactttatcttggtaactagccaagattacgcaaccagttcatccgtgtctgacccaggaactcttaactgctgtgctgcgctgcctcattcagagagagatgcctgcatgggtcctggtgattattttaatgctggctacacccccacaagtgacttggattcagaaatac

SEQ ID NO: 28888 - DNA, 751 bp, Macaca Mulatta
  misc_feature (1)...(751): n = A,T,C or G
ggtaaaactcttgcctattgcatccctgtggtccagtcccttcaagcaatgaagtcaaaaatacagnnnnnnnnnnnnnnnnnnnnnnnnnnnnnnnnnnnnnnnnnnnnnnnnnnnnnnnnnnnnnnnnnnnnnnnnnnnnnnnnnnnnngcctttcacctggattgtgcctggagtgttaatgggaggagagaagagaaaatcagaaaaggccagnnnnnnnnnnnnnnnnnnnnnnnnnnnnnnnnnnnnnnnnnnnnnnnnnnnnnnnnnnnnnnnnnnnnnnnnnnnnnnnnnnnnnnnnnnnnnnnnnnnnnnnnnnnnnnnnnnnnnnnnnnnnnnnnnnnnnnnnnnnnnnnnnnnnnnnnnnnnnnnnnnnnnnnnnnnnnnnnnnnnnnnnnnnnnnnnnnnnnnnnnnnnnnnnnnnnnnnnnnnnnnnnnnnnnnnnnnnnnnnnnnnnnnnnnnnnnnnnnnnnnnnnnnnnnnnnnnnnnnnnnnnnnnnnnnnnnnnnnnnnnnnnnnnnnnnnnnnnnnnnnnnnnnnnnnnnnnnnnnnnnnnnnnnnnnnnnnnnnnnnnnnnnnnnnnnnnnnnnnnnnnnnnnnnnnnnnnnnnnnnnnnnnnnnnnnnnnnnnnnnnnnnnnnnnnnnnnnnnnnnnnnnnnnnnnnnnnnnnnnnngtttgagaaagaccagaagatggttgtctttttctcaagtgcgagctggtggagttcactacagcctcttcct

SEQ ID NO: 28889 - DNA, 283 bp, Macaca Mulatta
ggaatccagaaaaaacaaaatgccaagaggtttaaaagacggtggatggtcagaaagatgaaaactaagaagtaaatcaatgctaaatgaagaatctgtactttgtatgtatagaatttatctaataaattattggtagataatattaaaggatcattataaaaatcataaacctatttgaggaattactcaaccacatttcattcttctggataaggattgtgccttgcaatcctagaggaaaaagtggttaaaagggaattttctttttaatgtatttaac

SEQ ID NO: 28890 - DNA, 875 bp, Macaca Mulatta
  misc_feature (1)...(875): n = A,T,C or G
gggctttctttgctgcgtctactgcaagaatgaagaccattctcagcaatcagactgtcgacattccagaaaatggtatgagacttgatatctttttcatacatctttactacacgttccaagcgttctcagcaatcagactgtcgacattccagaaaatgtcgacattaccctgaagggacgcacagttatcgtgaagggccccagaggaactctgcggagggacttcaatcacatcaatgtagaactcagtcttcttnnnnnnnnnnnnnnnnnnntttcgggttgacaaatggtggggtaacagaaaggaactggctaccgttcggactatttgtagtcatgtacagaacatgatcaagggtgttacactgggcttccgttacaagatgaggtctgtgtatgctcacttccccatcaacgttgttatccaggagaatgggtctcttgttgaaatccgaaatttcttgggtgaaaaatacatccgcagggttcggatgagaccaggtgttgcttgttcagtatctcaagcccagaaagatgaattaatccttgaaggaaatgacattgaacttgtttcaaattcagcggctttgattcagcaagccacaacagttaaaaacaaggatatcaggaaatttttggatggtatctatgtctctgaaaaaggaactgttcagcaggctgatgaataagatctaagagttatccagctacagaaagaagatgccagatgactcctaagacctacttgtgatatttaaatgatgcaataaaagacctgttgatttgtaaaacaaaaatataaaatgagtaaaatgtgtcttgtttgggcccgccttcggccctctcaaagaagcttttcttgaccatta

SEQ ID NO: 28891 - DNA, 439 bp, Macaca Mulatta
aaggactgaatagattatatattgccagatgttaatactgtaacatactttttaaataacatatttcttaaatccaaatttctctcaatgttagatttaattccctcaataacatcagtgttttgttttgttttgttctgagtcataaaactttgttaaagaactcttttggaataaaaagcaggatgctgcaaagttatagtctgtccctcaatgctcactgtcaactaccagcgggagtgtcagggaaaagataattggcaatagatagactctgaattgcaacattataaataatgacgatgactgaggcaatgaaagcactgagcttttcctggagctgccagcatagtttttaagggcctctgcttagcaatatgaaaaagactttatgtggaggtgcccattgggaggagggtctacttgctaaattcatctt

SEQ ID NO: 28892 - DNA, 482 bp, Macaca Mulatta
  misc_feature (1)...(482): n = A,T,C or G
gcagagcccacagtgcggactgagctgatggaacagattcctcctattgccatttttttacaagaaaacagatcagattttccagtggtgctctctgaatatctcatacctattgtagtgaggtacctcacagatccaaacaatcagnnnnnnnnnnnnnnnnnnnnnnnnnnnnnnnnnnnnnnnnnnnnnnnnnnnnnnnnnnnnnnnnnnnnnnnnnnnnnnnnnnnnnnnnnnnnnnnnnnnnnnnnnnnnnnnnnnnnnnnnnnnnnnnnnnnnnnnnnnnnnnnnnnnnnnnnnnnnnnnnnnnnnnnnnnnnnatcccaaagttctttgagctctgctctgatgctgtttggggcatgcggaaagcctgtgcggagtgcttcacggctgtgtcacacagctcctcccctggggtccgcagaacccagctctccccgctcttcatcagacttgtcagcgacccctgccgatgggtg

SEQ ID NO: 28893 - DNA, 581 bp, Macaca Mulatta
attggacagcaacagaacctaaagaaagaaaaagagcccacattgggtttgttgaaattaaacggaagtgttttcaagaagtttgaaaagaacaacctctttcaaatgtcaaatagtgatattaaggaacgattcacaaattatgtgcttttactaatagtgtgtctaagaaacatggaacagttttcttggaatccagatcatctctgggtgttgtttccagatgtctgtatggtaattgcatcagaaattgccgtggatattgtaaaacatgcctttatcaccaaattcaatgacattactgcagatgtctacagtgaatatagagccagtcttgcttttgaccttgttagcagccgacagaaaaatgcatacactgattacagcgactctgtagcacggaggatgggctttattcctctcccactagctgttttactcatcagagttgtaacaagctcaattaaagtgcaaggaatcctgtcttatgcctgtgtcatactcttctatttagggttgatatccctgaaagtacttaatagcattgtgctgtaggggaaatcgtgccagtatgtgacaga

SEQ ID NO: 28894 - DNA, 633 bp, Macaca Mulatta
  misc_feature (1)...(633): n = A,T,C or G
ggggagtagggcggtttcattttctttccttgtaatccttgtgctaagaggtaagaaacacttaaggtcatttaaggtgctaaggaatgggttttcccatggagctttctgtaaggcgcagtaaaatagagccagcagcaaagtagaggaaaaagccagactgcgtcacacaagatttctcatccttttcaggagagagttactgtatagatttgaatcttttttctttgagtctgctttgaacttcagcaggcttttcctaagactgacaattgtcatcgtaaatgagagatttgagggtagacttattttatggtaaatgtctatttttctgatataaaagtaacaatgctcattacagaagagtctaaacaaagaataaaaattagctatcttctctccatctggaacagagctaaactttgctgatatgtttatgaatttcctttcagtattaaaaagtgcatataaggtgtatattatttaaacaaaattgaaggtcatacatatatacaggttggtatcctaactttatcctctgattaacatggtatcacgagtaacttcctatgtttttaaatctttgaaaatagatttctagtggttctaccttatccatccccatactgttgn

SEQ ID NO: 28895 - DNA, 1621 bp, Macaca Mulatta
  misc_feature (1)...(1621): n = A,T,C or G
nagatcaaccggagagcaagaagctggcttcccagggagacnnnnnnnnnnnnnnnnnnnnnnnnnnnnnnnnnnnnnnnnnnnnnnnnnnnnnnnnnnnnnnnnnnnnnnnnnnnnnnnnnnnnnnnnnnnnnnnnnnnnnnnnnnnnnnnnnnnnnnnnnnnnnnnnnnnnnnnnnnnnnnnnnnnnnnnnnnnnnccagacagcggtggcctacctgagcgcagcgtgtccttgacaggagccccagaatctgtccagnnnnnnnnnnnnnnnnnnnnnnnnnnnnnnnnnnnnnnnnnnnnnnnnnnnnnnnnnnnnnnnnnnnnnnnnnnnnnnnnnnnnnnnnnnnnnnnnnnnnnnnnnnnnnnnnnnnnnnnnnnnnnnnnnnnnnnnnnnnnnnnnnnnnnnnnnnnnnnnnnnnnnnnnnnnnnnnnnnnnnnnnnnnnnnnnnnnnnnnnnnnnnnnnnnnnnnnnnnnnnnnnnnnnnnnnnnnnnnnnnnnnnnnnnnnnnnnnnnnnnnnnnnnnnnnnnnnnnnnnnnnnnnnnnnnnnnnnnnnnnnnnnnnnnnnnnnnnnnnnnnnnnnnnnnnnnnnnnnnnnnnnnnnnnnnnnnnnnnnnnnnnnnnnnnnnnnnnnnnnnnnnnnnnnnnnnnnnnnnnnnnnnnnnnnnnnnnnnnnnnnnnnnnnnnnnnnnnnnnnnnnnnnnnnnnnnnnnnnnnnnnnnnnnnnnnnnnnnnnnnnnnnnnnnnnnnnnnnnnnnnnnnnnnnnnnnnnnnnnnnnnnnnnnnnnnnnnnnnnnnnnnnnnnnnnnnnnnnnnnnnnnnnnnnnnnnnnnnnnnnnnnnnnnnnnnnnnnnnnnnnnnnnnnnnnnnnnnnnnnnnnnnnnnnnnnnnnnnnnnnnnnnnnnnnnnnnnnnnnnnnnnnnnnnnnnnnnnnnnnnnnnnnnnnnnnnnnnnnnnnnnnnnnnnnnnnnnnnnnnnnnnnnnnnnnnnnnnnnnnnnnnnnnnnnnnnnnnnnnnnnnnnnnnnnnnnnnnnnnnnnnnnnnnnnnnnnnnnnnnnnnnnnnnnnnnnnnnnnnnnnnnnnnnnnnnnnnnnnnnnnnnnnnnnnnnnnnnnnnnnnnnnnnnnnnnnnnnnnnnnnnnnnnnnnnnnnnnnnnnnnnnnnnnnnnnnnnnnnnnnnnnnnnnnnnnnnnnnnnnnnnnnnnnnnnnnnnnnnnnnnnnnnnnnnnnnnnnnnnnnnnnnnnnnnnnnccggagggccccctcctcatcaatacccaccccagggctggggcaatacctacccccagtggaaaccgcctgctcctcannnnnnnncaaagcagctgcaccgtccgcggaccccaatgccgcgtgggccgcctactactcactctactaccagcagcccccgggccccgtcccaggccctgcgccggcccctgcggccccaccggctcagggtgagccccctcagcccccacccaccggccagtcggactacactaaggcctgggaagagtattacaaaaagatcgnggccagcagccccagaagcccgaaacgcccccacagcacgactacacgaaggcctgggaggagtactacaagaagcaag

SEQ ID NO: 28896 - DNA, 635 bp, Macaca Mulatta
  misc_feature (1)...(635): n = A,T,C or G
ggagcaggggcgcacggccagggcagaagctgagaccacccagncggaggagctaggccagtccatctgcatttgtcacctaagaactcttaccatgaagaccctcctgttgttggcagtgatcatgatctttggccttctgcaggcccatgggaatttggtggatttccggagaatgatcaagttgaagacaggaaaggaagctgcactcagttatggcttctacggctgccactgtggcgtgggtggcaaaggagcccccaaggatgcaacggatcgctgctgtgtcgttcatgactgttgctacaaacgtctggagaaacgtggatgcggcaccaaatttctgagctacaagtttagcaacaaggggagcacaatcacctgtgcaaaacaggactcctgcagaagtcaactgtgtgaatgcgataaggctgctgcctactgttttgctagaaacaagagtacctataataaaaactaccagtactattccaataaattctgcagagggagcacccctcgttgctgagtcccctcttccctggaaaccttccacccaatgctgagtttccttctctcataccctccttccctagcctaaccaagttccttggcaatgcggaaagcatccctca

SEQ ID NO: 28897 - DNA, 369 bp, Macaca Mulatta
gtagagggctgaaggtcctgccaacggctctcttggtgtctcaacgttctggtcagcagctttttgccgtttctctctctccacttcttgagcgagcagccatgagttggactgtgcctcttgtgcgggccagccagagagtgagctcggtgggagcgaatttcctgtgcctgaagatggccctgtgtccccgtcaggcagcgcgcatcccactcaagggcgcctggcgcttcacctccgtgagcaagatggcgactgtgaagagtgagcttattgagcgcttcacttctgaggagcccgttcatcacagtaaggtctccatcatgggaactggatcggtgggcatggcctgcgctatcagcatcttat

SEQ ID NO: 28898 - DNA, 693 bp, Macaca Mulatta
gggataggtccaagaacaattgtctctgtatggcagctatgcgactcaccgtgctatgtgctgtgtgcctgctgcctggcagcctggccctgccgctgcctcgggaggcaggaggcatgagtgagctccagtggaaacaggctcaggactatctcaagagattttatctctatgactcagaaacaaaaaatgccaacagtttagaagccaaactcaaggagatggaaaaattctttggcctgcctataactggaatgttaaactcccgcatcatagaaataatgcagaagcccagatgtggagtgccagatgttgcagaatactcactatttccaaatagcccaaaatggacttccaaagtagttacctacaggattgtatcatatactcgagacttaccgcattttacagtggatcgattagtgtcaaaggctttaaacatgtggggcaaagagatccccctgcatttcaggaaagttgtatggggaactgctgacatcatgattggctttgcacgaggagctcatggggacccatacccgtttgatgggccaggaaacacgctggctcatgcctttgcacctgggccaggtcttggaggagatgctcacttcgatgaggatgaacgctggacggatggtagcagtctaggaaattaactttcctggtatgctgcaaacgcatggaacttga

SEQ ID NO: 28899 - DNA, 2424 bp, Macaca Mulatta
  misc_feature (1)...(2424): n = A,T,C or G
caggtgggccaaagggggtttcttgattgaagacgcccacgagagtcgctatgagacaaatgtggattattcctttttgcacggagccctgtgtcttgtgaggttcacaacgaagtagggagcaccaatgtcagcactttagtaaatgtccacnnnnnnnnnnnnnnnnnnnnnnnnnnnnnnnnnnnnnnnnnnnnnnnnnnnnnnnnnnnnnnnnnnnnnnnnnnnnnnnnnnnnnnnnnnnnnnnnnnnnnnnnnnnnnnnnnnnnnnnnnnnnnnnnnnnnnnnnnnnnnnnnnnnnnnnnnnnnnnnnnnnnnnnnnnnnnnnnnnnnnnnnnnnnnnnnnnnnnnnnnnnnnnnnnnnnnnnnnnnnnnnnnnnnnnnnnnnnnnnnnnnnnnnnnnnnnnnnnnnnnnnnnnnnnnnnnnnnnnnnnnnnnnnnnnnnnnnnnnnnnnnnnnnnnnnnnnnnnnnnnnnnnnnnnnnnnnnnnnnnnnnnnnnnnnnnnnnnnnnnnnnnnnnnnnnnnnnnnnnnnnnnnnnnnnnnnnnnnnnnnnnnnnnnnnnnnnnnnnnnnnnnnnnnnnnnnnnnnnnnnnnnnnnnnnnnnnnnnnnnnnnnnnnnnnnnnnnnnnnnnnnnnnnnnnnnnnnnnnnnnnnnnnnnnnnnnnnnnnnnnnnnnnnnnnnnnnnnnnnnnnnnnnnnnnnnnnnnnnnnnnnnnnnnnnnnnnnnnnnnnnnnnnnnnnnnnnnnnnnnnnnnnnnnnnnnnnnnnnnnnnnnnnnnnnnnnnnnnnnnnnnnnnnnnnnnnnnnnnnnnnnnnnnnnnnnnnnnnnnnnnnnnnnnnnnnnnnnnnnnnnnnnnnnnnnnnnnnnnnnnnnnnnnnnnnnnnnnnnnnnnnnnnnnnnnnnnnnnnnnnnnnnnnnnnnnnnnnnnnnnnnnnnnnnnnnnnnnnnnnnnnnnnnnnnnnnnnnnnnnnnnnnnnnnnnnnnnnnnnnnnnnnnnnnnnnnnnnnnnnnnnnnnnnnnnnnnnnnnnnnnnnnnnnnnnnnnnnnnnnnnnnnnnnnnnnnnnnnnnnnnnnnnnnnnnnnnnnnnnnnnnnnnnnnnnnnnnnnnnnnnnnnnnnnnnnnnnnnnnnnnnnnnnnnnnnnnnnnnnnnnnnnnnnnnnnnnnnnnnnnnnnnnnnnnnnnnnnnnnnnnnnnnnnnnnnnnnnnnnnnnnnnnnnnnnnnnnnnnnnnnnnnnnnnnnnnnnnnnnnnnnnnnnnnnnnnnnnnnnnnnnnnnnnnnnnnnnnnnnnnnnnnnnnnnnnnnnnnnnnnnnnnnnnnnnnnnnnnnnnnnnnnnnnnnnnnnnnnnnnnnnnnnnnnnnnnnnnnnnnnnnnnnnnnnnnnnnnnnnnnnnnnnnnnnnnnnnnnnnnnnnnnnnnnnnnnnnnnnnnnnnnnnnnnnnnnnnnnnnnnnnnnnnnnnnnnnnnnnnnnnnnnnnnnnnnnnnnnnnnnnnnnnnnnnnnnnnnnnnnnnnnnnnnnnnnnnnnnnnnnnnnnnnnnnnnnnnnnnnnnnnnnnnnnnnnnnnnnnnnnnnnnnnnnnnnnnnnnnnnnnnnnnnnnnnnnnnnnnnnnnnnnnnnnnnnnnnnnnnnnnnnnnnnnnnnnnnnnnnnnnnnnnnnnnnnnnnnnnnnnnnnnnnnnnnnnnnnnnnnnnnnnnnnnnnnnnnnnnnnnnnnnnnnnnnnnnnnnnnnnnnnnnnnnnnnnnnnnnnnnnnnnnnnnnnnnnnnnnnnnnnnnnnnnnnnnnnnnnnnnnnnnnnnnnnnnnnnnnnnnnnnnnnnnnnnngacagggaaagtgaagcttggggagagcagagggggcactttttagcattccctttctatcccacccctctgatctaccataagtggaaataggggtacccagggtgggcaggctttggcctagggacatgaagtatgggagtgggtggctgtggctcagacaggtggaaaacaggatagcctggccagtccctgtgttgtttgcattcgtgccctgggtgcatctctccttcctcagggtactacagaagnnnnnnnnnnnnnnntgttcgctctagtctacagaacagccctggcactgcatacaaaaacagccttcattcagctgggatcaaaatgccagtcaccttggcccactgtggacagctgtctgtcagcatgcagagggatccaggaatccccggcagcactgcccgctttccttctcgtctatgctgggccagccagataagtcagggtcctggtggagaaagaaaggccaggaccatgtcctgattgacccagagaccgctgtgtgctgcgcagcagttagcagaaccaacactagagggagccacacaggcctcctctccccagtctgccccacttcctggcttta

SEQ ID NO: 28900 - DNA, 171 bp, Macaca Mulatta
tggtccatgccaaggtgatgctgctaggccgcagctgtagacgtggtggtagtgtgtgtcatgttggaaggtgtgtttgttcagacacgctagtcctaggggctgctgggcatatcactggcgacatgcccaatggggtgagggcagcggtctcgggtgttcagagtcgag

SEQ ID NO: 28901 - DNA, 2825 bp, Macaca Mulatta
  misc_feature (1)...(2825): n = A,T,C or G
ccccacacgcgccccctccccgccggcgacccgagggccgcagctgggccgccgccgccgcttcctgcgagcccgcctgagcgcgacacttctccaagccagcgagccagcgagccagcgagccgccgacccgccgagcaaaatgggaaatgaggcaagttatcctttggaaatgtgctcacactnnnnnnnnnnnnnnnnnnnnnnnnnnnnnnnnnnnnnnnnnnnnnnnnnnnnnnnnnnnnnnnnnnnnnnnnngtggaagagttcatgtctctgcctgagttacacagaatcctttagtacagcgagtaatactatatattcgacacagatgggaatggagaagtagactttaaagngaattcattgagggcgtctctcagttcagtgtcaaaggagataaggagcagaagttgaggttgctttccgtatctatgacatggataaagatggctatatttccaatggggaactcttccaggtattgaagatgatggtggggaacaatctgaaagatacacagttacagcaaattgtagacaaaaccataataaatgcagataaggatggagatggaagaatatcctttgaagaattctgtgctgtnctgttgtaggtggcctagatatccacaaaaagatggtggtagatgtgtgactcttatcagagagtaccacccaacacttttgctttcttctccatctctgaagatctgctcaagacgtccagcaatgctctctgtgtatttaaatggaagtatttttctctgtgaagccacattttccaacatgagcctcatgaagccaactaagtgttattgaactgtaattctctcaataactcagtgtagcactttaaagtctgaaggacagcagcatgaaaagagcatatcaatgtggtggagaaagggaaggggttggctttttaatttatttttcttcatcttttataacaagaaagtatctannnnnnnnnnnnnnnnnnnnnnnnnnnnnnnnnnnnnnnnnnnnnnnnnnnnnnnnnnnnnnnnnnnnnnnnnnnnnnnnnnnnnnnnnnnnnntagctctctatatatgtagtaggttggctttaatttaatatacttgattcagaaacaaaacaatagagtacaaaagtgccaagcagaacataaaacatccttacttttatttcacacagttttatatatagatagaagactgtacaatttgagccgggtgttaggccagctattttccttttcctgtgctttctcctctgagagattgacaaagcatttgttaacgtcctattatttaccttaattacatttttgtaacaaaggagtctgtaactttatttatacttacgaatatatttccagggactactactcattgctgagcagcttttaatacacctctgcttgaggagaaagtctagttcattgctactgccaagagctagttcttgtgttcatatagtaactgcacagtgcttatggctgcttcattgttactttgtaactaggagccattgcatttattaaatgtccctcagtaagtgctagttgtgattttatacataaaggccagaagctgtctgaggcaatcatgactaatattgtatgtatcacttactgaagaatacctgaagtgatcatgtaactacttaggatatccatttgtttgattacatgggtaaataatttgtcattaaacttgtgtttgaatcatgaatttcccttctgtgtttcaaaagacttgcagctaatctaaaaaactggtgatatttaatatgcatgtatgtatctaaacaccccacatatattttgtggtttaagtgtgagaaatcttgctaacgtatatgccacagaagagcaaaattttatccaaatttatacgtcttaaatttctttaccacgagggatagagcatgcataatgtttttttccccttgatttgcttatataattggtaatggatgataacttaataaatttgtgtgatataaaagtagtgtatcatgttctaccatttgatcttatcccttcccatttctgcaaaggtactattggctggaagaaaaacattttggttagctttgtatgacagtagtctttccctttatagtttttctataaaaactggttttaaaatcagtagaaaagggcaggttgaatcaaggtgaatgaatctgaaattgagcacacctgcctgtcatcgctgttccttcagctgagtgctgcacatcatgggctctgtctgtgagagaaaaatcccggtgcttggtgtccttgcatgacatggagttttgcatgtagatcaatttaaaatgtacctcttgtttacataatttgcataattttgaaagataatgttgccaaactttggaaatgttaatgttcagactgaaaatctccactacatgtaacttttttcctctggatcagtggcatggcttataatcccagccagtggtttgaactgttccagtgtcaactgccatgtgctctgcttcaggggggaactagtcttttgtgaattttttgtacataagtatttgttacaaatattttagcaaatgctttctatttctcttgcttgtgcatatcttggctggcgttacagaaaaatagtgcaaacattatttccttactggggaatgagggtttnnnnnnnnnnnnnnnnnnnnnnnnnnnnnnnnnnnnnnnnnnnnnnnnnnnnnnnnnnnnnnnnggtttatgttgaatgtttagtttttcttctgcatgatacgtcatgttgtgggatctttagaaaacttcatactgtatgaataagaaaataaaatatttgaaactt

SEQ ID NO: 28902 - DNA, 2580 bp, Macaca Mulatta
  misc_feature (1)...(2580): n = A,T,C or G
aggtagaagcagcaaagaaagcccaccatgcagcgtgcaaagaggagaagctggctatctcacgagaagccaatagcaaggcagacccatccctcatccctgaacagctcaagaaattgcaagacaaaatagaaaagtgcaagcaagatgtttttaannnnnnnnnnnnnnnnnnnnnnnnnnnnnnnnnnnnnnnnnnnnnnnnnnnnnnnnnnnnnnnnnnnnnnnnnnnnnnnnnnnnnnnnnnnnnnnnnnnnnnnnnnnnnnnnnnnnnnnnnnnnnnnnnnnnnnnnnnnnnnnnnnnnnnnnnnnnnnnnnnnnnnnnnnnnnnnnnnnnnnnnnnnnnnnnnnnnnnnnnnnnnnnnnnnnnnnnnnnnnnnnnnnnnnnnnnnnnnnnnnnnnnnnnnnnnnnnnnnnnnnnnnnnnnnnnnnnnnnnnnnnnnnnnnnnnnnnnnnnnnnnnnnnnnnnnnnnnnnnnnnnnnnnnnnnnnnnnnnnnnnnnnnnnnnnnnnnnnnnnnnnnnnnnnnnnnnnnnnnnnnnnnnnnnnnnnnnnnnnnnnnnnnnnnnnnnnnnnnnnnnnnnnnnnnnnnnnnnnnnnnnnnnnnnnnnnnnnnnnnnnnnnnnnnnnnnnnnnnnnnnnnnnnnnnnnnnnnnnnnnnnnnnnnnnnnnnnnnnnnnnnnnnnnnnnnnnnnnnnnnnnnnnnnnnnnnnnnnnnnnnnnnnnnnnnnnnnnnnnnnnnnnnnnnnnnnnnnnnnnnnnnnnnnnnnnnnnnnnnnnnnnnnnnnnnnnnnnnnnnnnnnnnnnnnnnnnnnnnnnnnnnnnnnnnnnnnnnnnnnnnnnnnnnnnnnnnnnnnnnnnnnnnnnnnnnnnnnnnnnnnnnnnnnnnnnnnnnngggacgagctgaccaagatggaggacgaggatgagcagggctggtgcaagggacgattggacaacgggcaagttggcctatacccggcaaattatgtggaggcgatccagtgatgagccaggggtcaggccagcgggggacggaggcggcgggcccaggagcttcagccagccatgtgggcatccactccttttcctgcaagagatgatggttccattgctcttggcttcatggtgtccctggaaggcagatgagctggtcatttcgcctgggactcggcacctttccgagtgcagctggagggatctgagcgcaggaagacgcagaacaacagaaatagctgcccctccccgcccactgtgcctattggcctatcatggatctctatgttcttgactttgtctctcctttnnnnnnnnnnnnnnnnnnnnnnnnnnnnnnnnnnnnnnnnnnnnnnnnnnnnnnnnnnnnnnnnnnnnnnnnnnnnnnnnnnnnnnnnnnnnnnnnnnnnnnnnnnnnnnnnnnnnnnnnnnnnnnnnnnnnnnnnnnnnnnnnnnnnnnnnnnnnnnnnnnnnnnnnnnnnnnnnnnnnnnnnnnnnnnnnnnnnnnnnnnnnnnnnnnnnnnnnnnnnnnnnnnnnnnnnnnnnnnnnnnnnnnnnnnnnnnnnnnnnnnnnnnnnnnnnnnnnnnnnnnnnnnnnnnnnnnnnnnnnnnnnnnnnnnnnnnnnnnnnnnnnnnnnnnnnnnnnnnnnnnnnnnnnnnnnnnnnnnnnnnnnnnnnnnnnnnnnnnnnnnnnnnnnnnnnnnnnnnnnnnnnnnnnnnnnnnnnnnnnnnnnnnnnnnnnnnnnnnnnnnnnnnnnnnnnnnnnnnntactcttttgcaaattaacaattttatcagtgattcagagttaaaaagaagactaacttttcaagcaaatgcatctgtagataaagatgctttatattagactgtcgtgtctcagtgtatatctgtatatattatttgatattcagagaatctaaagcactcatctactgttttaatgagatttaacagtgagtttcgtttgtaaactgcttgaagtctgtggcgttcgggcacaggtctggctggccagctgggtctcctcctgggctcagtgggcctggggcctctctgacgtggtgcctgctggagggaggcttgtcatcaccggctgactgctggtccggcttctgactggcctttgtcctggttccgtagcagaacactgtaaaagtgcccgcgactttgcagtagttgcagatttcagtcgtcctattacttgtgtgcaaacagaagctgggtcttacccaccgcacaagtctctccggctgcccagagtcgccagggagcaggtgctgcagccagannnnnnnnnnnnnnnnnnnnnnnnnnnnnnnnnnnnnnnnnnnnnngaacctgtattttatgtaactcagcagtgcccaccgccatcacgagctatgcatttactgttcccagtgagcagatgtcttgcttggaaagtggacctgtgtctgtgtctgtcgcgagaacttaccagcagaaatcctcatttctgtgctacagatttaacaaaaattgtcgtcttttcagttgaagagttcctttaaatgtatagtattttaggaaaaaatcaataaacatttgatctcgtgcat

SEQ ID NO: 28903 - DNA, 360 bp, Macaca Mulatta
  misc_feature (1)...(360): n = A,T,C or G
gtgtatttctacatgttttggcagatacacttggcagcattggtgtgattgtatccacaattcttatagagcagtttggatggttcatcgctgacccgctgtgttctctttttattgctgtattaatatttctcagtgttgttccactaattaaagatgcctgccaggttctactcctgagattgccaccagaatatgaaaaagaactacatattgctttagaaaagnagatacagaaaattgaaggattaatatcataccgagaccctcatttttggcgtcattctgctaatattgtggcaggaacgattcatatacaggtgacatctgatgtgctagaacaaagaatagtacagcagg

SEQ ID NO: 28904 - DNA, 2501 bp, Macaca Mulatta
  misc_feature (1)...(2501): n = A,T,C or G
ggccaccatctcctactatcagatgatgcatatgcagacggcgccgctgcccgtgcacttccagatgctgtgtgagagcagcaagctgtacgacccgggccagcagtacgcctcgcacgtgcgccagctgcagcgggaccaggagcccgatgtgcactacgacttcgagccccacgtgtccgccaacgcttggnnnnnnnnnnnnnnnnnnnnnnnnnnnnnnnnnnnnnnnnnnnnnnnnnnnnnnnnnnnnnnnnnnnnnnnnnnnnnnnnnnnnnnnnnnnnnnnnnnnnnnnnnnnnnnnnnnnnnnnnnnnnnnnnnnnnnnnnnnnnnnnnnnnnnnnnnnnnnnnnnnnnnnnnnnnnnnnnnnnnnnnnnnnnnnnnnnnnnnnnnnnnnnnnnnnnnnnnnnnnnnnnnnnnnnnnnnnnnnnnnnnnnnnnnnnnnnnnnnnnnnnnnnnnnnnnnnnnnnnnnnnnnnnnnnnnnnnnnnnnnnnnnnnnnnnnnnnnnnnnnnnnnnnnnnnnnnnnnnnnnnnnnnnnnnnnnnnnnnnnnnnnnnnnnnnnnnnnnnnnnnnnnnnnnnnnnnnnnnnnnnnnnnnnnnnnnnnnnnnnnnnnnnnnnnnnnnnnnnnnnnnnnnnnnnnnnnnnnnnnnnnnnnnnnnnnnnnnnnnnnnnnnnnnnnnnnnnnnnnnnnnnnnnnnnnnnnnnnnnnnnnnnnnnnnnnnnnnnnnnnnnnnnnnnnnnnnnnnnnnnnnnnnnnnnnnnnnnnnnnnnnnnnnnnnnnnnnnnnnnnnnncccgacggcgtgctcttcattgtcaagaagtgcgtctgcgagatcgagcggcgttcgctgcgcaccaaggnagggcatctaccgggtcaatggggtaaagacgcgcgtggagaagctgtgccaggccttcgagaacggcaaggagctggtcgagctgtcgcaggcctcgccccacgacatcagcaacgttctcaagctctacctgcgnnnnnnnnnnnnnnnnnnnnnnnnnnnnnnnnnnnnnnnnnnnnnnnnnnnnnnnnnnnnnnnnnnnnnnnnnnnnnnnnnnnnnnnnnnnnnnnnnnnnnnnnnnnnnnnnnnnnnnnnnnnnnnnnnnnnnnnnnnnnnnnnnnnnnnnnnnnnnnnnnnnnnnnnnnnnnnnnnnnnnnnnnnnnnnnnnnnnnnnnnnnnnnnnnnnnnnnnnnnnnnnnnnnnnnnnnnnnnnnnnnnnnnnnnnnnnnnnnnnnnnnnnnnnnnnnnnnnnnnnnnnnnnnnnnnnnnnnnnnnnnnnnnnnnnnnnnnnnnnnnnnnnnnnnnnnnnnnnnnnnnnnnnnnnnnnnnnnnnnnnnnnnnnnnnnnnnnnnnnnnnnnnnnnnnnnnnnnnnnnnnnnnnnnnnnnnnnnnnnnnnnnnnnnnnnnnnnnnnnnnnnnnnnnnnnnnnnnnnnnnnnnnnnnnnnnnnnnnnnnnnnnnnnnnnnnnnnnnnnnnnnnnnnnnnnnnnnnnnnnnnnnnnnnnnnnnnnnnnnnnnnnnnnnngaatcccgagttgtgtccaacgactcggactcggacctagaggaggcctccgagctgctgtcgtcatcggaggccagtgccctgcgccgcctcagcctcctggagcagcagcagagtgaggccagcctggaggaggcttctggcagccacagcggcagcgaggagcggctggaggccaccgcccgggaggacggggacgaggacgacccggcccggcagctctcaggattcaacacaaaccagtccaacaacgtgctgcaggccccactgcccaccatgaggctccgtggcgggcggatcgcgccgggctcctgcagggagaggcggcctgagttcgtgtgagctggggcggggccgggaccacaggtggcttctctctcgcctgctcctgtccctccagnnnnnnnnnnnnnnnnnnnnnnnnnnnnnnnnnnnnnnnnnnnnnnnnnnnnnnnnnnnnnnnnnnnnnnnnnnnnnnnnnnnnnnnnnnnnnnnnnnnnnnnnnnnnnnnnnnnnnnnnnnnnnnnnnnnnnnnnnnnnnnnnnnnnnnnnnnnnnnnnnnnnnnnnnnnnnnnnnnnnnnnnnnnnnnnnnnnnnnnnnnnnnnnnnnnnnnnnnnnnnnnnnnnnnnnnnnnnnnnnnnnnnnnnnnnnnnnnnnnnnnnnnnnnnnnnnnnnnnnnnnnnnnnnnnnnnnnnnnnnnnnnnnnnnnnnnnnnnnctcacaggtctgttgcagggactccggaaaccattctgggagctgtggatgggggcggaggctggggtctggtgcggtgtccagggtgcagtacggcagggcctcagtactggccctagactcccttttccagaacaccaggtgtggccacctggggcttaggtacacagtggggcctctcggaagccaccgtgtagcttttcacaggcacgtgtattttgctgaaataa

SEQ ID NO: 28905 - DNA, 601 bp, Macaca Mulatta
acagagtattcctttcttcacaccaggacgagccactgttgaagcatgagttcccagcagcagaagcagccctgcaccccaccccctcagcttcagcagcagcaggtgaaacagccttgccagcctccaccccaggaaccatgcatccccaaaaccaaggagccctgcctccccaaggtgcctgagccctgccaccccaaagtgcctgaaccctgccagcccaaggttccagagccctgccaccccaaggtgcctgagccctgcccttcaacggtcactccagcaccagcccagcagaagaccaagcagaagtaatgtggtccacagccatgcccttgaggagccagccaccagatgctgaatcccctatctcattctgcgtatgagtcccatttgccttgcaattagcattctgcctccaccaaaaaagaatgtgctatgaagctttatttcctatacactctgagtctctgaatgaagctgaaggtcttagttccagagctagttttcaggtgctcagaattcatctgaggagagacttaagatgaaagcaaaggaatcagctcccttataaccgccattaaattcactttcaattcca

SEQ ID NO: 28906 - DNA, 826 bp, Macaca Mulatta
cttccagggtcacactgggcgacagcggagaggctcttggacggggcagagctcgcaccgagacctgcgtgtccgcatctcgtgacgggtgtgtgggaagccacccatctgtgcatcttgcttccaggtattcgctggttgatttactggttttagagatggggatgggcacccagtgccagactgaagaccagagaaggcggagctccgtgcagccttggtctcacctctcttcaggtaacaggtgctgccctgacccaagctgagccaatgaaatccttccctgggaatccacacctggaccccttccttttgggcagggagggcttgctggagggagggaggctgtggccccacagcaagactgggccctctgggcacaaggggacactggtgctgggttcagcagccaccaggacctgggccaagagggggtggctggtgcattcatgcaggatgttgagctgcagggactagagtggcagatgggccaggtccactaggccaccccatctcctcccccagggccaccagccgctgtgggctccacaggggtgggaaggagtgcagggctggggcttgagtgccgtggcctccgcgagaacgggaacacgctgtgggcgagaagggggctgagaacaggctggccagctggcatcctgcccactacacttcaggggcccagcagaacccaggccagagccgccagccacagggcactgcctgggctcaccgtttcttcgtctccagcgggatcccagacggcgccaggaggcccttgtacatgtcagacttcaggtacaaggggtaggagtcctataagaga

SEQ ID NO: 28907 - DNA, 131 bp, Macaca Mulatta
gatcaagaatgctgcagccaatgtccttcgggaaacatggttaatctataaacacacaaagctgctaaagaagattgaccatgccaaagtcaggaaacaccagaggaagttcctccaagctatccaccagt

SEQ ID NO: 28908 - DNA, 3181 bp, Macaca Mulatta
  misc_feature (1)...(3181): n = A,T,C or G
agcccaagaagaggccgaaaccgagaccatgcctgggaagctgaaggtgaaaatcgtggctgggcgccatttgccagtgatggaccgtgcaagtgacctgactgatgccttcgtggaggtnnnnnnnnnnnnnnnnnnnnnnnnnnnnnnnnnnnnnnnnnnnnnnnnnnnnnnnnnnnnnnnnnnnnnnnnnnnnnnnnnnnnnnnnnnnnnnnnnnnnnnnnnnnnnnnnnnnnnnnnnnnnnnnnnnnnnnnnnnnnnnnnnnnnnnnnnnnnnnnnnnnnnnnnnnnnnnnnnnnnnnnnnnnnnnnnnnnnnnnnnnnnnnnnnnnnnnnnnnnnnnnnnnnnnnnnnnnnnnnnnnnnnnnnnnnnnnnnnnnnnnnnnnnnnnnnnnnnnnnnnnnnnnnnnnnnnnnnnnnnnnnnnnnnnnnnnnnnnnnnnnnnnnnnnnnnnnnnnnnnnnnnnnnnnnnnnnnnnnnnnnnnnnnnnnnnnnnnnnnnnnnnnnnnnnnnnnnnnnnnnnnnnnnnnnnnnnnnnnnnnnnnnnnnnnnnnnnnnnnnnnnnnnnnnnnnnnnnnnnnnnnnnnnnnnnnnnnnnnnnnnnnnnnnnnnnnnnnnnnnnnnnnnnnnnnnnnnnnnnnnnnnnnnnnnnnnnnnnnnnnnnnnnnnnnnnnnnnnnnnnnnnnnnnnnnnnnnnnnnnnnnnnnnnnnnnnnnnnnnnnnnnnnnnngtggtgagagccatatgaccggcgtgtactctggataaattaagtagcccagcagcattccttcctgcatgtaattccccatccaaagaaatgaaggagtnnnnnnnnnnnnnnnnnnnnnnnnnnnnnnnnnnnnnnnnnnnnnnnnnnnnnnnnnnnnnnnnnnnnnnnnnnnnnnnnnnnnnnnnnnnnnnnnnnnnnnnnnnnnnnnnnnnnnnnnnnnnnnnnnnnnnnnnnnnnnnnnnnnnnnnnnnnnnnnnnnnnnnnnnnnnnnnnnnnnnnnnnnnnnnnnnnnnnnnnnnnnnnnnnnnnnnnnnnnnnnnnnnnnnnnnnnnnnnnnnnnnnnnnnnnnnnnnnnnnnnnnnnnnnnnnnnnnnnnnnnnnnnnnnnnnnnnnnnnnnnnnnnnnnnnnnnnnnnnnnnnnnnnnnnnnnnnnnnnnnnnnnnnnnnnnnnnnnnnnnnnnnnnnnnnnnnnnnnnnnnnnnnnnnnnnnnnnnnnnnnnnnnnnnnnnnnnnnnnnnnnnncctttgtcggaattatgggtaacacaagatcttacaaactgctagactggaatagtttcaattcagnnnnnnnnnnnnnnnnnnnnnnnnnnnnnnnnnnnnnnnnnnnnnnnnnnnnnnnnnnnnnnnnnnnnnnnnnnnnnnnnnnnnnnnnnnnnnnnnnnnnnnnnnnnnnnnnnnnnnnnnnnnnnnnnnnnnnnnnnnnnnnnnnnnnnnnnnnnnnnnnnnnnnnnnnnnnnnnnnnnnnnnnnnnnnnnnnnnnnnnnnnnnnnnnnnnnnnnnnnnnnnnnnnnnnnnnnnnnnnnnnnnnnnnnnnnnnnnnnnnnnnnnnnnnnnnnnnnnnnnnnnnnnnnnnnnnnnnnnnnnnnnnnnnnnnnnnnnnnnnnnnnnnnnnnnnnnnnnnnnnnnnnnnnnnnnnnnnnnnnnnnnnnnnnnnnnnnnnnnnnnnnnnnnnnnnnnnnnnnnnnnnnnnnnnnnnnnnnnnnnnnnnnnnnnnnnnnnnnnnnnnnnnnnnnnnnnnnnnnnnnnnnnnnnnnnnnnnnnnnnnnnnnnnnnnnnnnnnnnnnnnnnnnnnnnnnnnnnnnnnnnnnnnnnnnnnnnnnnnnnnnnnnnnnnnnnnnnnnnnnnnnnnnnnnnnnnnnnnnnnnnnnnnnnnnnnnnnnnnnnnnnnnnnnnnnnnnnnnnnnnnnnnnnnnnnnnnnnnnnnnnnnnnnnnnnnnnnnnnnnnnnnnnnnnnnnnnnnnnnnnnnnnnnnnnnnnnnnnnnnnnnnnnnnnnnnnnnnnnnnnnnnnnnnnnnnnnnnnnnnnnnnnnnnnnnnnnnnnnnnnnnnnnnnnnnnnnnnnnnnnnnnnnnnnnnnnnnnnnnnnnnnnnnnnnnnnnnnnnnnnnnnnnnnnnnnnnnnnnnnnnnnnnnnnnnnnnnnnnnnnnnnnnnnnnnnnnnnnnnnnnnnnnnnnnnnnnnnnnnnnnnnnnnnnnnnnnnnnnnnnnnnnnnnnnnnnnnnnnnnnnnnnnnnnnnnnnnnnnnnnnnnnnnnnnnnnnnnnnnnnnnnnnnnnnnnnnnnnnnnnnnnnnnnnnnnnnnnnnnnnnnnnnnnnnnnnnnnnnnnnnnnnnnnnnnnnnnnnnnnnnnnnnnnnnnnnnnnnnnnnnnnnnnnnnnnnnnnnnnnnnnnnnnnnnnnnnnnnnnnnnnnnnnnctttaaactacgatctatgatcccctgtctgcctttgccatgtaaattttacagtatctctgcctcatgatgaattaattcaggtnaggttacagtcacggcagttgcaataacttttgacaaaaatcaggctttacaaaccacaaaaacccctgttgaaaagtcgttgcaaagagnnnnnnnnnnnnnnnnnnnnnnnnnnnnnnnnnnnnnnnnnnnnnnnnnnnnnnnnnnnnnnnnnnnnnnnnnnnnnnnnnnnnnnnnnnnnnnnnnnnnnnnnnnnnnnnnnnnnnnnnnnnnnnnnnnnnnnnnnnnnnnnnnnnnnnnnnnnnnnnnnnnnnnnnnnnnnnnnnnnnnnnnnnnnnnnnnnnnnnnnnnnnnnnnnnnnnnnnnnnnnnnnnnnnnnnnnnnnnnnnnnnnnnnnnnnnnnnnnnnnnnnnnnnnnnnnnnnnnnnnnnnnnnnnnnnnnnnnnnnnnnnnnnnnnnnnnnnnnnnnnnnnnnnnnnnnnnnnnnnnnnnnnnnnnnnnnnnnnnnnnnnnnnnnnnnnnnnnnnnnnnnnnnnnnnnnnnnnnnnnnnnnnnnnnnnnnnnnnnnnnnnnnnnnnaggaaggaggagtcagtggttttctcccatgcttttattgctgaagtgtttgcaatggtgagagctcatgttgctgcgttaggagggaatgctgttgtctcttacgtaagaagcagtgtgtcttcatg

SEQ ID NO: 28909 - DNA, 711 bp, Macaca Mulatta
  misc_feature (1)...(711): n = A,T,C or G
ggatgaagacttaatcgaaatattacctctaatttgctatatcanngaagcctaaaaagaatgatcataaatgtactttaccagtgattttactgaaatgcacttatattagtctttatgtatttgctagttcagcctcatttctagaagaggttataatgtaagatttgtagtattcaagtaagaagataagtgacctaattttaaaataattcttctacttttctgtatattcagcagggtatttaagtgctagggctggtcacatacaacaaattgaaaaagactagacagtgattagtacaaactcctcttatacagaaggcaagtctgaggttccacagaagtctggaaccaagactactcagttggttaaacagttagtctagactgggcctgctcgttctaggtcaccacattttctatctccaaatagccagctcctctctccctcaagaaatgcccagatgtagaaattcatcagtgcctactggtcttgcagaattttccatcttccatatctcccagggataagactaccaaatttgttttcttttcaatttgggaatttatacttcactatggtttcaacacagttatgtttccagagaacatctagaagtggttggaaaccagaagctggggattcccaggaccccacttagtgctctgtttcctttataggtttcagttctggtcataaagagagag

SEQ ID NO: 28910 - DNA, 811 bp, Macaca Mulatta
  misc_feature (1)...(811): n = A,T,C or G
tgatgaaaactttgtccagttctgctactgtcagtaagtgacgataaagtgtgtctgaggagacagccgtcttcatgcttgcccctaggatacctaaacccacagagattcttaagggggtggagaggtttgggtggggccaccttgtcatggagctaaggatcacctactctcttccagcgtgcattgcttccaggccgggacagtgtggccgagcagatggttatgtgctagagggcaaagagttggagttctatcttaggaaaatcaaagcccggaaaggcaaataaatcctcgttttgtcttcacccgtgtaataaaggtgtttattgttctgtttccccatttgtgttgcctgaatatttgactatttgctttatttccttgccctgcaaaactgatctgggtgggtggctgcaacccattgctttacctctacctcctactgtcttgatccagactcaccacactgtaaagtccctgttctcaactccatgtccctgaaggctagatttataatgtgggctgtgtctatagtgggaacatttctccacgttttggtggggatagggatgtggcagaggctatgagagggggtatcccaaccttggggttcaacaatgttgtgctgactgagtcatgattagaatctcaggctatattgcttctaaaaagttgtaaggatcctgcacccactgtaagattaacagtgatttctgccttgcttggtctccaagggtcactttgacttanacttgtcctgtncaatgcttacctttagtcttgacctgcttgacatctgcacttggat

SEQ ID NO: 28911 - DNA, 2592 bp, Macaca Mulatta
  misc_feature (1)...(2592): n = A,T,C or G
aggtgtggtatgtgtccctggcttgttctaaggacctcacgctcctttggattaaacagatcaagagcattctgtggtactgctgtgattttctcaagcagctcaagnnnnnnnnnnnnnnnnnnnnnnnnnnnnnnnnnnnnnnnnnnnnnnnnnnnnnnnnnnnnnnnnnnnnnnnnnnnnnnnnnnnnnnnnnnnnnnnnnnnnnnnnnnnnnnnnnnnnnnnnnnnnnnnnnnnnnnnnnnnnnnnnnnnnnnnnnnnnnnnnnnnnnnnnnnnnnnnnnnnnnnnntattgttaacccgtggcctggcaagaccccgtccttgtctatccaaaggcactttaacagcagccttttctctagcnnnnnnnnnnnnnnnnnnnnnnnnnnnnnnnnnnnnnnnnnnnnnnnnnnnnnnnnnnnnnnnnnnnnnnnnnnnnnnnnnnnnnnnnnnnnnnnnnnnnnnnnnnnnnnnnnnnnnnnnnnnnnnnnnnnnnnnnnnnnnnnnnnnnnnnnnnnnnnnnnnnnnnnnnnnnnnnnnnnnnnnnnnnnnnnnnnnnnnnnnnnnnnnnnnnnnnnnnnnnnnnnnnnnnnnnnnnnnnnnnnnnnnnnnnnnnnnnnnnnnnnnnnnnnnnnnnnnnnnnnnnnnnnnnnnnnnnnnnnnnnnnnnnnnnnnnnnnnnnnnnnnnnnnnnnnnnnnnnnnnnnnnnnnnnnnnnnnnnnnnnnnnnnnnnnnnnnnnnnnnnnnnnnnnnnnnnnnnnnnnnnnnnnnnnnnnnnnnnnnnnnnnnnnnnnnnnnnnnnnnnnnnnnnnnnnnnnnnnnnnnnnnnnnnnnnnnnnnnnnnnnnnnnnnnnnnnnnnnnnnnnnnnnnnnnnnnnnnnnnnnnnnnnnnnnnnnnnnnnnnnnnnnnnnnnnnnnnnnnnnnnnnnnnnnnnnnngtctcctaaaacgtgcttttcaaaagtcggcatcagtccggaacattctcaggcctgtcgggggtaaacgggtcgactctgcagaagtccaaaaggtttgcaacatctgtgtcctctaccagacctcgctgacaactctcacacagatccgactgcagatactcacaggtncaggtctcacttaccttgatgacctgctgcccaaactgtgggcatttatctgtgagctcgggccccacggagggttaaagctcttcttggaatgcctgaacaatgacactgaagagtccaagcaactcttggccatgctgatgctgttctgtgactgtacgcggcacctcnnnnnnnnnnnnnnnnnnnnnnnnnnnnnnnnnnnnnnnnnnnnnnnnnnnnnnnnnnnnnnnnnnnnnnnnnnnnnnnnnnnnnnnnnnnnnnnnnnnnnnnnnnnnnnnnnnnnnnnnnnnnnnnnnnnnnnnnnnnnnnnnnnnnnnnnnnnnnnnnnnnnnnnnnnnnnnnnnnnnnnnnnnnnnnnnnnnnnnnnnnnnnnnnnnnnnnnnnnnnnnnnnnnnnnnnnnnnnnnnnnnnnnnnnnnnnnnnnnnnnnnnnnnnnnnnnnnnnnnnnnnnnnnnnnnnnnnnnnnnnnnnnnnnnnnnnnnnnnnnnnnnnnnnnnnnnnnnnnnagagttctcctgtttcgaaccatggttaccaaggagaaggagaaactggggctggtggaaaccagctctgcctccccgcatgtcactcacatcaccatccgtcggtccaggatgctggaggnnnnnnnnnnnnnnnnnnnnnnnnnnnnnnnnnnnnnnnnnnnnnnnnnnnnnnnnnnnnnnnnnnnnnnnnnnnnnnnnnnnnnnnnnnnnnnnnnnnnnnnnnnnnnnnnnnnnnnnnnnnnnnnnnnnnnnnnnnnnnnnnnnnnnnnnnnnnnnnnnnnnnnnnnnnnnnnnnnnnnnnnnnnnnnnnnnnnnnnnnnnnnnnnnnnnnnnnnnnnnnnnnnnnnnnnnnnnnnnnnnnnnnnnnnnnnnnnnnnnnnnnnnnnnnnnnnnnnnnnnnnnnnnnnnnnnnnnnnnnnnnnnnnnnnnnnnnnnnnnnnnnnnnnnnnnnnnnnnnnnnnnnnnnnnnnnnnnnnnnnnnnnnnnnnnnnnnnnnnnnnnnnnnnnnnnnnnnnnnnnnnnnnnnnnnnnnnnnnnnnnnnnnnnnnnnnnnnnnnnnnnnnnnnnnnnnnnnnnnnnnnnnnnnnnnnnnnnnnnnnnnnnnnnnnnnnnnnnnnncatgaactgattcctggagggaagacctattcctgttacaaatgaaaataanaattagctacatccatctgatggcacattttcgaatgcacactcaaataaaaaaccagacagccgccctcattagcggattccgttccattatcaaacccgaatggatccgaatgttctcagctcctgaactgcagcgtctcatctctggcgacaatgctgagattgatctggaagatttaaagngaagcacacagtctactacggtggtttccacggaagtcacagagtcatcatctggctctgggatattctggcctctgacttcacgccggatgagagagctatgtttctgaag

SEQ ID NO: 28912 - DNA, 147 bp, Macaca Mulatta
  misc_feature (1)...(147): n = A,T,C or G
gaattgattgagactggaaatatgatgcctttttcacctttgtatcatgttatccctaattaagtatgtttgaatgagtttatatgnnnnnnnnnnnnnnnnncctttatttattttgtaaattatatgtcattcatttaatttgaa

SEQ ID NO: 28913 - DNA, 822 bp, Macaca Mulatta
gggctcttttcccggctggaaccatggagggtgcggaagagaagaagaaggttcctgctgtgccagaaacccttaagaaaaagcgaaggaatttcgcagagctgaagataaagcgcctgagaaagaagtttgcccaaaagatgcttcgaaaggcaaggaggaagcttatctatgaaaaagcgaagcactatcacaaggaatataggcagatatacagaactgaaattcgaatggcgaggatggcaagaaaagctggcaacttctatgtacctgctgaacccaaattggcgtttgtcatcaggatcagaggtatcaatggcgtgagcccaaaggtccgaaaggtattgcagcttttgcgccttcgtcaaatcttcaatggaacctttgtgaaactcaacaaggcttcgattaacatgctgaggattgtacagccatatattgcatgggggtaccccaatctgaagtcagtaaatgagcttatctacaagcgtggttatggcaaacttcaatagaagcgaattgctttgacagataacgcttttgattgctccatttctttggtaaatatgggcatccatctgccctgggaggaatcttgattcattgagaatcttatactggtttgggagaaccgctttcaacagaagggccaaaaaaacctttccacggagggggcccttttacaagatttatcccctttccccccccgcccgggtggggagatttgtatataaatatatagagactccctcgcccagtcttttctggttaaaaaaagaggggtgggtgaagatattgcttagagggctctaacacaccggg

SEQ ID NO: 28914 - DNA, 1354 bp, Macaca Mulatta
  misc_feature (1)...(1354): n = A,T,C or G
nccgccgccaccgccgccgttgctgggcaccgtgtcgtcgcccagctcgtcgcccacccacctgtggaccggcgaggtgagcgcggccccacccccagcccgcgtccggcatcggaggaggtctccggagcagagccgaagctcgccggagaagaggagccctagcgccccggtttgcaaagcaggnnnnnnnnnnnnnnnnnnnnnnnnnnnnnnnnnnnnnnnnnnnnnnnnnnnnnnnnnnnnnnnnnnnnnnnnnnnnnnnnnnnnnnnnnnnnnnnnnnnnnnnnnnnnnnnnnnnnnnnnnnnnnnnnnnnnnnnnnnnnnnnnnnnnnnnnnnnnnnnnnnnnnnnnnnnnnnnnnnnnnnnnnnnnnnnnnnnnnnnnnnnnnnnnnnnnnnnnnnnnnnnnnnnnnnnnnnnnnnnnnnnnnnnnnnnnnnnnnnnnnnnnnnnnnnnnnnnnnnnnnnnnnnnnnnnnnnnnnnnnnnnnnnnnnnnnnnnnnnnnnnnnnnnnnnnnnnnnnnnnnnnnnnnnnnnnnnnnnnnnnnnnnnnnnnnnnnnnnnnnnnnnnnnnnnnnnnnnnnnnnnnnnnnnnnnnnnnnnnnnnnnnnnnnnnnnnnnnnnnnnnnnnnnnnnnnnnnnnnnnnnnnnnnnnnnnnnnnnnnnnnnnnnnnnnnnnnnnnnnnnnnnnnnnnnnnnnnnnnnnnnnnnnnnnnnnnnnnnnnnnnnnnnnnnnnnnnnnnnnnnnnnnnnnnnnnnnnnnnnnnnnnnnnnnnnnnnnnnnnnnnnnnnnnnnnnnnnnnnnnnnnnnnnnnnnnnnnnnnnnnnnnnnnnnnnnnnnnnnnnnnnnnnnnnnnnnnnnnnnnnnnnnnnnnnnnnnnnnnnnnnnnnnnnnnnnnnnnnnnnnnnnngagaatgggaacaattctcctttgcccaaatatgcaacctcaccaaaacctaacaacagttatatgttcaaaagggaacctcctgagggctgtgaaagggtcaaagtctttgaggaatgctcgngccaaaacagcttcatgaaatcccagccttttattgtcctgacaaaaacaaggtgaatttcattcctaaaagtggatctgctttctgcctcgtcagcatcctcaagccactccttcccaccccagatcttacactcaagggctctggccacagcctgacagtcaccactggcatggcaaccactctgctgcagcctattgctgtggcctccctgtctacaaacacagagcaagaccgagtctctcgaggaacaagtacagtcatgccatcagcttctctactcccaccaccagaaccaattgaggaagctgaaggatag

SEQ ID NO: 28915 - DNA, 948 bp, Macaca Mulatta
gggaataatatgagtgaggatttgctttctccattagagcattaagctaaaactatcaacattttaaaccaaattgccttatttttcttccaaacttcatatatgtctatcaggtaatataggcttgaaaattgatatcctgtggtgctaaagtacagtagaaagagaggaaaagtgtatacatgttttattttaaattgtacgaaaggggaatttaaaaaatatgtaactgctgtttatacattggctccttactgcttattaatctgtattgtacacatgatggaatgaagcagaagctgggagtcggcctttctttgagtaaccaccacatggctcagcatctgtgccaaacataggcgctcctagtctggtcagtgccaagaggctaccagaacatgtggcaggtggctggtgttggtgtcccagcttctaagagccacctgctgcagttaccatggcatgctgagttgatgcaccaggtggcagcagccatccattatttccaatggagacctagcccaggccaaggtaaagttagttaatagcattgggatatagtcactgtaatggtgctattaacagtcaacaccattgtattttttaacttcgtgttctatatctcctcagccatgtatcttaaatatattttgtcatcataatctttatggtgggggcagactttgcacttattgcagtgcaacacttgcactttaatttcctccaactgtctaaaattagagcaaatacattggcaatacagctgcttttgctctgagctacaatcatggcttttcatgttacttaccaagtggtgtttctggttaggaatcacagctgtaaaattgatttcagttcattacacttcttcatgatgttgcccctaaattttgcacactatattcttgtatattatttcaaataaatggaaaaaaaagttgcttatct

SEQ ID NO: 28916 - DNA, 773 bp, Macaca Mulatta
  misc_feature (1)...(773): n = A,T,C or G
ggcatagacaactgctgcatgcagctggtgcagaatccttaccagtttgatgtgctcgtgatgcccaatctctatgggaacattattgacaatctggctgctggcctggttgggggagctggtgtggtccctggtgagagctatagtgcagaatatgcagtctttgagacgggtgcccggcacccatttgcccaggcagtgggcaggaatatagccaatcccacagccatgctactgtcggcttccaacatgttgcggcatctcaatcttgagtatcactccaacatgattgcagatgcagtgaagaaggtgatcaaagttggcaaggtgcggactcgagacatgggcggctacagcaccacaaccgacttcatcaagtctgtcatcggtcacctgcacccccatgggagctagagccctttatttcttccagccttgcaaggaccacactccccatacccttcagtgcagtgcaccagggaagagaccttgtgcctctaggcagtggaccatggtcaccttgctgggtagagcctaggttgtcctggcccgcttccttaggggagactgttgggtggtgatgggaattgttaggctggaacccaggccacatggatgatgatgattctcccccacaggttcgaacctctgacatgggtggctatgctacttgccatgacttcactngagctgtcattgctgncttgccccacccataggccttgtccatactcatgtaaaggtgtccaaataaagaacatgaaccctaaaaa

SEQ ID NO: 28917 - DNA, 683 bp, Macaca Mulatta
  misc_feature (1)...(683): n = A,T,C or G
caggaggaatgccccccacgccgcaggccgcgcagctcactggacagaggcagagtcagcagcagtatgacccctccacggggcctcccgtgcagaacgccgccagcttgcacaccccactgccgcagctgcccgggagactgcccccagccggtgttcccaccgcagccctctcctctgcgctgcagtttgcacagcagccgcaagcagtggaggcccagacacagctccaaatcccggtgaagactcagcagcccaatgttcccatccctgcaccccccagcagccaactccccatccctccctcgcagcctgcaccgctggccctccacgttcccacgcctgggaaggtgcaggtgcagccctctcagctttcctccctgccacagnnnnnncatcgacaaggctccctgtggaccctgccccgccctgcccacggcctctgcccacctcttctacctcgtccctggcacccgtgagtggctccggcccaggaccctcacctgctcggtcctcgccgataaatagaccctcctcagcaaccaacaaggcactgtctccagtcacttcccggaccccaggggtggcggcatctgcccccaccaaaccacagagtcctgctcagaatgccacctcgtcccaagacagttctcaggatacgctgacagaacagataacgctgg

SEQ ID NO: 28918 - DNA, 290 bp, Macaca Mulatta
  misc_feature (1)...(290): n = A,T,C or G
agacatgtcctggacttgaacagtacgctattaagaagtttgctgaggcatttgaagctattccccgtgcactggcagaaaactctggagttaaggccaatgaagtaatctctaaactttatgcagtacatcaagaaggaaataaaaatgttggattagatattgagnnggctgaatttcctgctgtaaaggacatgttggaagctggtattctagatacttacctgggaaaatattgggctatcaaactcgctactaatgctgcagtcactgtacttagagtggatcag

SEQ ID NO: 28919 - DNA, 1066 bp, Macaca Mulatta
  misc_feature (1)...(1066): n = A,T,C or G
aggtatgagataccagacacacagatggcagacgaaaagcagctggagatattgcaggacaaagccaacttccgcagcttcaaacccaaacccttcaacatgcgtgagttctatgaccgagctgggcacgacattcgagacatgctgctgtcctgccacttccggggagaggtctgtagcgctgaagacttcaaggtggtnnnnnnnnnnnnnnnnnnnnnnnnnnnnnnnnnnnnnnnnnnnnnnnnnnnnnnnnnnnnnnnnnnnnnnnnnnnnnnnnnnnnnnnnnnnnnnnnnnnnnnnnnnnnnnnnnnnnnnnnnnnnnnnnnnnnnnnnnnnnnnnnnnnnnnnnnnnnnnnnnnnnnnnnnnnnnnnnnnnnnnnnnnnnnnnnnnnnnnnnnnnnnnnnnnnnnnnnnnnnnnnnnnnnnnnnnnnnnnnnnnnnnnnnnnnnnnnnnnnnnnnnnnnnnnnnnnnnnnnnnnnnnnnnnnnnnnnnnnnnnnnnnnnnnnnnnnnnnnnnnnnnnnnnnnnnnnnnnnnnnnnnnnnnnnnnnnnnnnnnnnnnnnnnnnnnnnnnnnnnnnnnnnnnnnnnnnnnnnnnnnnnnnnnnnnnnnnnnnnnnnnnnnnnnnnnnnnnnnnnnnnnnnnnnnnnnnnnnnnnnnnnnnnnnnnnnnnnnnnnnnnnnnnnnnnnnnnnnnnnnnnnnnnnnnnnnnnnnnnnnnnnnnnnnnnnnnnnnnnnnnnnnnnnnnnnnnnnnnnnnnnnnnnnnnnnnnnnnnnnnnnnnnnnnnnnnnnnnnnnnnnnnnnnnnnnnnnnnnnnnnnnnnnnnnnnnnnnnnnnnnnngggagaacatcctggtgctggacattttctttgaagtcctcaactatgagaccattgaacagaagaaggcctatgagattgcagggctcctgggtgagctgctgatggcacctgtccccttcccatgccatgggcatggcatggctccctatcatccaaaagcagggtgctcacttctgtcccatgagggtcctccaccccagaggcacttccctaaaccct

SEQ ID NO: 28920 - DNA, 141 bp, Macaca Mulatta
gttttgtaaagggagggcactgggttcctttctagtactagagttttaagatgctcaagttttgtaataccattctcaggacgttgtttgcattttatatttgagtgtgtttaggaggcaacaaggttaaatgcccagaat

SEQ ID NO: 28921 - DNA, 2965 bp, Macaca Mulatta
  misc_feature (1)...(2965): n = A,T,C or G
tacaaacctctgttggacaaagctggtttgggatccataacttctattcgctttctgggagatcaacaaagagtatttctttctaaagatgttttgaagcctatacagnnnnnnnnnnnnnnnnnnnnnnnnnnnnnnnnnnnnnnnnnnnnnnnnnnnnnnnnnnnnnnnnnnnnnnnnnnnnnnnnnnnnnnnnnnnnnnnnnnnnnnnnnnnnnnnnnnnnnnnnnnnnnnnnnnnnnnnnnnnnnnnnnnnnnnnnnnnnnnnnnnnnnnnnnnnnnnnnnnnnnnnnnnnnnnnnnnnnnnnnnnnnnnnnnnnnnnnnnnnnnnnnnnnnnnnnnnnnnnnnnnnnnnnnnnnnnnnnnnnnnnnnnnnnnnnnnnnnnnnnnnnnnnnnnnnnnnnnnnnggtaattctgcaagaattggagctgtaaaacgcaagtcttctgagaataatggaaccctggtttccaaacaagcaaaatcttgctctgagnnnnnnnnnnnnnnnnnnnnnnnnnnnnnnnnnnnnnnnnnnnnnnnnnnnnnnnnnnnnnnnnnnnnnnnnnnnnnnnnnnnnnnnnnnnnnnnnnnnnnnnnnnnnnnnnnnnnnnnnnnnnnnnnnnnnnnnnnnnnnnnnnnnnnnnnnnnnnnnnnnnnnnnnnnnnnnnnnnnnnnnnnnnnnnnnnnnnnnnnnnnnnnnnnnnnnnnnnnnnnnnnnnnnnnnnnnnnnnnnnnnnnnnnnnnnnnnnnnnnnnnnnnnnnnnnnnnnnnnnnnnnnnnnnnnnnnnnnnnnnnnnnnnnnnnnnnnnnnnnnnnnnnnnnnnnnnnnnnnnnnnnnnnnnnnnnnnnnnnnnnnnnnnnnnnnnnnnnnnnnnnnnnnnnnnnnnnnnnnnnnnnnnnnnnnnnnnnnnnnnnnnnnnnnnnnnnnnnnnnnnnnnnnnnnnnnnnnnnnnnnnnnnnnnnnnnnnnnnnnnnnnnnnnnnnnnnnnnnnnnnnnnnnnnnnnnnnnnnnnnnnnnnnnnnnnnnnnnnnnnnnnnnnnnnnnnnnnnnnnnnnnnnnnnnnnnnnnnnnnnnnnnnnnnnnnnnnnnnnnnnnnnnnnnnnnnnnnnnnnnnnnnnnnnnnnnnnnnnnnnnnnnnnnnnnnnnnnnnnnnnnnnnnnnnnnnnnnnnnnnnnnnnnnnnnnnnnnnnnnnnnnnnnnnnnnnnnnnnnnnnnnnnnnnnnnnnnnnnnnnnnnnnnnnnnnnnnnnnnnnnnnnnnnnnnnnnnnnnnnnnnnnnnnnnnnnnnnnnnnnnnnnnnnnnnnnnnnnnnnnnnnnnnnnnnnnnnnnnnnnnnnnnnnnnnnnnnnnnnnnnnnnnnnnnnnnnnnnnaggttacaattcaacaaacatggtgtgttgcgggtagaaggattcttaacaccaaacaagtatgacaacgaagcaattggcttgtggttacctttaaccaaaaacgttgtggggattgatttggacacagcaaagtacatcttggccaacattggagaccacttctgtcaaatggtgatttctgaaaaggaagctatgtcaactattgagccacacannnnnnnnnnnnnnnnnnnnnnnnnnnnnnnnnnnnnnnnnnnnnnnnnnnnnnnnnnnnnnnnnnnnnnnnnnnnnnnnnnnnnnnnnnnnnnnnnnnnnnnnnnnnnnnnnnnnnnnnnnnnnnnnnnnnnnnnnnnnnnnnnnnnnnnnnnnnnnnnnnnnnnnnnnnnnnnnnnnnnnnnnnnnnnnnnnnnnnnnnnnnnnnnnnnnnnnnnnnnnnnnnnnnnnnnnnnnnnnnnnnnnnnnnnnnnnnnnnnnnnnnnnnnnnnnnnnnnnnnnnnnnnnnnnnnnnnnnnnnnnnnnnnnnnnnnnnnnnnnnnnnnnnnnnnnnnnnnnnnnnnnnnnnnnnnnnnnnnnnnnnnnnnnnnnnnnnnnnnnnnnnnnnnnnnnnnnnnnnnnnnnnnnnnnnnnnnnnnnnnnnnnnnnnnnnnnnnnnnnnnnnnnnnnnnnnnnnnnnnnnnnnnnnnnnnnnnnnnnnnnnnnnnnnnnnnnnnnnnnnnnnnnnnnnnnnnnnnnnnnnnnnnnnnnnnnnnnnnnnnnnnnnnnnnnnnnnnnnnnnnnnnnnnnnnngaaaaacaaccaatgatgccaattttaaagaatgaaatcaaatgccttccacccctcccgcctttaagcaaatccagcacagtcctccaaacgtttaacagcacaattttgacacccgtaagcaacaacaattctggtttcctccggaatctcttgaattcttctacaggaaannnnnnnnnnnnnnnnnnnnnnnnnnnnnnnnnnnnnnnnnnnnnnnnnnnnnnnnnnnnnnnnnnnnnnnnnnnnnnnnnnnnnnnnnnnnnnnnnnnnnnnnnnnnnnnnnnnnnnnnnnnnnnnnnnnnnnnnnnnnnnnnnnnnnnnnnnnnnnnnnnnnnnnnnnnnnnnnnnnnnnnnnnnnnnnnnnnnnnnnnnnnnnnnnnnnnnnnnnnnnnnnnnnnnnnnnnnnnnnnnnnnnnnnnnnnnnnnnnnnnnnnnnnnnnnnnnnnnnnnnnnnnnnnnnnnnnnnnnnnnnnnnnnnnnnnnnnnnnnnnnnnnnnnnnnnnnnnnnnnnnnnnnnnnnnnnnnnnnnnnnnnnnnnnnnnnnnnnnnnnnnnnnnnnnnnnnnnnnnnnnnnnnnnnnnnnnnnnnnnnnnnnnnnnnnnnnnnnnnnnnnnnnnnnnnnnnnnnnnnnnnnnnnnnnnnnnnnnnnnnnnnnnnnnnnnnnnaggtttgatgatctgatggccaacattccgctgcccgagtacacaaggcgagatggcaaactgaacttggcctctaggctgcccaactactttgttcggccagatctgggtcccaagatgtataatgcttatg

SEQ ID NO: 28922 - DNA, 667 bp, Macaca Mulatta
acgaggcagcaggttcagaagggaggtggccgccctccgctcgtggcctctgacggtttttgagcgttggtgtctggcacgcgctagcccctcttgctttggttccgccatgccgatgtaccaggaagagtctaacccatctctgcaagctcttgagtcccgccaagatgatattttaaaacgtctgtatgagttgaaagctgcagttgatggtctctccaagatgattcaaacaccagatgcagacttggatgtaaccaacataatccaagcggatgagcccatgaccttaaccaccaatgtgctggacttgaattcagtgcttgggaaggattatggggcgctgaaagacatcgtgatcaacgcgaacccggcctcccctcccctctccctgctcgtgttgcacaggctgctctgtgagcacttcagggtcctgtccacggtgcacacgcactcctcagtcaagagtgtgcctgaaaaccttctcaagtgctttggagaacagaataaaaaacagccccgccaagagtatcagctgggattcactttaatttggaagaatgtgccgaagacgcagatgaaattcagcgtccagacgatgtgccccatcgaaggagaagggaacattgcacgtttcttgtactctctgtttggccagaagcataat

SEQ ID NO: 28923 - DNA, 1446 bp, Macaca Mulatta
  misc_feature (1)...(1446): n = A,T,C or G
atgggggccagaacacctttgccttctttctgggtttctttctttgccgagacagggattttgttcccaggaggcaatccctggcccatgggacctcagcattcaaagcaacaacacaggaaacctgggcccctgaaacggggccaccgaggagatcggnnnnnnnnnnnnnnnnnnnnnnnnnnnnnnnnnnnnnnnnnnnnnnnnnnnnnnnnnnnnnnnnnnnnnnnnnnnnnnnnnnnnnnnnnnnnnnnnnnnnnnnnnnnnnnnnnnnnnnnnnnnnnnnnnnnnnnnnnnnnnnnnnnnnnnnnnnnnnnnnnnnnnnnnnnnnnnnnnnnnnnnnnnnnnnnnnnnnnnnnnnnnnnnnnnnnnnnnnnnnnnnnnnnnnnnnnnnnnnnnnnnnnnnnnnnnnnnnnnnnnnnnnnnnnnnnnnnnnnnnnnnnnnnnnnnnnnnnnnnnnnnnnnnnnnnnnnnnnnnnnnnnnnnnnnnnnnnnnnnnnnnnnnnnnnnnnnnnnnnnnnnnnnnnnnnnnnnnnnnnnnnnnnnnnnnnnnnnnnnnnnnnnnnnnnnnnnnnnnnnnnnnnnnnnnnnnnnnnnnnnnnnnnnnnnnnnnnnnnnnnnnnnnnnnnnnnnnnnnnnnnnnnnnnnnnnnnnnnnnnnnnnnnnnnnnnnnnnnnnnnnnnnnnnnnnnnnnnnnnnnnnnnnnnnnnnnnnnnnnnnnnnnnnnnnnnnggcatttccagcagcatgagctttgaagaggatgaggaggatgaggaggagaacagctccagctcctcccagctaaatagtaacacccgccccagctctgctactagcaggaagtccgtcagggnggaggcagcctcagcccctagcccaacagctccagagcaaccagtggatgtcgaggtccaggatcttgaggagtttgcactgaggccagccccccagggtatcaccatcaaatgccgcatcactcgggacaagaaagggatggaccggggcatgtaccccacttactttctgcacatggaccgtgaggacgggaagaaggtnnnnnnnnnnnnnnnnnnnnnnnnnnnnnnnnnnnnnnnnnnnnnnnnnnnnnnnnnnnnnnnnnnnnnnnnnnnnnnnnnnnnnnnnnnnnnnnnnnnnnnnnnnnnnnnnnnnnnnnnnnnnnnnnnnnnnnnnnnnnnnnnnnnnnnnnnnnnnnnnnnnnnnnnnnnnnnnnnnnnnnnnnnnnnnnnnnnnnnnnnnnnnnnnnnnnnnnnnnnnnnnnnnnnngagacaaacgtcttaggcttcaaggggcctcggaagatgagcgtgattgttccaggcatgaacatggttcacgagagagtctccatccgcccccgcaacgngagcatgagacactgctagcacgctggcagaataagaacacggagagatcatcgagct

SEQ ID NO: 28924 - DNA, 156 bp, Macaca Mulatta
ggatttgttgatgtatctattacagttggtccaggctctcaaatatgaaaattttgatgatataaagaatggattggaacctaccaagaaggatagtcagagttcagtgtcagaaaatctgtcaaattctggaataaattctgcagaaatagatag

SEQ ID NO: 28925 - DNA, 2235 bp, Macaca Mulatta
  misc_feature (1)...(2235): n = A,T,C or G
ctctacaacgaccctatcaagatcatccttatgcctggctgcagctctgtctccacgctggtggctgaggctgctaggatgtggaacctcattgtgngctttcctatggctccagctcaccagccctgtcaaaccggcagcgtttccccactttcttccgaacgcacccatcagccacactccacaaccctacccgcgtgaaactctttgaaaagtggggctggaagaagattgctaccatccagcagaccactgaggtcttcacttcgnnnnnnnnnnnnnnnnnnnnnnnnnnnnnnnnnnnnnnnnnnnnnnnnnnnnnnnnnnnnnnnnnnnnnnnnnnnnnnnnnnnnnnnnnnnnnnnnnnnnaggtgtacaaggagcgtctctttgggaagaagtacgtctggttcctcattgggtggtatgctgacaattggttcaagatctacgacccttctatcaactgcacagtagatgagatgactgaggccgtggagggccacatcaccactgagattgtcatgctgaatcctgccannnnnnnnnnnnnnnnnnnnnacatcccaggaatttgtggagaaactaaccaagcgactganaagacaccctgaggagacaggaggtttccaggaggcaccgctggcctatgatgccatctgggccttggcattggccctgaacagacatctggannnnnnnnnnnnnnnnnnnnnnnnnnnnnnnnnnnnnnnnnnnnnnnnnnnnnnnnnnnnnnnnnnnnnnnnnnnnnnnnnnnnnnnnnnnnnnnnnnnnnnnnnnnnnnnnnnnnnnnnnnnnnnnnnnnnnnnnnnnnnnnnnnnnnnnnnnnnnnnnnnnnnnnnnnnnnnnnnnnnnnnnnnnnnnnnnnnnnnnnnnnnnnnnnnnnnnnnnnnnnnnnnnnnnnnnnnnnnnnnnnnnnnnnnnnnnnnnnnnnnnnnnnnnnnnnnnnnnnnnnnnnnnnnnnnnnnnnnnnnnnnnnnnnnnnnnnnnnnnnnnnnnnnnnnnnnnnnnnnnnnnnnnnnnnnnnnnnnnnnnnnnnnnnnnnnnnnnnnnnnnnnnnnnnnnnnnnnnnnnnnnnnnnnnnnnnnnnnnnnnnnnnnnnnnnnnnnnnnnnnnnnnnnnnnnnnnnnnnnnnnnnnnnnnnnnnnnnnnnnnnnnnnnnnnnnnnnnnnnnnnnnnnnnnnnnnnnnnnnnnnnnnnnnnnnnnnnnnnnnnnnnnnnnnnnnnnnnnnnnnnnnnnnnnnnnnnnnnnnnnnnnnnnnnnnnnnnnnnnnnnnnnnnnnnnnnnnnnnnnnnnnnnnnnnnnnnnnnnnnnnnnnnnnnnnnnnnnnnnnnnnnnnnnnnnnnnnnnnnnnnnnnnnnnnnnnnnnnnnnnnnnnnnnnnnnnnnnnnnnnnnnnnnnnnnnnnnnnnnnnnnnnnnnnnnnnnnnnnnnnnnnnnnnnnnnnnnnnnnnnnnnnnnnnnnnnnnnnnnnnnnnnnnnnnnnnnnnnnnnnnnnnnnnnnnnnnnnnnnnnnnnnnnnnnnnnnnnnnnnnnnnnnnnnnnnnnnnnnnnnnnnnnnnnnnnnnnnnnnnnnnnnnnnnnnnnnnnnnnnnnnnnnnnnnnnnnnnnnnnnnnnnnnnnnnnnnnnnnnnnnnnnnnnnnnnnnnnnnnnnnnnnnnnnnnnnnnnnnnnnnnnnnnnnnnnnnnnnnnnnnnnnnnnnnnnnnnnnnnnnnnnnnnnnnnnnnnnnnnnnnnnnnnnnnnnnnnnnnnnnnnnnnngatgcgcaggctgatcacccgaggggaatggcagtcagaggcgcaggacaccatgaagacagggtcatcgaccaacaacaacgaggaggagaagtcccggctgttggagaaggagaaccgcgaactggaaaagatcattgctnnnnnnnnnnnnnnnnnnnnnnnnnnnnnnnnnnnnnnnnnnnnnnnnnnnnnnnnnnnnnnnnnnnnnnnnnnnnnnnnnnnnnnnnnnnnnnnnnnnnnnnnnnnnnnnnnnnnnnnnnnnnnnnnnnnnnnnnnnnnnnnnnnnnnnnnnnnnnnnnnnnnnnnnnnnnngttaatcctcagcactgcccgggtaatggctccataagagacaaggatgaggctgagaggcacaaccaagatgaagacactggcaacagccatctggatctcattgtaggaggtgtccccacaggagagtcgaattag

SEQ ID NO: 28926 - DNA, 439 bp, Macaca Mulatta
ccccaagcccagggccgaggggtccccaggtttaccactccctgtggctagggccacccggaagggtcccggccccagtgggctcctgcctgagtcgtgtaatctggggatgggagggggcccaaggggcgtggctgcaggggatgtggcctcaacgggccctgagggcagcgtcccctgctatcccccgcctgccccaggggagttccctgaagcccagagcctccacctgtctctgctgggcgtcaactacccgctcagcccaggcctctgctccttcttggggccctcactggccgctgcagcccacgtgcccttcctggcctcagccagccccctgctgcctccggctgcggccttcccagctgcgcagccccctctgcgccccaccctgggcccccgcctgtactacccactgcttctggagcacactctgggg

SEQ ID NO: 28927 - DNA, 2665 bp, Macaca Mulatta
  misc_feature (1)...(2665): n = A,T,C or G
ggaagaaaatctcaggagagccaaaagggaggacctgaaggtcagcatccaccaaatggagatggagaggatccgctacgtcctcagcagctacttgcggtgtcgcctcatgaannnnnnnnnnnnnnnnnnnnnnnnnnnnnnnnnnnnnnnnnnnnnnnnnnnnnnnnnnnnnnnnnnnnnnnnnnnnnnnnnnnnnnnnnnnnnnnnnnnnnnnnnnnnnnnnnnnnnnnnnnnnnnnnnnnnnnnnnnnnnnnnnnnnnnnnnnnnnnnnnnnnnnnnnnnnnnnnnnnnnnnnnnnnnnnnnnnnnnnnnnnnnnnnnnnnnnnnnnnnnnnnnnnnnnnnnnnnnnnnnnnnnnnnnnnnnnnnnnnnnnnnnnnnnnnnnnnnnnnnnnnnnnnnnnnnnnnnnnnnnnnnnnnnnnnnnnnnnnnnnnnnnnnnnnnnnnnnnnnnnnnnnnnnnnnnnnnnnnnnnnnnnnnnnnnnnnnnnnnnnnnnnnnnnnnnnnnnnnnnnnnnnnnnnnnnnnnnnnnnnnnnnnnnnnnnnnnnnnnnnnnnnnnnnnnnnnnnnnnnnnnnnnnnnnnnnnnnnnnnnnnnnnnnnnnnnnnnnnnnnnnnnnnnnnnnnnnnnnnnnnnnnnnnnnnnnnnnnnnnnnnnnnnnnnnnnnnnnnnnnnnnnnnnnnnnnnnnnnnnnnnnnnnnnnnnnnnnnnnnnnnnnnnnnnnnnnnnnnnnnnnnnnnnnnnnnnnnnnnnnnnnnnnnnnnnnnnnnnnnnnnnnnnnnnnnnnnnnnnnnnnnnnnnnnnnnnnnnnnnnnnnnnnnnnnnnnnnnnnnnnnnnnnnnnnnnnnnnnnnnnnnnnnnnnnnnnnnnnnnnnnnnnnnnnnnnnnnnnnnnnnnnnnnnnnnnnnnnnnnnnnnnnnnnnnnnnnnnnnnnnnnnnnnnnnnnnnnnnnnnnnnnnnnnnnnnnnnnnnnnnnnnnnnnnnnnnnnnnnnnnnnnnnnnnnnnnnnnnnnnnnnnnnnnnnnnnnnnnnnnnnnnnnnnnnnnnnnnnnnnnnnnnnnnnnnnnnnnnnnnnnnnnnnnnnnnnnnnnnnnnnnnnnnnnnnnnnnnnnnnnnnnnnnnnnnnnnnnnnnnnnnnnnnnnnnnnnnnnnnnnnnnnnnnnnnnnnnnnnnnnnnnnnnnnnnnnnnnnnnnnnnnnnnnnnnnnnnnnnnnnnnnnnnnnnnnnnnnnnnnnnnnnnnnnnnnnnnnnnnnnnnnnnnnnnnnnnnnnnnnnnnnnnnnnnnnnnnnnnnnnnnnnnnnnnnnnnnnnnnnnnnnnnnnnnnnnnnnnnnnnnnnnnnnnnnnnnnnnnnnnnnnnnnnnnnnnnnnnnnnnnnnnnnnnnnnnnnnnnnnnnnnnnnnnnnnnnnnnnnnnnnnnnnnnnnnnnnnnnnnnnnnnnnnnnnnnnnnnnnnnnnnnnnnnnnnnnnnnnnnnnnnnnnnnnnnnnnnnnnnnnnnnnnnnnnnnnnnnnnnnnnnnnnnnnnnnnnnnnnnnnnnnnnnnnnnnnnnnnnnnnnnnnnnnnnnnnnnnnnnnnnnnnnnnnnnnnnnnnnnnnnnnnnnnnnnnnnnnnnnnnnnnnnnnnnnnnnnnnnnnnnnnnnnnnnnnnnnnnnnnnnnnnnnnnnnnnnnnnnnnnnnnnnnnnnnnnnnnnnnnnnnnnnnnnnnnnnnnnnnnnnnnnnnnnnnnnnnnnnnnnnnnnnnnnnnnnnnnnnnnnnnnnnnnnnnnnnnnnnnnnnnnnnnnnnnnnnnnnnnnnnnnnnnnnnnnnnnnnnnnnnnnnnnnnnnnnnnnnnnnnnnnnnnnnnnnnnnnnnnnnnnnnnnnnnnnnnnnnnnnnnnnnnnnnnnnnnnnnnnnnnnnnnnnnnnnnnnnnnnnnnnnnnnnnnnnnnnnnnnnnnnnnnnnnnnnnnnnnnnnnnnnnnnnnnnnnnnnnnnnnnnnnnnnnnnnnnnnnnnnnnnnnnnnnnnnnnnnnnnnnnnnnnnnnnnnnnnnnnnnnnnnnnnnnnnnnnnnnnnnnnnnnnnnnnnnnnnnnnnnnnnnnnnnnnnnnnnnnnnnnnnnnnnnnnnnnnnnnnnnnnnnnnnnnnnnnnnnnnnnnnnnnnnnnnnnnnnnnnnnnnnnnnnnnnnnnnnnnnnnnnnnnnnnnnnnnnnnnnnnnnnnnnnnnnnnnnnnnnnnnnnnnnnnnnnnnnnnnnnnnnnnnnnnnnnnnnnnnnnnnnnnnnnnnnnnnnnnnnnnnnnnnnnnnnnnnnnnnnnnnnnnnnnnnnnnnnnnnnnnnnnnnnnnnnnnnnnnnnnnnnnnnnnnnnnnnnnnnnnnnnnnnnnnnnnnnnnnnnnnnnnnnnnnnnnnnnnnnnnnnnnnnnnnnnnnnnnnnnnnnnnnnnnnnnnnnnnnnnnnnnnnnnnnnnnnnnnnnnnnnnggagggtctcactggagagacaacatttaggctgagatctgattaacaggaggcaactgcagtgtagaggtcaaaagggagggtgttccaggcagagaagacagcctgtgcaaaggccctgaggcagaaacaagctctgcttgaggtcagcctggctacaaagcccaactcaaaatagaaagtagtacaggataaggtctgagacag

SEQ ID NO: 28928 - DNA, 1115 bp, Macaca Mulatta
  misc_feature (1)...(1115): n = A,T,C or G
gcgtcgcctcccggccggccgaggaggtggaagaggaggaggcgccgctttccccgcggcgcgcgccctcgccgttgtttgagctgtggtctggaccagtttagggaagttgccggggcccggcgtcgcccagatgtgcgacttcattgagccgcagccagccgagaagatcggcaagatgaagaagttgcggagaactttgtcggagagtttcagccgcattnnnnnnnnnnnnnnnnnnnnnnnnnnnnnnnnnnnnnnnnnnnnnnnnnnnnnnnnnnnnnnnnnnnnnnnnnnnnnnnnnnnnnnnnnnnnnnnnnnnnnnnnnnnnnnnnnnnnnnnnnnnnnnnnnnnnnnnnnnnnnnnnnnnnnnnnnnnnnnnnnnnnnnnnnnnnnnnnnnnnnnnnnnnnnnnnnnnnnnnnnnnnnnnnnnnnnnnnnnnnnnnnnnnnnnnnnnnnnnnnnnnnnnnnnnnnnnnnnnnnnnnnnnnnnnnnnnnnnnnnnggtcttgcaagagcaaaatccgtccctagccacacatactccaacgaagtggttaccttgtggtacagacctccagatgtccttctaggctcaacagaatattccacctgccttgacatgtgnnnnnnnnnnnnnnnnnnnnnnnnnnnnnnnnnnnnnnnnnnnnnnnnnnnnnnnnnnnnnnnnnnnnnnnnnnnnnnnnnnnnnnnnnnnnnnnnnnnnnnnnnnnnnnnnnnnnnnnnnnnnnnnnnnnnnnnnnnnnnnnnnnnnnnnnnnnnnnnnnnnnnnnnnnnnnnnnnnnnnnnnnnnnnnnnnnnnnnnnnnnnnnctcagctatgtgaaccatgcagaagacctggcctccaagctcctacaatgttccccaaagaacagactatcggcacaggctgccttgagccatgagtattttagtgacctgcccccacggctatgggaactcaccganngtcttctatttttactgtcccaaatgtgagattgcaaccagaagctggagaaagcatgcgggcctttgggaaaaacaatagttatggcaaaagtctatcaaacagcaagcactgacaagcagcacattctcaagagcacacagg

SEQ ID NO: 28929 - DNA, 419 bp, Macaca Mulatta
ctactttcccgagcgaaattaacttttcacacatgcataaaacaagagatagtaagcagatttttattagaaacaagtccaagccttgatcctgtgggcattgtgaattaccaggagggagtttctcaatgaccgtttactacatattttggagaggcagctaggaagtggtctaaaggtcaggattgctgtatgtgatcacttgtgccgattttcatcacccgctaaccagagctttagagtgggagttgggaactaagtggttaagtaatgacctgtctgctagaaaaggggaaaaaccaagagaccctgcatttcatactggcgccgtatccccagagcctgactggcacacaggcagtgtaagactaaataagggagtcggggggctcaaaaagtggagccccagctcaagtatc

SEQ ID NO: 28930 - DNA, 803 bp, Macaca Mulatta
  misc_feature (1)...(803): n = A,T,C or G
tttccaggcaccttcgtgggcaccacagagcctgcctccccacccttgagcagcacctcacccaccaccgctgcggccactatgcctgttgtgccctctgtggccagcctggcccctccgggggaggcctcgctctgcctggaagaggtggcccctcctgccagtggcacccgcaaagctcgggtgctctatgactacgaggcggccgacagcagtgagctggccctgctggctgatgagnagctcatcactgtctacagcctgcctggcatggaccctgactggctcattggcgagagaggcaacaagaagggcaaagtccctgtcacctacttggaactgctcagctaggcaggtnnnnnnnnnnnnnnnnattctggcctgggcaggagaggatgggcatagccctgccacttaccttgtttgttggtgacacttctgttcagagtggggagaattcaccccattctgtccctgctcctggtcacctagctgtgagggtgcctgaggctgaatggccccgcccctcccccagccctgcttctgacctgtggctctggagcccctgcccctgcctgcatccctgagcgccccaccctcccggcttcactaaggagggaggggctgtctgaagcagctgcactcagcacctaggccagggtggggccgcagatgggctcaggaagccccaggtgcactcagtgagagccctgcctttcaattgccaaaagctgcatgggggaatgcagcaaggcacacagagctctggcagcccctggggactgggcgctgcccctgggagg

SEQ ID NO: 28931 - DNA, 3774 bp, Macaca Mulatta
  misc_feature (1)...(3774): n = A,T,C or G
ggaaaatgaccgagtggcaatggttaacggagtttcaatggataatgttgaacatgcttttgctgttcagcaactaaggaaaagtgggaaaaatgcaaaaatnnnnnnnnnnnnnnnnnnnnnnnnnnnnnnnnnnnnnnnnnnnnnnnnnnnnnnnnnnnnnnnnnnnnnnnnnnnnnnnnnnnnnnnnnnnnnnnnnnnnnnnnnnnnnnnnnnnnnnnnnnnnnnnnnnnnnnnnnnnnnnnnnnnnnnnnnnnnnnnnnnnnnnnnnnnnnnnnnnnnnnnnnnnnnnnnnnnnnnnnnnnnnnnnnnnnnnnnnnnnnnnnnnnnnnnnnnnnnnnnnnnnnnnnnnnnnnnnnnnnnnnnnnnnnnnnnnnnnnnnnnnnnnnnnnnnnnnnnnnnnnnnnnnnnnnnnnnnnnnnnnnnnnnnnnnnnnnnnnnnnnnnnnnnnnnnnnnnnnnnnnnnnnnnnnnnnnnnnnnnnnnnnnnnnnnnnnnnnnnnnnnnnnnnnnnnnnnnnnnnnnnnnnnnnnnnnnnnnnnnnnnnnnnnnnnnnnnnnnnnnnnnnnnnnnnnnnnnnnnnnnnnnnnnnnnnnnnnnnnnnnnnnnnnnnnnnnnnnnnnnnnnnnnnnnnnnnnnnnnnnnnnnnnnnnnnnnnnnnnnnnnnnnnnnnnnnnnnnnnnnnnnnnnnnnnnnnnnnnnnnnnnnnnnnnnnnnnnnnnnnnnnnnnnnnnnnnnnnnnnnnnnnnnnnnnnnnnnnnnnnnnnnnnnnnnnnnnnnnnnnnnnnnnnnnnnnnnnnnnnnnnnnnnnnnnnnnnnnnnnnnnnnnnnnnnnnnnnnnnnnnnnnnnnnnnnnnnnnnnnnnnnnnnnnnnnnnnnnnnnnnnnnnnnnnnnnnnnnnnnnnnnnnnnnnnnnnnnnnnnnnnnnnnnnnnnnnnnnnnnnnnnnnnnnnnnnnnnnnnnnnnnnnnnnnnnnnnnnnnnnnnnnnnnnnnnnnnnnnnnnnnnnnnnnnnnnnnnnnnnnnnnnnnnnnnnnnnnnnnnnnnnnnnnnnnnnnnnnnnnnnnnnnnnnnnnnnnnnnnnnnnnnnnnnnnnnnnnnnnnnnnnnnnnnnnnnnnnnnnnnnnnnnnnnnnnnnnnnnnnnnnnnnnnnnnnnnnnnnnnnnnnnnnnnnnnnnnnnnnnnnnnnnnnnnnnnnnnnnnnnnnnnnnnnnnnnnnnnnnnnnnnnnnnnnnnnnnnnnnnnnnnnnnnnnnnnnnnnnnnnnnnnnnnnnnnnnnnnnnnnnnnnnnnnnnnnnnnnnnnnnnnnnnnnnnnnnnnnnnnnnnnnnnnnnnnnnnnnnnnnnnnnnnnnnnnnnnnnnnnnnnnnnnnnnnnnnnnnnnnnnnnnnnnnnnnnnnnnnnnnnnnnnnnnnnnnnnnnnnnnnnnnnnnnnnnnnnnnnnnnnnnnnnnnnnnnnnnnnnnnnnnnnnnnnnnnnnnnnnnnnnnnnnnnnnnnnnnnnnnnnnnnnnnnnnnnnnnnnnnnnnnnnnnnnnnnnnnnnnnnnnnnnnnnnnnnnnnnnnnnnnnnnnnnnnnnnnnnnnnnnnnnnnnnnnnnnnnnnnnnnnnnnnnnnnnnnnnnnnnnnnnnnnnnnnnnnnnnnnnnnnnnnnnnnnnnnnnnnnnnnnnnnnnnnnnnnnnnnnnnnnnnnnnnnnnnnnnnnnnnnnnnnnnnnnnnnnnnnnnnnnnnnnnnnnnnnnnnnnnnnnnnnnnnnnnnnnnnnnnnnnnnnnnnnnnnnnnnnnnnnnnnnnnnnnnnnnnnnnnnnnnnnnnnnnnnnnnnnnnnnnnnnnnnnnnnnnnnnnnnnnnnnnnnnnnnnnnnnnnnnnnnnnnnnnnnnnnnnnnnnnnnnnnnnnnnnnnnnnnnnnnnnnnnnnnnnnnnnnnnnnnnnnnnnnnnnnnnnnnnnnnnnnnnnnnnnnnnnnnnnnnnnnnnnnnnnnnnnnnnnnnnnnnnnnnnnnnnnnnnnnnnnnnnnnnnnnnnnnnnnnnnnnnnnnnnnnnnnnnnnnnnnnnnnnnnnnnnnnnnnnnnnnnnnnnnnnnnnnnnnnnnnnnnnnnnnnnnnnnnnnnnnnnnnnnnnnnnnnnnnnnnnnnnnnnnnnnnnnnnnnnnnnnnnnnnnnnnnnnnnnnnnnnnnnnnnnnnnnnnnnnnnnnnnnnnnnnnnnnnnnnnnnnnnggcggatggtgctacaagtgatgaccttgatttgcatgatgatcgtctgtcctacctgtcagctccaggtagtgaatactcaatgtatagcacggacagtagacacacttctgactatgaagacacagacacagaaggcggggcctacactgatcaagaactagatgaaactcttaatgatnnnnnnnnnnnnnnnnnnnnnnnnnnnnnnnnnnnnnnnnnnnnnnnnnnnnnnnnnnnnnnnnnnnnnnnnnnnnnnnnnnnnnnnnnnnnnnnnnnnnnnnnnnnnnnnnnnnnnnnnnnnnnnnnnnnnnnnnnnnnnnnnnnnnnnnnnnnnnnnnnnnnnnnnnnnnnnnnnnnnnnnnnnnnnnnnnnnnnnnnnnnnnnnnnnnnnnnnnnnnnnnnnnnnnnnnnntctgctgttaatcataatgtaaatttaactaatgtcagactggaggagcccaccccagctccttccaccacttactcaccacaagctgattctttaagaacaccaagtactgaggcagctcacataatgctaagagatcaagaaccatcattgtcgtcgcatgtagatccaacaaaggnnnnnnnnnnnnnnnnnnnnnnnnnnnnnnnnnnnnnnnnnnnnnnnnnnnnnnnnnnnnnnnnnnnnnnnnnnnnnnnnnnnnnnnnnnnnnnnnnnnnnnnnnnnnnnnnnnnnnnnnnnnnnnnnnnnnnnnnnnnnnnnnnnnnnnnnnnnnnnnnnnnnnnnnnnnnnnnnnnnnnnnnnnnnnnnnnnnnnnnnnnnnnnnnnnnnnnnnnnnnnnnnnnnnnnnnnnnnnnnnnnnnnnnnnnnnnnnnnnnnnnnnnnnnnnnnnnnnnnnnnnnnnnnnnnnnnnnnnnnnnnnnnnnnnnnnnnnnnnnnnnnnnnnnnnnnnnnnnnnnnnnnnnnnnnnnnnnnnnnnnnnnnnnnnnnnnnnnnnnnnnnnnnnnnnnnnnnnnnnnnnnnnnnnnnnnnnnnnnnnnnnnnnnnnnnnnnnnnnnnnnnnnnnnnnnnnnnnnnnnnnnnnnnnnnnnnnnnnnnnnnnnnnnnnnnnnnnnnnnnnnnnnnnnnnnnnnnnnnnnnnnnnnnnnnnnnnnnnnnnnnnnnnnnnnnnnnnnnnnnnnnnnnnnnnnnnnnnnnnnnnnnnnnnnnnnnnnnnnnnnnnnnnnnnnnnnnnnnnnnnnnnnnnnnnnnnnnnnnnnnnnnnnnnnnnnnnnnnnnnnnnnnnnnnnnnnnnnnnnnnnnnnnnnnnnnnnnnnnnnnnnnnnnnnnnnnnnnnnnnnnnnnnnnnnnnnnnnnnnnnnnnnnnnnnnnnnnnnnnnnnnnnnnnnnnnnnnnnnnnnnnnnnnnnnnnnnnnnnnnnnnnnnnnnnnnnnnnnnnnnnnnnnnnnnnnnnnnnnnnnnnnnnnnnnnnnnnnnnnnnnnnnnnnngcctccagaagtagcatctaaaccttcaggtgctcccatcattggtcccaaacccacttctcagaatcaattcagtgaacatgacaaaactctatacagg

SEQ ID NO: 28932 - DNA, 432 bp, Macaca Mulatta
  misc_feature (1)...(432): n = A,T,C or G
caggtgggggcctgtggcttcaacagccgcatcctatgcttcgtgtaccccatccggttggtacgtgtcaacgaggacgccatggagctgatccgggggcccgnnnnnnnnnnnnnnnnnnnnnnnnnnnnnnnnnnnnnnnnnnnnnnnnnnnnnnnnnnnnnnnnnnnnnnnnnnnnnnnnnnnnnnnnnnnnnnnnnnnnnnnnnnnnnnnnnnnnnnnnnnnnnnnnnnnnnnnnnnnnnnnnnnnnnnnnnnnnnnnnnnnggtgatgtgctggtgatggacgagctgggctacctgtacttccgagaccgcactggggacacgttccgctggaaaggtgagaacgtgtccaccaccgaggtggaaggcacactcagccgcctgctggacatggctgacgtggccgtgtatggtgtcgaggtgccag

SEQ ID NO: 28933 - DNA, 1156 bp, Macaca Mulatta
  misc_feature (1)...(1156): n = A,T,C or G
taaacccaaggagagagcacaagctgagttagcttgagtttgggcaatccacagatagcttaggtactatccagctgatccacagcaggaggagataatccagaagtcatggtcaagtagaagtgaaactgagaagagaccaaacttggttgatcgacaggcatccacagtggagtatctcccaggcatgctacattcaaattgccctaaaggtctcctacccaaattctccagctggtctttggttaaactaggccctgctaagtcttataactntcatacaggtttggaccaacagggcttcattccaggaacaaattatcttatgccttgggacattgtcatcaggactagagctgaagacgaaggagacttagacacaaactcttggcctgctccaaataaagctattcctggaaagagaagtgcagttgtaatgggaagaggaagacggcgagatgacatagctcgagcttttgtgggctttgaatacgaagactctcgaggtcggagattcatgtgctctgggcctgacaaagtaatgaaagtaatgggaagtgggccaaaagaatcagctttaaaagccctaaatagtgacatgcctttatatattctgtcatcctctcaaggtagagggctgaaacctcattatgctcaacttatgaggctttttgttgtggttcctgatgctcctttgcagataatactaatgcctcaggnnnnnnnnnnnnnnnnnnnnnnnnnnnnnnnnnnnnnnnnnnnnnnnnnnnnnnnnnnnnnnnnnnnnnnnnnnnnnnnnnnnnnnnnnnnnnnnnnnnnnnnnnnnnnnnnnnnnnnnnnnnnnnnnnnnnnnnnnnnnnnnnnnnnnnnnnnnnnnnnnnnnnnnnnnnnttcttaaggcagtaacacaatatgtgttttccagccagttcaatcctatgcttgagcnnnnnnnnnnnnnnnnnnnnnnnnnnnnnnnnnnnnnnnnnnnnnnnnnnnnnnnnccaaatccaaaatgtgttttggttacaggagttgagtatttggaaactaatttgttccactattttattgttgatatttattgtaaacgtggctacaactttctaataaagattgattgttctagaaaagaatataaaatacatggatgata

SEQ ID NO: 28934 - DNA, 1228 bp, Macaca Mulatta
  misc_feature (1)...(1228): n = A,T,C or G
cattgcagcctcgagctcctgggctcaaacgatccttcctctgcgatcccccaaagtgctgagattacaggcgtgagccacgcccggccttaaaatcctttttaaaggcactttgacatccattatctcatttaagtctaaaacacgaatttcgaccttcgcgctgctttctggttccacctggcggcagctgcacaaagtgtttctcttcgaaggccctcccaagtttatccggaactattaagcccagggcttcctcagtgctcctcgggccaaaagcagagagcacaaattccggaagnnnnnnnnnnnnnnnnnnnnnnnnnnnnnnnnnnnnnnnnnnnnnnnnnnnnnnnnnnnnnnnnnnnnnnnnnnnnnnnnnnnnnnnnnnnnnnnnnnnnnnnnnnnnnnnnnnnnnnnnnnnnnnnnnnnnnnnnnnnnnnnnnnnnnnnnnnnnnnnnnnnnnnnnnnnnnnnnnnnnnnnnnnnnnnnnnnnnnnnnnnnnnnnnnnnnnnnnnnnnnnnnnnnnnnnnnnnnnnnnnnnnnnnnnnnnnnnnnnnnnnnnnnnnnnnnnnnnnnnnnnnnnnnnnnnnnnnnnnnnnnnnnnnnnnnnnnnnnnnnnnnnnnnnnnnnnnnnnnnnnnnnnnnnnnnnnnnnnnnnnnnnnnnnnnnnnnnnnnnnnnnnnnnnnnnnnnnnnnnnnnnnnnnnnnnnnnnnnnnnnnnnnnnnnnnnnnnnnnnnnnnnnnnnnnnnnnnnnnnnnnnnnnnnnnnnnnnnnnnnnnnnnnnnnnnnnnnnnnnnnnnnnnnnnnnnnnnnnnnnnnnnnnnnnnnnnnnnnnnnnnnnnnnnnnnnnnnnnnnnnnnnnnnnnnnnnnnnnnnnnnnnnnnnnnnnnnnnnnnnnnnnnnnnnnnnnnnnnnnnnnnnnnnnnnnnnnnnnnnnnnnnnnnnnnnnnnnnnnnnnnnnnnnnnnnnnnnnnnnnnnnnnnnnnnnnnnnnnnnnnnnnnnnnnnnnnnnnnnnnnnnnnnnnnnnnnnnnnnnnnnnnnnnnnnnnnnnnnnnnnnnnnnnnnnnnnnnnnnnnnnnnnnnnnnnnnnnnnnnnnnnnnncagtactttaatgggtgtccctgggaggaccatgggagtgatgttcacacctctgacagtgaaatacgcatactatgacactgaacgcatcggagnagttgacctgatcatgaagacctgc

SEQ ID NO: 28935 - DNA, 812 bp, Macaca Mulatta
  misc_feature (1)...(812): n = A,T,C or G
ccagctgcctaagaccctccttcagtctccttagaggacagcttttttctgcctcctgctcctccagagcagcaccatgaggctcctgtggctctgctgggcacactgggtgctgcccctggacggcccgggggtggtcatgactggggagcagctcctgggcagcctgctgcagcaactgcagctcannnnnnnnnnnnnnnnnnnnnnnnnnnnnnnnnnnnnnnnnnnnnnnnnnnnnnnnnnnnnnnnnnnnnnnnnnnnnnnnnnnnnnnnnnnnnnnnnnnnnnnnnnnnnnnnnnnnnnnnnnnnnnnnnnnnnnnnnnnnnnnnnnnnnnnnnnnnnnnnnnnnnnnnnnnnnnnnnnnnnnnnnnnnnnnnnnnnnnnnnnnnnnnnnnnnnnnnnnnnnnnnnnnnnnnnnnnnnnnnnnnnnnnnnnnnnnnnnnnnnnnnnnnnnnnnnnnnnnnnnnnnnnnnnnnnnnnnnnnnnnnnnnnnnnnnnnnnnnnnnnnnnnnnnnnnnnnnnnnnnnnnnnnnnnnnnnnnnnnnnnnnnnnnnnnnnnnnnnnnnncaggctggtgtccgtccacgagagcggctggaaggtcttcgacgtgactgaggccgtgaacttctggcagcagctaagccggccccggcctcctctgctgctacaagtgtcggtgcagagggagcacctgggcccgctggcgtccggcgcccacaagttggtccgctttgcctcgcagggggcgccggccgggcttggggagccccagctggaactgcacacgctggacctcagggactatg

SEQ ID NO: 28936 - DNA, 562 bp, Macaca Mulatta
  misc_feature (1)...(562): n = A,T,C or G
acaagaatagaaaggaattccatatcttaaggaaacagctttcaagtgcctttntgcagtttttcaggagcgcaagatagattgggaataggaataagctctagttcttaacaaccgacactcccaaaagatttagaaaaaagtttacgacataatctagtttacagaaaaatcttgtgctagaatactttttaaaaggtattttgaatatcattaaaactgctttttttccagcaagtatctgaccaactttttctgcttcaataaatctttggaaaaactcttttgttgtgttatttattggatagtagctaaacaattctctatttggtcctattagttaatttgtcattacaatcacgtaacttgataaattcaggttatttatgcttgagatgtagttcttaattttgtcatttttgacagacctcacttctttttattattacttaaaaacatttacaaataggtgctgtcgaataaaataacttgtaccaaaatgaagataggtctctatacaatgagctcagctctgtgattttaataataacaaacagacttc

SEQ ID NO: 28937 - DNA, 10153 bp, Macaca Mulatta
  misc_feature (1)...(10153): n = A,T,C or G
aggtaaattggcaggatgaggagcagcaaatcaaaagaggtgcctttacaaaatccaaggaactctcaaagcaaggatactgttcaannnnnnnnnnnnnnnnnnnnnnnnnnnnnnnnnnnnnnnnnnnnnnnnnnnnnnnnnnnnnnnnnnnnnnnnnnnnnnnnnnnnnnnnnnnnnnnnnnnnnnnnnnnnnnnnnnnnnnnnnnnnnnnnnnnnnnnnnnnnnnnnnnnnnnnnnnnnnnnnnnnnnnnnnnnnnnnnnnnnnnnnnnnnnnnnnnnnnnnnnnnnnnnnnnnnnnnnnnnnnnnnnnnnnnnnnnnnnnnnnnnnnnnnnnnnnnnnnnnnnnnnnnnnnnnnnnnnnnnnnnnnnnnnnnnnnnnnnnnnnnnnnnnnnnnnnnnnnnnnnnnnnnnnnnnnnnnnnnnnnnnnnnnnnnnnnnnnnnnnnnnnnnnnnnnnnnnnnnnnnnnnnnnnnnnnnnnnnnnnnnnnnnnnnnnnnnnnnnnnnnnnnnnnnnnnnnnnnnnnnnnnnnnnnnnnnnnnnnnnnnnnnnnnnnnnnnnnnnnnnnnnnnnnnnnnnnnnnnnnnnnnnnnnnnnnnnnnnnnnnnnnnnnnnnnnnnnnnnnnnnnnnnnnnnnnnnnnnnnnnnnnnnnnnnnnnnnnnnnnnnnnnnnnnnnnnnnnnnnnnnnnnnnnnnnnnnnnnnnnnnnnnnnnnnnnnnnnnnnnnnnnnnnnnnnnnnnnnnnnnnnnnnnnnnnnnnnnnnnnnnnnnnnnnnnnnnnnnnnnnnnnnnnnnnnnnnnnnnnnnnnnnnnnnnnnnnnnnnnnnnnnnnnnnnnnnnnnnnnnnnnnnnnnnnnnnnnnnnnnnnnnnnnnnnnnnnnnnnnnnnnnnnnnnnnnnnnnnnnnnnnnnnnnnnnnnnnnnnnnnnnnnnnnnnnnnnnnnnnnnnnnnnnnnnnnnnnnnnnnnnnnnnnnnnnnnnnnnnnnnnnnnnnnnnnnnnnnnnnnnnnnnnnnnnnnnnnnnnnnnnnnnnnnnnnnnnnnnnnnnnnnnnnnnnnnnnnnnnnnnnnnnnnnnnnnnnnnnnnnnnnnnnnnnnnnnnnnnnnnnnnnnnnnnnnnnnnnnnnnnnnnnnnnnnnnnnnnnnnnnnnnnnnnnnnnnnnnnnnnnnnnnnnnnnnnnnnnnnnnnnnnnnnnnnnnnnnnnnnnnnnnnnnnnnnnnnnnnnnnnnnnnnnnnnnnnnnnnnnnnnnnnnnnnnnnnnnnnnnnnnnnnnnnnnnnnnnnnnnnnnnnnnnnnnnnnnnnnnnnnnnnnnnnnnnnnnnnnnnnnnnnnnnnnnnnnnnnnnnnnnnnnnnnnnnnnnnnnnnnnnnnnnnnnnnnnnnnnnnnnnnnnnnnnnnnnnnnnnnnnnnnnnnnnnnnnnnnnnnnnnnnnnnnnnnnnnnnnnnnnnnnnnnnnnnnnnnnnnnnnnnnnnnnnnnnnnnnnnnnnnnnnnnnnnnnnnnnnnnnnnnnnnnnnnnnnnnnnnnnnnnnnnnnnnnnnnnnnnnnnnnnnnnnnnnnnnnnnnnnnnnnnnnnnnnnnnnnnnnnnnnnnnnnnnnnnnnnnnnnnnnnnnnnnnnnnnnnnnnnnnnnnnnnnnnnnnnnnnnnnnnnnnnnnnnnnnnnnnnnnnnnnnnnnnnnnnnnnnnnnnnnnnnnnnnnnnnnnnnnnnnnnnnnnnnnnnnnnnnnnnnnnnnnnnnnnnnnnnnnnnnnnnnnnnnnnnnnnnnnnnnnnnnnnnnnnnnnnnnnnnnnnnnnnnnnnnnnnnnnnnnnnnnnnnnnnnnnnnnnnnnnnnnnnnnnnnnnnnnnnnnnnnnnnnnnnnnnnnnnnnnnnnnnnnnnnnnnnnnnnnnnnnnnnnnnnnnnnnnnnnnnnnnnnnnnnnnnnnnnnnnnnnnnnnnnnnnnnnnnnnnnnnnnnnnnnnnnnnnnnnnnnnnnnnnnnnnnnnnnnnnnnnnnnnnnnnnnnnnnnnnnnnnnnnnnnnnnnnnnnnnnnnnnnnnnnnnnnnnnnnnnnnnnnnnnnnnnnnnnnnnnnnnnnnnnnnnnnnnnnnnnnnnnnnnnnnnnnnnnnnnnnnnnnnnnnnnnnnnnnnnnnnnnnnnnnnnnnnnnnnnnnnnnnnnnnnnnnnnnnnnnnnnnnnnnnnnnnnnnnnaagacttgacggaatctacatggatgcagcctgacagattgagcnagattgagcccacaatttcaccattctcaaccacagccttttgctgcacagctggaagtttactctcccatctcttgagtctagagcatgtaggaattttgcataaggattttgaatctattttaccaaccagaaagaatcataatatggcttcaaggccattaacttttacacctcaaccatatgtgacctcaccagctacttatacagatgccttgttaaaacctagtgccagtcagtataagagtaaactggatcgtattgaagccttgaaagcaacagctgcttctttgtccagcagaattgaaagtgaagccaagaaattagctggggccaacattaactatgggtcagcatggaacactgagtatgatgtgcagcaggcacctcaagaagatggaccttggaccaaggctgtaactccacctgtgaaagatgatactgaagatgttttctctgccagaattcagaagatgctgggaacctgtgtatctcatgcaacttttgatgatgatcttcctggtgtaggcaatctcagtgaatttaaaaagcttcctgagatgataagacctcagagtgccatatcaagctttagagtgagatcccctggtcccagaccagaagggctactggcacagttatgtaaaaggcagactgactcttctagctctgatatgcaagcctgttctcaagacaaagccaaaatatctcttggttccagannnnnnnnnnnnnnnnnnnnnnnnnnnnnnnnnnnnnnnnnnnnnnnnnnnnnnnnnnnnnnnnnnnnnnnnnnnnnnnnnnnnnnnnnnnnnnnnnnnnnnnnnnnnnnnnnnnnnnnnnnnnnnnnnnnnnnnnnnnnnnnnnnnnnnnnnnnnnnnnnnnnnnnnnnnnnnnnnnnnnnnnnnnnnnnnnnnnnnnnnnnnnnnnnnnnnnnnnnnnnnnnnnnnnnnnnnnnnnnnnnnnnnnnnnnnnnnnnnnnnnnnnnnnnnnnnnnnnnnnnnnnnnnnnnnnnnnnnnnnnnnnnnnnnnnnnnnnnnnnnnnnnnnnnnnnnnnnnnnnnnnnnnnnnnnnnnnnnnnnnnnnnnnnnnnnnnnnnnnnnnnnnnnnnnnnnnnnnnnnnnnnnnnnnnnnnnnnnnnnnnnnnnnnnnnnnnnnnnnnnnnnnnnnnnnnnnnnnnnnnnnnnnnnnnnnnnnnnnnnnnnnnnnnnnnnnnnnnnnnnnnnnnnnnnnnnnnnnnnnnnnnnnnnnnnnnnnnnnnnnnnnnnnnnnnnnnnnnnnnnnnnnnnnnnnnnnnnnnnnnnnnnnnnnnnnnnnnnnnnnnnnnnnnnnnnnnnnnnnnnnnnnnnnnnnnnnnnnnnnnnnnnnnnnnnnnnnnnnnnnnnnnnnnnnnnnnnnnnnnnnnnnnnnnnnnnnnnnnnnnnnnnnnnnnnnnnnnnnnnnnnnnnnnnnnnnnnnnnnnnnnnnnnnnnnnnnnnnnnnnnnnnnnnnnnnnnnnnnnnnnnnnnnnnnnnnnnnnnnnnnnnnnnnnnnnnnnnnnnnnnnnnnnnnnnnnnnnnnnnnnnnnnnnnnnnnnnnnnnnnnnnnnnnnnnnnnnnnnnnnnnnnnnnnnnnnnnnnnnnnnnnnnnnnnnnnnnnnnnnnnnnnnnnnnnnnnnnnnnnnnnnnnnnnnnnnnnnnnnnnnnnnnnnnnnnnnnnnnnnnnnnnnnnnnnnnnnnnnnnnnnnnnnnnnnnnnnnnnnnnnnnnnnnnnnnnnnnnnnnnnnnnnnnnnnnnnnnnnnnnnnnnnnnnnnnnnnnnnnnnnnnnnnnnnnnnnnnnnnnnnnnnnnnnnnnnnnnnnnnnnnnnnnnnnnnnnnnnnnnnnnnnnnnnnnnnnnnnnnnnnnnnnnnnnnnnnnnnnnnnnnnnnnnnnnnnnnnnnnnnnnnnnnnnnnnnnnnnnnnnnnnnnnnnnnnnnnnnnnnnnnnnnnnnnnnnnnnnnnnnnnnnnnnnnnnnnnnnnnnnnnnnnnnnnnnnnnnnnnnnnnnnnnnnnnnnnnnnnnnnnnnnnnnnnnnnnnnnnnnnnnnnnnnnnnnnnnnnnnnnnnnnnnnnnnnnnnnnnnnnnnnnnnnnnnnnnnnnnnnnnnnnnnnnnnnnnnnnnnnnnnnnnnnnnnnnnnnnnnnnnnnnnnnnnnnnnnnnnnnnnnnnnnnnnnnnnnnnnnnnnnnnnnnnnnnnnnnnnnnnnnnnnnnnnnnnnnnnnnnnnnnnnnnnnnnnnnnnnnnnnnnnnnnnnnnnnnnnnnnnnnnnnnnnnnnnnnnnnnnnnnnnnnnnnnnnnnnnnnnnnnnnnnnnnnnnnnnnnnnnnnnnnnnnnnnnnnnnnnnnnnnnnnnnnnnnnnnnnnnnnnnnnnnnnnnnnnnnnnnnnnnnnnnnnnnnnnnnnnnnnnnnnnnnnnnnnnnnnnnnnnnnnnnnnnnnnnnnnnnnnnnnnnnnnnnnnnnnnnnnnnnnnnnnnnnnnnnnnnnnnnnnnnnnnnnnnnnnnnnnnnnnnnnnnnnnnnnnnnnnnnnnnnnnnnnnnnnnnnnnnnnnnnnnnnnnnnnnnnnnnnnnnnnnnnnnnnnnnnnnnnnnnnnnnnnnnnnnnnnnnnnnnnnnnnnnnnnnnnnnnnnnnnnnnnnnnnnnnnnnnnnnnnnnnnnnnnnnnnnnnnnnnnnnnnnnnnnnnnnnnnnnnnnnnnnnnnnnnnnnnnnnnnnnnnnnnnnnnnnnnnnnnnnnnnnnnnnnnnnnnnnnnnnnnnnnnnnnnnnnnnnnnnnnnnnnnnnnnnnnnnnnnnnnnnnnnnnnnnnnnnnnnnnnnnnnnnnnnnnnnnnnnnnnnnnnnnnnnnnnnnnnnnnnnnnnnnnnnnnnnnnnnnnnnnnnnnnnnnnnnnnnnnnnnnnnnnnnnnnnnnnnnnnnnnnnnnnnnnnnnnnnnnnnnnnnnnnnnnnnnnnnnnnnnnnnnnnnnnnnnnnnnnnnnnnnnnnnnnnnnnnnnnnnnnnnnnnnnnnnnnnnnnnnnnnnnnnnnnnnnnnnnnnnnnnnnnnnnnnnnnnnnnnnnnnnnnnnnnnnnnnnnnnnnnnnnnnnnnnnnnnnnnnnnnnnnnnnnnnnnnnnnnnnnnnnnnnnnnnnnnnnnnnnnnnnnnnnnnnnnnnnnnnnnnnnnnnnnnnnnnnnnnnnnnnnnngactctcatagtgatgaagatacaaaggataataaggcaaccagtcctggtccaactgacttggagacccgcagtccttctcccatnnnnnnnnnnnnnnnnnnnnnnnnnnnnnnnnnnnnnnnnnnnnnnnnnnnnnnnnnnnnnnnnnnnnnnnntttctaacaaagcgggagcaaaaattaatgcaacggcgacaacatgcagaggagctcctagagtggaagcgacgtttagatgcagaagaagcagaaattcgtcaaatggaaaaacaagctttggctgcctgggacaaagaattaataaaacccaaaactcctaagaaagaactggaggaccagagaacagaacagaaagnnnnnnnnnnnnnnnnnnnnnnnnnnnnnnnnnnnnnnnnnnnnnnnnnnnnnnnnnnnnnnnnnnnnnnnnnnnnnnnnnnnnnnnnnnnnnnnnnnnnnnnnnnnnnnnnnnnnnnnnnnnnnnnnnnnnnnnnnnnnnnnnnnnnnnnnnnnnnnnnnnnnnnnnnnnnnnnnnnnnnnnnnnnnnnnnnnnnnnnnnnnnnnnaacagtcacttcccaaaagctgcacatctgtgtcaaagcaggagtctagcaaaggaagtcataggactggaggacaatgtcacctgcctatcaagtcccatcagcactgttatagttggtcagatgagtcattatctatgacacagtcannnnnnnnnnnnnnnnnnnnnnnnnnnnnnnnnnnnnnnnnnnnnnnnnnnnnnnnnnnnnnnnnnnnnnnnnnnnnnnnnnnnnnnnnnnnnnnnnnnnnnnnnnnnnnnnnnnnnnnnnnnnnnnnnnnnnnnnnnnnnnnnnnnnnnnnnnnnnnnnnnnnnnnnnnnnnnnnnnnnnnnnnnnnnnnnnnnnnnnnnnnnnnnnnnnnnnnnnnnnnnnnnnnnnnnnnnnnnnnnnnnnnnnnnnnnnnnnnnnnnnnnnnnnnnnnnnnnnnnnnnnnnnnnnnnnnnnnnnnnnnnnnnnnnnnnnnnnnnnnnnnnnnnnnnnnnnnnnnnnnnnnnnnnnnnnnnnnnnnnnnnnnnnnnnnnnnnnnnnnnnnnnnnnnnnnnnnnnnnnnnnnnnnnnnnnnnnnnnnnnnnnnnnnnnnnnnnnnnnnnnnnnnnnnnnnnnnnnnnnnnnnnnnnnnnnnnnnnnnnnnnnnnnnnnnnnnnnnnnnnnnnnnnnnnnnnnnnnnnnnnnnnnnnnnnnnnnnnnnnnnnnnnnnnnnnnnnnnnnnnnnnnnnnnnnnnnnnnnnnnnnnnnnnnnnnnnnnnnnnnnnnnnnnnnnnnnnnnnnnnnnnnnnnnnnnnnnnnnnnnnnnnnnnnnnnnnnnnnnnnnnnnnnnnnnnnnnnnnnnnnnnnnnnnnnnnnnnnnnnnnnnnnnnnnnnnnnnnnnnnnnnnnnnnnnnnnnnnnnnnnnnnnnnnnnnnnnnnnnnnnnnnnnnnnnnnnnnnnnnnnnnnnnnnnnnnnnnnnnnnnnnnnnnnnnnnnnnnnnnnnnnnnnnnnnnnnnnnnnnnnnnnnnnnnnnnnnnnnnnnnnnnnnnnnnnnnnnnnnnnnnnnnnnnnnnnnnnnnnnnnnnnnnnnnnnnnnnnnnnnnnnnnnnnnnnnnnnnnnnnnnnnnnnnnnnnnnnnnnnnnnnnnnnnnnnnnnnnnnnnnnnnnnnnnnnnnnnnnnnnnnnnnnnnnnnnnnnnnnnnnnnnnnnnnnnnnnnnnnnnnnnnnnnnnnnnnnnnnnnnnnnnnnnnnnnnnnnnnnnnnnnnnnnnnnnnnnnnnnnnnnnnnnnnnnnnnnnnnnnnnnnnnnnnnnnnnnnnnnnnnnnnnnnnnnnnnnnnnnnnnnnnnnnnnnnnnnnnnnnnnnnnnnnnnnnnnnnnnnnnnnnnnnnnnnnnnnnnnnnnnnnnnnnnnnnnnnnnnnnnnnnnnnnnnnnnnnnnnnnnnnnnnnnnnnnnnnnnnnnnnnnnnnnnnnnnnnnnnnnnnnnnnnnnnnnnnnnnnnnnnnnnnnnnnnnnnnnnnnnnnnnnnnnnnnnnnnnnnnnnnnnnnnnnnnnnnnnnnnnnnnnnnnnnnnnnnnnnnnnnnnnnnnnnnnnnnnnnnnnnnnnnnnnnnnnnnnnnnnnnnnnnnnnnnnnnnnnnnnnnnnnnnnnnnnnnnnnnnnnnnnnnnnnnnnnnnnnnnnnnnnnnnnnnnnnnnnnnnnnnnnnnnnnnnnnnnnnnnnnnnnnnnnnnnnnnnnnnnnnnnnnnnnnnnnnnnnnnnnnnnnnnnnnnnnnnnnnnnnnnnnnnnnnnnnnnnnnnnnnnnnnnnnnnnnnnnnnnnnnnnnnnnnnnnnnnnnnnnnnnnnnnnnnnnnnnnnnnnnnnnnnnnnnnnnnnnnnnnnnnnnnnnnnnnnnnnnnnnnnnnnnnnnnnnnnnnnnnnnnnnnnnnnnnnnnnnnnnnnnnnnnnnnnnnnnnnnnnnnnnnnnnnnnnnnnnnnnnnnnnnnnnnnnnnnnnnnnnnnnnnnnnnnnnnnnnnnnnnnnnnnnnnnnnnnnnnnnnnnnnnnnnnnnnnnnnnnnnnnnnnnnnnnnnnnnnnnnnnnnnnnnnnnnnnnnnnnnnnnnnnnnnnnnnnnnnnnnnnnnnnnnnnnnnnnnnnnnnnnnnnnnnnnnnnnnnnnnnnnnnnnnnnnnnnnnnnnnnnnnnnnnnnnnnnnnnnnnnnnnnnnnnnnnnnnnnnnnnnnnnnnnnnnnnnnnnnnnnnnnnnnnnnnnnnnnnnnnnnnnnnnnnnnnnnnnnnnnnnnnnnnnnnnnnnnnnnnnnnnnnnnnnnnnnnnnnnnnnnnnnnnnnnnnnnnnnnnnnnnnnnnnnnnnnnnnnnnnnnnnnnnnnnnnnnnnnnnnnnnnnnnnnnnnnnnnnnnnnnnnnnnnnnnnnnnnnnnnnnnnnnnnnnnnnnnnnnnnnnnnnnnnnnnnnnnnnnnnnnnnnnnnnnnnnnnnnnnnnnnnnnnnnnnnnnnnnnnnnnnnnnnnnnnnnnnnnnnnnnnnnnnnnnnnnnnnnnnnnnnnnnnnnnnnnnnnnnnnnnnnnnnnnnnnnnnnnnnnnnnnnnnnnnnnnnnnnnnnnnnnnnnnnnnnnnnnnnnnnnnnnnnnnnnnnnnnnnnnnnnnnnnnnnnnnnnnnnnnnnnnnnnnnnnnnnnnnnnnnnnnnnnnnnnnnnnnnnnnnnnnnnnnnnnnnnnnnnnnnnnnnnnnnnnnnnnnnnnnnnnnnnnnnnnnnnnnnnnnnnnnnnnnnnnnnnnnnnnnnnnnnnnnnnnnnnnnnnnnnnnnnnnnnnnnnnnnnnnnnnnnnnnnnnnnnnnnnnnnnnnnnnnnnnnnnnnnnnnnnnnnnnnnnnnnnnnnnnnnnnnnnnnnnnnnnnnnnnnnnnnnnnnnnnnnnnnnnnnnnnnnnnnnnnnnnnnnnnnnnnnnnnnnnnnnnnnnnnnnnnnnnnnnnnnnnnnnnnnnnnnnnnnnnnnnnnnnnnnnnnnnnnnnnnnnnnnnnnnnnnnnnnnnnnnnnnnnnnnnnnnnnnnnnnnnnnnnnnnnnnnnnnnnnnnnnnnnnnnnnnnnnnnnnnnnnnnnnnnnnnnnnnnnnnnnnnnnnnnnnnnnnnnnnnnnnnnnnnnnnnnnnnnnnnnnnnnnnnnnnnnnnnnnnnnnnnnnnnnnnnnnnnnnnnnnnnnnnnnnnnnnnnnnnnnnnnnnnnnnnnnnnnnnnnnnnnnnnnnnnnnnnnnnnnnnnnnnnnnnnnnnnnnnnnnnnnnnnnnnnnnnnnnnnnnnnnnnnnnnnnnnnnnnnnnnnnnnnnnnnnnnnnnnnnnnnnnnnnnnnnnnnnnnnnnnnnnnnnnnnnnnnnnnnnnnnnnnnnnnnnnnnnnnnnnnnnnnnnnnnnnnnnnnnnnnnnnnnnnnnnnnnnnnnnnnnnnnnnnnnnnnnnnnnnnnnnnnnnnnnnnnnnnnnnnnnnnnnnnnnncccatcgccatcatagcaagagtgcttctggaccttgtacttattcttaaagactaccagtatggagttcataggacaatgtggtatatctggtattacagcctttgcctttcgagactatccactggattaattggttattttcggtgggcagagttgtacagtgtaattgtatacctctcgctagcaaccccactgggtctcagagagggccaaaaacagcagacttacctctgagtttagactagggtatcacttatttgagtctgaagtcaagtgagagaggtatagatcaatgcatcacatcacttttgaaatgtaattctggtctataccatggaagtcataaatggacattatagtctctaaacagtattaaacccttaaccgcttctaaaataggcaagcttaataatgtctgccaacttcacattctggagtttatttcatttctttttgaagaccattttcttccattattgtagttgagcagcaccaagtggactgtcaggctaacaggaataagtggtagccttgctttttgagcaccatctaaagaattttaaacctctgcattatgtttagtgttctctgtgtgggcgtaaaaacaaagaagtgcccctactgaagactgggctcaaaaggaccaatgcagggctggttcttctaccccttggtttactcctgcacttttcttactcgttctgaatc

SEQ ID NO: 28938 - DNA, 1531 bp, Macaca Mulatta
  misc_feature (1)...(1531): n = A,T,C or G
gggatatttttggtttcttacatgaaaaatcaaaatggtacatttaaggactgggctaatgctaatgtcagcagacagattgaagacactgtattatatggttactatactttatattctgttatattgttctgtgtgttcttctggatcccttttgtctacttctattatgaagaaaaggatgatgatgatactagtaaatgtactcaaattaaaacggcactcaagtatactttgggatttgttgtgatttgtgcattgcttcttttagttggtgcctttgttccattgaatgttcccaataacanaaattctacagagtgggaaaaagtgaagttccctattgaaagacttggaagtagtcatggtttagctgcgttgtcattttctatcagttctctgaacttgatcggaatgttggcagctataacttacacagcctatggcatgtctgcgttacctttaaatctgataaaaggcactagaagcgctgcttatgaacgtttaaaaaacacggaagacattgaagaagtagaacaacacattcaaactattaaatcaaaaagcaaagatggtcgacctttgccagcaagggataaacgcgccttaaaacagtttgaagaaaggttacgaacacttaagaagagagagaggcatttagaattcattgaaaacagctggtggacaaaattttgtggcgctctgcgtcccctgaagatcatctggggaatatttttcatcttagttgcattactgtttgtaatttctctcttcttgtcaaatttagataaagctcttcattcagctggaatagattctggtttcataatttttggagcaaacctgagtaatccactgaatatgcttttgcctttactacaaacagttttccctcttgattatattcttataacaattattattatgtactttatttttacttcaatggcaggaattcgaaatattggcatatggttcttttggattagattatataaaatcagaagaggtagaaccaggccccaagcactcctttttctctgcatgatacttctgcttattgtccttcacactagctatatgatttatagtcttgctccccaatatgttatgtatggaagccaaaattacttaatagagactaatataacttctgataaccataaaggcaattcaaccctttctgtgccaaagagatgtgatgcagatgctcctgaagatcagtgtactgttacccggacatacctattccttcacaagttctggttcttcagtgctgcttactattttggtaactgggcctttcttggggtattcttgattggattaattgtatcctgttgtaaagggaagaaatcggttattgaaggagtagacgaagattcagacataagtgatgatgagcccctctgtttattctgttttgacagccttcctctgtccttaaagggttttataaacacttgacttggaaaatcctggtaatggccattttttaaaagggtttagaactggacctttagggaatgaa

SEQ ID NO: 28939 - DNA, 1461 bp, Macaca Mulatta
  misc_feature (1)...(1461): n = A,T,C or G
gttgatgtgacactggctacaaacaacatttcgcatgctgtcattgctgaagataagagacaagtgagctctcggaacccacagataatgtatcaggcaccagggacnnnnnnnnnnnnnnnnngaatttcaattattgtactggcgtcctgggctcacaaaatatcacatcagggaagcattactgggaggtagatgtgtccaagaaaagtgcttggatcctgggggtatgtgctggcttccaatccgatgcaatgtataatattgaacaaaatgaaaattatcaacctaaatatggctactgggttatagggttacaggaaggagttaaatatagtgttttccaggatggttccnnnnnnnnnnnnnnnnnnnnnnnnnnnnnnnnnnnnnnnnnnnnnnnnnnnnnnnnnnnnnnnnnnnnnnnnnnnnnnnnnnnnnnnnnnnnnnnnnnnnnnnnnnnnnnnnnnnnnnnnnnnnnnnnnnnnnnnnnnnnnnnnnnnnnnnnnnnnnnnnnnnnnnnnnnnnnnnnnnnnnnnnnnnnnnnnnnnnnnnnnnnnnnnnnnnnnnnnnnnnnnnnnnnnnnnnnnnnnnnnnnnnnnnnnnnnnnnnnnnnnnnnnnnnnnnnnnnnnnnnnnnnnnnnnnnnnnnnnnnnnnnnnnnnnnnnnnnnnnnnnnnnnnnnnnnnnnnnnnnnnnnnnnnnnnnnnnnnnnnnnnnnnnnnnnnnnnnnnnnnnnnnnnnnnnnnnnnnnnnnnnnnnnnnnnnnnnnnnnnnnnnnnnnnnnnnnnnnnnnnnnnnnnnnnnnnnnnnnnnnnnnnnnnnnnnnnnnnnnnnnnnnnnnnnnnnnnnnnnnnnnnnnnnnnnnnnnnnnnnnnnnnnnnnnnnnnnnnnnnnnnnnnnnnnnnnnnnnnnnnnnnnnnnnnnnnnnnnnnnnnnnnnnnnnnnnnnnnnnnnnnnnnnnnnnnnnnnnnnnnnnnnnnnnnnnnnnnnnnnnnnnnnnnnnnnnnnnnnnnnnnnnnnnnnnnnnnnnnnnnnnnnnnnnnnnnnnnnnnnnnnnnnnnnnnnnnnnnnnnnnnnnnnnnnnnnnnnnnnnnnnnnnnnnnnnnnnnnnnnnnnnnnnnnnnnnnnnnnnnnnnnnnnnnnnnnnnnnnnnnnnnnnnnnnnnnnnnnnnnnnnnnnnnnnnnnnnnnnnnnnnnnnnnnnnnnnnnnnnnnccaggctggagttcaatggcttgatcccatctcaccgcaacctccacctcacgggttcaagcgattctcctgcctcagcctcccgagtagctgggattacaggcatgcaccaccacgcctggctaatttgcatttttagtagagacagggtttctgcatgttggtcaggctggtctcgaactctcatcctaggtgatccatctgtctcaccctcccaaagtgctgggattataagcgtgagccac

SEQ ID NO: 28940 - DNA, 1083 bp, Macaca Mulatta
  misc_feature (1)...(1083): n = A,T,C or G
aagcttctagaggcttaatgccagggggaatggagtgagctatgaggaaaccactattccccgacccagtgcctaccacaatctgtttgattaccactgattactcgtagagatgctgaggtggtactgaccagtcgtgagcttgacagcctggccttgaaccagtccacggggctgcctacccttactctaccccgaggaacgacctgtttacccccttccttactcccttacctggaacagttccggcggattgtattctggttgggggatgaccttcggtcctgggaagcggccaagttgtttgcacgaaaactgaaccccaaacgatgcttcttggtgcggccaggagaccagcagccccgtcccctggaggccctgaacagaggcttcaatctttctcgtattcttcgtaccgcgctgcctgcctggcacaagtccatcgtgtctttccggcagcttcgggaggaggtgctaggagaactgtcaaatgtggagcaagtagctggcctccgctggagccgcttcccagacctcaatcgtatcttgaagggacatcgaaagggtgaactgacggtcttcacaggncagggccaacaggcagtggaaagacgacattcatcagtgagtatgccctggatttgtgttcccagggggtgaacacactgtggggtagcttcgagatcagtaatgtgagactagcccgggtcatgcttacacagtttgccgaggggcggctggaagatcaattggacaaatacgatcactgggctgaccgctttgaggacctgcccctctatttcatgactttccatggacagcagagcatcaggnnnnnnnnnnnnnnnnnnnnnnnnnnnnnnnnnnnnnnnnnnnnnnnnnnnnnnnnnnnnnnnnnnnnnnnnnnnnnnnnnnnnnnnnnnnnnnnnnnnnnnnnnaggatcgcagctcaagactacatcgttggggtctttcggaagtttgcgacagacaataactgccatgtgacgctggtcattcacccccggaaagaggatgatgacaaggaactacagacagcatccatttttggctcagccaaag

SEQ ID NO: 28941 - DNA, 3418 bp, Macaca Mulatta
  misc_feature (1)...(3418): n = A,T,C or G
acctctaaacactgtaaggaacctaagagtgtatgacccttctaccagcaccttgaatgtccgctgggaccatgcagagggaaatcctcgtcagtacaagctcttctatgcaccagcagcagatggtccagaggaactggtannnnnnnnnnnnnnnnnnnnnnnnnnnnnnnnnnnnnnnnnnnnnnnnnnnnnnnnnnnnnnnnnnnnnnnnnnnnnnnnnnnnnnnnnnnnnnnnnnnnnnnnnnnnnnnnnnnnnnnnnnnnnnntgatgagaggactggcaagaaatgtccaagtatacaatcctacacctaacagcctcgatgttcgctgggaccctgcaccaggacctgtgttgcagtattgcattgtgtattcccctgtggatggcacaagaccctcagaatcnnnnnnnnnnnnnnnnnnnnnnnnnnnnnnnnnnnnnnnnnnnnnnnnnnnnnnnnnnnnnnnnnnnnnnnnnnnnnnnnnnnnnnnnnnnnnnnnnnnnnnnnnnnnnnnnnnnnnnnnnnnnnnnnnnnnnnnnnnnnnnnnnnnnnnnnnnnnnnnnnnnnnnnnnnnnnnnnnnnnnnnnnnnnnnnnnnnnnnnnnnnnnnnnnnnnnnnnnnnnnnnnnnnnnnnnnnnnnnnnnnnnnnnnnnnnnnnnnnnnnnnnnnnnnnnnnnnnnnnnnnnnnnnnnnnnnnnnnnnnnnnnnnnnnnnnnnnnnnnnnnnnnnnnnnnnnnnnnnnnnnnnnnnnnnnnnnnnnnnnnnnnnnnnnnnnnnnnnnnnnnnnnnnnnnnnnnnnnnnnnnnnnnnnnnnnnnnnnnnnnnnnnnnnnnnnnnnnnnnnnnnnnnnnnnnnnnnnnnnnnnnnnnnnnnnnnnnnnnnnnnnnnnnnnnnnnnnnnnnnnnnnnnnnnnnnnnnnnnnnnnnnnnnnnnnnnnnnnnnnnnnnnnnnnnnnnnnnnnnnnnnnnnnnnnnnnnnnnnnnnnnnnnnnnnnnnnnnnnnnnnnnnnnnnnnnnnnnnnnnnnnnnnnnnnnnnnnnnnnnnnnnnnnnnnnnnnnnnnnnnnnnnnnnnnnnnnnnnnnnnnnnnnnnnnnnnnnnnnnnnnnnnnnnnnnnnnnnnnnnnnnnnnnnnnnnnnnnnnnnnnnnnnnnnnnnnnnnnnnnnnnnnnnnnnnnnnnnnnnnnnnnnnnnnnnnnnnnnnnnnnnnnnnnnnnnnnnnnnnnnnnnnnnnnnnnnnnnnnnnnnnnnnnnnnnnnnnnnnnnnnnnnnnnnnnnnnnnnnnnnnnnnnnnnnnnnnnnnnnnnnnnnnnnnnnnnnnnnnnnnnnnnnnnnnnnnnnnnnnnnnnnnnnnnnnnnnnnnnnnnnnnnnnnnnnnnnnnnnnnnnnnnnnnnnnnnnnnnnnnnnnnnnnnnnnnnnnnnnnnnnnnnnnnnnnnnnnnnnnnnnnnnnnnnnnnnnnnnnnnnnnnnnnnnnnnnnnnnnnnnnnnnnnnnnnnnnnnnnnnnnnnnnnnnnnnnnnnnnnnnnnnnnnnnnnnnnnnnnnnnnnntcaggtttcatttgtgcaatacagcgatgaggtcaagtctgagttcaagctgaacacatacaatgacaaggccctagcccttggggccctccagaatattaggtacagaggaggaaacacaagaacaggnnnnnnnnnnnnnnnnnnnnnnnnnnnnnnnnnnnnnnnnnnnnnnnnnnnnnnnnnnnnnnnnnnnnnnnnnnnnnnnnnnnnnnnnnnnnnnnnnnnnnnnnnnnnnnnnnnnnnnnnnnnnnnnnnnnnnnnnnnnnnnnnnnnnnnnnnnnnnnnnnnnnnnnnnnnnnnnnnnnnnnnnnnnnnnnnnnnnnnnnnnnnnnnnnnnnnnnnnnnnnnnnnnnnnnnnnnnnnnnnnnnnnnnnnnnnnnnnnnnnnnnnnnnnnnnnnnnnnnnnnnnnnnnnnnnnnnnnnnnnnnnnnnnnnnnnnnnnnnnnnnnnnnnnnnnnnnnnnnnnnnnnnnnnnnnnnnnnnnnnnnnnnnnnnnnnnnnnnnnnnnnnnnnnnnnnnnnnnnnnnnnnnnnnnnnnnnnnnnnnnnnnnnnnnnnnnnnnnnnnnnnnnnnnnnnnnnnnnnnnnnnnnnnnnnnnnnnnnnnnnnnnnnnnnnnnnnnnnnnnnnnnnnnnnnnnnnnnnnnnnnnnnnnnnnnnnnnnnnnnnnnnnnnnnnnnnnnnnnnnnnnnnnnnnnnnnnnnnnnnnnnnnnnnnnnnnnnnnnnnnnnnnnnnnnnnnnnnnnnnnnnnnnnnnnnnnnnnnnnnnnnnnnnnnnnnnnnnnnnnnnnnnnnnnnnnnnnnnnnnnnnnnnnnnnnnnnnnnnnnnnnnnnnnnnnnnnnnnnnnnnnnnnnnnnnnnnnnnnnnnnnnnnnnnnnnnnnnnnnnnnnnnnnnnnnnnnnnnnnnnnnnnnnnnnnnnnnnnnnnnnnnnnnnnnnnnnnnnnnnnnnnnnnnnnnnnnnnnnnnnnnnnnnnnnnnnnnnnnnnnnnnnnnnnnnnnnnnnnnnnnnnnnnnnnnnnnnnnnnnnnnnnnnnnnnnnnnnnnnnnnnnnnnnnnnnnnnnnnnnnnnnnnnnnnnnnnnnnnnnnnnnnnnnnnnnnnnnnnnnnnnnnnnnnnnnnnnnnnnnnnnnnnnnnnnnnnnnnnnnnnnnnnnnnnnnnnnnnnnnnnnnnnnnnnnnnnnnnnnnnnnnnnnnnnnnnnnnnnnnnnnnnnnnnnnnnnnnnnnnnnnnnnnnnnnnnnnnnnnnnnnnnnnnnnnnnnnnnnnnnnnnnnnnnnnnnnnnnnnnnnnnnnnnnnnnnnnnnnnnnnnnnnnnnnnnnnnnnnnnnnnnnnnnnnnnnnnnnnnnnnnnnnnnnnnnnnnnnnnnnnnnnnnnnnnnnnnnnnnnnnnnnnnnnnnnnnnnnnnnnnnnnnnnnnnnnnnnnnnnnnnnnnnnnnnnnnnnnnnnnnnnnnnnnnnnnnnnnnnnnnnnnnnnnnnnnnnnnnnnnnnnnnnnnnnnnnnnnnnnnnnnnnnnnnnnnnnnnnnnnnnnnnnnnnnnnnnnnnnnnnnnnnnnnnnnnnnnnnnnnnnnnnnnnnnnnnnnnnnnnnnnnnnnnnnnnnnnnnnnnnnnnnnnnnnnnnnnnnnnnnnnnnnnnnnnnnnnnnnnnnnnnnnnnnnnnnnnnnnnnnnggtcagatgaacagattcaatcagatgctgaatcagattccaaatgattaccactccagtcgcaaccagccaggcccgccgggtccaccgggacctcctggcagcgcaggagccagaggagaacctggacctggggggcggccaggcttcccgggcacaccagggatgcagggaccccctggggaacgagg

SEQ ID NO: 28942 - DNA, 816 bp, Macaca Mulatta
  misc_feature (1)...(816): n = A,T,C or G
ccaagccaccaggggagctcaagggccccgatggatccacgtggtgcacggcagcacgggcacgntgntgcccaccgactcaaccagcctgccngaagatgaccagaagggcttggcccgctcgctggagacgctgaccgctgctgaggccactgccttcgagcgcaacgcccgcacagaatctgccaaatccacacccctgcacaaacttcgcgatgtgatcatggagagccccctggagatcacagagctgtgactagacagggaagcctcgtgggtgtaagcagcacctctccactgccccctcccagggagcaacggcagggacaggtccggtcggggagctcctcccaaggccgggcctgggggacaaccttggcttggccctggcagcctgcatcagctgctcagatcccacttttgccagatgctcattcagcatctgacctctaccttcataaaatctgttatttttataagaaaaccaaacaaaaatgctaagcgtctaaggacaaggtaaggagggtcactggggcccagaagtctggggaccagctcggctcaagctgagctgaaagaagccgaacaggccctcctccctccgggctccaccctgcaagcactatcccctccggctgagcaggcgcaagggaggcccggcgtgggcatcccctgctggccggacacccgactccagtccaagtcccgctacatttccgccacattcctgctggatgtccaggtggaggtggcatccccacatggacaaggtcaatgtcaatgaacaagcaggctatccatttcactggcttccca

SEQ ID NO: 28943 - DNA, 673 bp, Macaca Mulatta
gcagagggcaggagcatccagtggagttgacaacgggaggcagggacaacatggaaggcccccagggatggctggtggtctgtgtgctggccatatcgctggcctctatcgtgacccagaatgtgtgccgagcaccagacgggaagaacggggtggcaggaagacccggcagaccggggcggccaggcctcaagggggagcgaggggagcctggggcccctggcatcaggacaggcatccaaggccttaaaggagaccagggggaacccgggccctctggaaaccccggcaaggtgggctacccagggcccagtggcccccttggggaccgtggcatcccaggaattaaaggtatcaagggcaacccaggaaacatcaaggaccagccgcggccggccttctcggccattcggcggaacccaccgatggggggcaacgtggtcatctttgacatggtcatcaccaaccaggaagagccgtaccagaaccactcaggccgattcgtctgtactgtacccggctactactacttcaccttccaggtggtgtccgagcgggagatctgcctgtccattgtctcctcctcaaggggccaggtcagacgctccctgggcttctgtgacaccaccaacaaggggctcttccaggtggtgtcaggcggcatggtgcttca

SEQ ID NO: 28944 - DNA, 544 bp, Macaca Mulatta
gggaaaggccatacaaatgtcagacctgccagcgaaccttcaccttgaagcacagcctggttcgcctccagcggatccaccctaaagccaggcatgccaaacaccatgggaaggacagcgacaaggatgagcggggtgaggaagacagcgagaacgagtccacccacagtggcaacaaccccgtctcagagaacgaggcggagctggctcccagcaccagcagccacatggccgtcacccggagccggaaggagggcttggccagtgccacaaaggactgcagccacagggaggagaaggtcacagcaaggcggccgtctgagcctggccagggtgaccttaacccagagagcccagtggccctggggcaggacctgctggaacctcgcagcaagaggcccactcacccaaccctggccacagctgacagcacctcgcagctcccggggatggagtgacagcctcagtccccctcagcacagacagaagccagcagagcaaagcgtcatggggtttcctcagtgcccttcggctgttggggagt

SEQ ID NO: 28945 - DNA, 828 bp, Macaca Mulatta
  misc_feature (1)...(828): n = A,T,C or G
ggctatggaggcctgggctgtggctatggctcctgctgtggctgtggcttccgcagactgggctgtggctacggctatggctcccgttccctctgtggctgtggccatggatgcggctctggctctggctactattattgaggatgccatgggagactctcaccctctatcctgtgatactgagattcacgaattctgaagcccatatgttctgagattttcccttgagtgatgatatcctgcaagagaagtctaatatggtctgttgttgagctaccatctaacctacaaatatcttgaattttcatcatgaaatgggataaggtgaaattcaccagtcagttctcctttcaccagaatgatggtgtcacagcacctgccttgatgacttttatgctggagcttttttctctgttcacctaataaacacttttaatccagaagggaaacctggtgtttatgtcaatcatttaatattttaaatttcttaccaatagtttttgtttcggtttgcatgaaagctaacaattaagttctttgggagatattttttcttacaatttctagagaggtttctttaccaattcaaagttcaattgttttagaaaagtaacccttttaataaacttcaatttcatcctttgcttctaggggaagaatatatgttgtgctgggtaactctcaacactaaattaagtacatatcatttatatgttgggttatgcattgcctgctgtctgtcacataacanagaaaaaaattaattttgccaagccttcttgtaaatatctcttaaaataaatgaatgcttgttactatatccttcac

SEQ ID NO: 28946 - DNA, 781 bp, Macaca Mulatta
  misc_feature (1)...(781): n = A,T,C or G
ggtaacagattatatatagtttgaactattttttgtgtgcttttttaaacttgttaaaaagaaatttatataaaatttaaaatacaaatgttaaattatccagaaatacagaatagttaatattgctagaaccaaataacctctaaaatgtttttatttttggtaattttgtcatgctaagcacttttgtatctgcgcaattcagtaggttaagaatcaatcttctttttcttaatagtacagcagactttagtttcaagtttcataggcttagtacttatgtctagacatttgtgtctaaagcttttcattaacgttttattttaaggacagtatcttttcatgaaagagtatttggctgaatgtttgctatatatgttacttgaaatgttaaatttaatatgcagcataccataggtgtatatataggtatgtaattttaagattaaaatattcagtctacaagtttggttcttatttaagcttttgggctaatactgcatatggcacaatgtttaatattggcaagatcatctcagagaaaggggattcagatataatttttaaaatagagataatttactgaagcgttttctgaccatcctaacttattaaacagcaggcaatattttaatactggaaaaagtattcagaaaatggaaaaaatttagattccatataaggttaatttaacttggtgttccacccctttttgtaacctttttttgaaagttgccaaccaattccttttggaattaattaaaataaggggtaaaaaaan

SEQ ID NO: 28947 - DNA, 656 bp, Macaca Mulatta
  misc_feature (1)...(656): n = A,T,C or G
ttttttttttgatttgccaaaggatattaaccttaaattaaaaaagaaaacatattcacacagaattatctgctttgagaaataaagaatgagaagatataaaaaaaaattcaaaccccaaataatgataaaaatagatgtatcctctataaaaatctggactaaactattcagtcattcatggttattcagtattcagagcatgaggtgaaataccaaagtannnnnnnnnnnnnnnnnnnnnnnnnnnnnnnnnnnnnnnnnnnnnnnnnnnnnnnnnnnnnnnnnnnnnnnnnnnnnnnnnnnnnnnnnnnnnnnnnnnnnnnnnnnnnnnnnnnnnnnnnnnnnnnnnnnnnnnnnnnnnnnnnnnnnnnnnnnnnnnnnnnnnnnnnnnnnnnnnnnnnnnnnnnnnnnnnnnnnnnnnnnnnnnnnnnnnnnnnnnnnnnnnnnnnnnnnnnnnnnnnnnnnnnnnnnnnnnnnnnnnnnnnnnnnnnnnnnnnnnnnnnnnnnnnnnnnnnnnnnnnnnnnnnnnnnnnnnnnnnnnnnnnnnnnnnnnnnnnnnnnnnnnnnnnnnnnnnnnnnnnnnnnnnnnnnnnnnnnnnnnnnnnnnnnnnnnnnnnnnnnnnnnnnnnnnnnnnnnnnnnnnnnnnnnnnnn

SEQ ID NO: 28948 - DNA, 1980 bp, Macaca Mulatta
  misc_feature (1)...(1980): n = A,T,C or G
aaaaaagaagaacatttggactggatgtaccagggtcctggtgggatggtgaactcttgatgagtacctgctggggcgccccattgacaaatatgtttttgagaagatggaggagaaggaggcaggctgctcttctgaaacaggactcctcccaggctctatctttgccccatcaggtgccaattcccttcttgacatggccagcaagatccgggaggacccactgttcatcatcaggnnnnnnnnnnnnnnnnnnnnnnnnnnnnnnnnnnnnnnnnnnnnnnnnnnnnnnnnnnnnnnnnnnnnnnnnnnnnnnnnnnnnnnnnnnnnnnnnnnnnnnnnnnnnnnnnnnnnnnnnnnnnnnnnnnnnnnnnnnnnnnnnnnnnnnnnnnnnnnnnnnnnnnnnnnnnnnnnnnnnnnnnnnnnnnnnnnnnnnnnnnnnnnnnnnnnnnnnnnnnnnnnnnnnnnnnnnnnnnnnnnnnnnnnnnnnnnnnnnnnnnnnnnnnnnnnnnnnnnnnnnnnnnnnnnnnnnnnnnnnnnnnnnnnnnnnnnnnnnnnnnnnnnnnnnnnnnnnnnnnnnnnnnnnnnnnnnnnnnnnnnnnnnnnnnnnnnnnnnnnnnnnnnnnnnnnnnnnnnnnnnnnnnnnnnnnnnnnnnnnnnnnnnnnnnnnnnnnnnnnnnnnnnnnnnnnnnnnnnnnnnnnnnnnnnnnnnnnnnnnnnnnnnnnnnnnnnnnnnnnnnnnnnnnnnnnnnnnnnnnnnnnnnnnnnnnnnnnnnnnnnnnnnnnnnnnnnnnnnnnnnnnnnnnnagaaaactctccgcagaggaattagagcgaaaacggcaagagatgatggaaaacgccaaatggcgggaggaggagagactgaacatcctcaagaggcacgctaaagatgaggaacgggagcagaggctagagaagctggactcccgggatgggaagttcatccannnnnnnnnnnnnnnnnnnnnnnnnnnnnnnnnnnnnnnnnnnnnnnnnnnnnnnnnnnnnnnnnnnnnnnnnnnnnnnnnnnnnnnnnnnnnnnnnnnnnnnnnnnnnnnnnnnnnnnnnnnnnnnnnnnnnnnnnnnnnnnnnnnnnnnnnnnnnnnnnnnnnnnnnnnnnnnnnnnnnnnnnnnnnnnnnnnnnnnnnnnnnnnnnnnnnnnnnnnnnnnnnnnnnnnnnnnnnnnnnnnnnnnnnnnnnnnnnnnnnnnnnnnnnnnnnnnnnnnnnnnnnnnnnnnnnnnnnnnnnnnnnnnnnnnnnnnnnnnnnnnnnnnnnnnnnnnnnnnnnnnnnnnnnnnnnnnnnnnnnnnnnnnnnnnnnnnnnnnnnnnnnnnnnnnnnnnnnnnnnnnnnnnnnnnnnnnnnnnnnnnnnnnnnnnnnnnnnnnnnnnnnnnnnnnnnnnnnnnnnnnnnnnnnnnnnnnnnnnnnnnnnnnnnnnnnnnnnnnnnnnnnnnnnnnnnnnnnnnnnnnnnnnnnnnnnnnnnnnnnnnnnnnnnnnnnnnnnnnnnnnnnnnnntcaggttaggtcaaagccaagggagtgacagaatctggaaaatcaaacaatacaaacagccctaaatgaactgttaactatttgatctttggatgtaaaagtgtaatgtgtatatgtacaaatgtataattcttacatgcttttaaaaaaggttggctttgtgaaaataccttgtttggtcagtgactttactaggtaatagaaccgcattgaaccttgatggcaaggaataaaataaggcaggccagctcgtttttctctgaatctggctgatttaggaggagcctgggtttatcgacaggatctggagtatcttcttttccactgcttgcagtctccaatgtaggcagtgtaaaggtatagtaaaatgattttaggagtcagaaccaaattgccaatatgctccatggctcctaaaggaaaataaaatggaagctttt

SEQ ID NO: 28949 - DNA, 138 bp, Macaca Mulatta
ttctttaattcagtgcggctctgggatttcattgagaaccgagaaagccggcatgtccccaacaatgaagatgtcgacatgacagagctcggggacctcttcatgcacctttctggagtggagtcatcagaaccctaa

SEQ ID NO: 28950 - DNA, 113 bp, Macaca Mulatta
cacctgcactccggagcctcaggtcccaagactgaggctgtgctgcaggaaggtgagctgctgctgtcaccccgcatgcagaaggcactggaaggcgtacactacattgccga

SEQ ID NO: 28951 - DNA, 6188 bp, Macaca Mulatta
  misc_feature (1)...(6188): n = A,T,C or G
atcttatctaagctttctttgcctacccgtgcctgggaaccagcaatgaagaagagttttgcttttgacaatgttggctacgaaggtggtctggatggcctgggcccttcttctcaggtggacaccagcacaatcaggatcttgggcatgacttgtcagtcatgtgtgaagtccattgaggacagaatttccagtttgaaaggcatcgtgagcatgaaggtttccctggaacaaggcagtgccactgtgaaatatgtgccatcagttgtgagcctgcaacaggtttgccatcaaattggggacatgggcttcgaggccagcattgcagaaggaaaggcagcctcctggccctcaaggtccttgcctgcccaggaggctgtggtcaagctccgggtggagggcatgacctgccagtcctgtgtcggctccattgaaggcaaggtccggaaactgcaaggagtagtgagagtcaaagtctcactcagcaaccaagaggctgtcatcacttatcagccttatctcattcagcctgaagacctcagggaccatgtaaatgacatgggatttgaagctgccatcaagaacaaagtggctccctgaaacctgggaccaattgatatgagcggtgagaaagcnnnnnnnnnnnnnnnnnnnnnnnnnnnnnnnnnnnnnnnnnnnnnnnnnnnnnnnnnnnnnnnnnnnnnnnnnnnnnnnnnnnnnnnnnnnnnnnnnnnnnnnnnnnnnnnnnnnnnnnnnnnnnnnnnnnnnnnnnnnnnnnnnnnnnnnnnnnnnnnnnnnnnnnnnnnnnnnnnnnnnnnnnnnnnnnnnnnnnnnnnnnnnnnnnnnnnnnnnnnnnnnnnnnnnnnnnnnnnnnnnnnnnnnnnnnnnnnnnnnnnnnnnnnnnnnnnnnnnnnnnnnnnnnnnnnnnnnnnnnnnnnnnnnnnnnnnnnnnnnnnnnnnnnnnnnnnnnnnnnnnnnnnnnnnnnnnnnnnnnnnnnnnnnnnnnnnnnnnnnnnnnnnnnnnnnnnnnnnnnnnnnnnnnnnnnnnnnnnnnnnnnnnnnnnnnnnnnnnnnnnnnnnnnnnnnnnnnnnnnnnnnnnnnnnnnnnnnnnnnnnnnnnnnnnnnnnnnnnnnnnnnnnnnnnnnnnnnnnnnnnnnnnnnnnnnnnnnnnnnnnnnnnnnnnnnnnnnnnnnnnnnnnnnnnnnnnnnnnnnnnnnnnnnnnnnnnnnnnnnnnnnnnnnnnnnnnnnnnnnnnnnnnnnnnnnnnnnnnnnnnnnnnnnnnnnnnnnnnnnnnnnnnnnnnnnnnnnnnnnnnnnnnnnnnnnnnnnnnnnnnnnnnnnnnnnnnnnnnnnnnnnnnnnnnnnnnnnnnnnnnnnnnnnnnnnnnnnnnnnnnnnnnnnnnnnnnnnnnnnnnnnnnnnnnnnnnnnnnnnnnnnnnnnnnnnnnnnnnnnnnnnnnnnnnnnnnnnnnnnnnnnnnnnnnnnnnnnnnnnnnnnnnnnnnnnnnnnnnnnnnnnnnnnnnnnnnnnnnnnnnnnnnnnnnnnnnnnnnnnnnnnnnnnnnnnnnnnnnnnnnnnnnnnnnnnnnnnnnnnnnnnnnnnnnnnnnnnnnnnnnnnnnnnnnnnnnnnnnnnnnnnnnnnnnnnnnnnnnnnnnnnnnnnnnnnnnnnnnnnnnnnnnnnnnnnnnnnnnnnnnnnnnnnnnnnnnnnnnnnnnnnnnnnnnnnnnnnnnnnnnnnnnnnnnnnnnnnnnnnnnnnnnnnnnnnnnnnnnnnnnnnnnnnnnnnnnnnnnnnnnnnnnnnnnnnnnnnnnnnnnnnnnnnnnnnnnnnnnnnnnnnnnnnnnnnnnnnnnnnnnnnnnnnnnnnnnnnnnnnnnnnnnnnnnnnnnnnnnnnnnnnnnnnnnnnnnnnnnnnnnnnnnnnnnnnnnnnnnnnnnnnnnnnnnnnnnnnnnnnnnnnnnnnnnnnnnnnnnnnnnnnnnnnnnnnnnnnnnnnnnnnnnnnnnnnnnnnnnnnnnnnnnnnnnnnnnnnnnnnnnnnnnnnnnnnnnnnnnnnnnnnnnnnnnnnnnnnnnnnnnnnnnnnnnnnnnnnnnnnnnnnnnnnnnnnnnnnnnnnnnnnnnnnnnnnnnnnnnnnnnnnnnnnnnnnnnnnnnnnnnnnnnnnnnnnnnnnnnnattctctggtctcctggtggttgctgtggctgagaaggcggagaggagccctgtgacattcttcgacacgccccccatgctcttcgtgttcattgccctggggcggtggctggaacacttggcaaagnnnnnnnnnnnnnnnnnnnnnnnnnnnnnnnnnnnnnnnnnnnnnnnnnnnnnnnnnnnnnnnnnnnnnnnnnnnnnnnnnnnnnnnnnnnnnnnnnnnnnnnnnnnnnnnnnnnnnnnnnnnnnnnnnnnnnnnnnnnnnnnnnnnnnnnnnnnnnnnnnnnnnnnnnnnnnnnnnnnnnnnnnnnnnnnnnnnnnnnnnnnnnnnnnnnnnnnnnnnnnnnnnnnnnnnnnnnnnnnnnnnnnnnnnnnnnnnnnnnnnnnnnnnnnnnnnnnnnnnnnnnnnnnnnnnnnnnnnnnnnnnnnnnnnnnnnnnnnnnnnnnnnnnnnnnnnnnnnnnnnnnnnnnnnnnnnnnnnnnnnnnnnnnnnnnnnnnnnnnnnnnnnnnnnnnnnnnnnnnnnnnnnnnnnnnnnnnnnnnnnnnnnnnnnnnnnnnnnnnnnnnnnnnnnnnnnnnnnnnnnnnnnnnnnnnnnnnnnnnnnnnnnnnnnnnnnnnnnnnnnnnnnnnnnnnnnnnnnnnnnnnnnnnnnnnnnnnnnnnnnnnnnnnnnnnnnnnnnnnnnnnnnnnnnnnnnnnnnnnnnnnnnnnnnnnnnnnnnnnnnnnnnnnnnnnnnnnnnnnnnnnnnnnnnnnnnnnnnnnnnnnnnnnnnnnnnnnnnnnnnnnnnnnnnnnnnnnnnnnnnnnnnnnnnnnnnnnnnnnnnnnnnnnnnnnnnnnnnnnnnnnnnnnnnnnnnnnnnnnnnnnnnnnnnnnnnnnnnnnnnnnnnnnnnnnnnnnnnnnnnnnnnnnnnnnnnnnnnnnnnnnnnnnnnnnnnnnnnnnnnnnnnnnnnnnnnnnnnnccagcagcgaacacnccttgggcgtggcagtcaccaaatactgtaaagagnnnnnnnnnnnnnnnnnnnnnnnnnnnnnnnnnnnnnnnnnnnnnnnnnnnnnnnnnnnnnnnnnnnnnnnnnnnnnnnnnnnnnnnnnnnnnnnnnnnnnnnnnnnnnnnnnnnnnnnnnnnnnnnnnnnnnnnnnnnnnnnnnnnnnnnnnnnnnnnnnnnnnnnnnnnnnnnnnnnnnnnnnnnnnnnnnnnnnnnnnnnnnnnnnnnnnnnnnnnnnnnnnnnnnnnnnnnnnnnnnnnnnnnnnnnnnnnnnnnnnnnnnnnnnnnnnnnnnnnnnnnnnnnnnnnnnnnnnnnnnnnnnnnnnnnnnnnnnnnnnnnnnnnnnnnnnnnnnnnnnnnnnnnnnnnnnnnnnnnnnnnnnnnnnnnnnnnnnnnnnnnnnnnnnnnnnnnnnnnnnnnnnnnnnnnnnnnnnnnnnnnnnnnnnnnnnnnnnnnnnnnnnnnnnnnnnnnnnnnnnnnnnnnnnnnnnnnnnnnnnnnnnnnnnnnnnnnnnnnnnnnnnnnnnnnnnnnnnnnnnnnnnnnnnnnnnnnnnnnnnnnnnnnnnnnnnnnnnnnnnnnnnnnnnnnnnnnnnnnnnnnnnnnnnnnnnnnnnnnnnnnnnnnnnnnnnnnnnnnnnnnnnnnnnnnnnnnnnnnnnnnnnnnnnnnnnnnnnnnnnnnnnnnnnnnnnnnnnnnnnnnnnnnnnnnnnnnnnnnnnnnnnnnnnnnnnnnnnnnnnnnnnnnnnnnnnnnnnnnnnnnnnnnnnnnnnnnnnnnnnnnnnnnnnnnnnnnnnnnnnnnnnnnnnnnnnnnnnnnnnnnnnnnnnnnnnnnnnnnnnnnnnnnnnnnnnnnnnnnnnnnnnnnnnnnnnnnnnnnnnnnnnnnnnnnnnnnnnnnnnnnnnnnnnnnnnnnnnnnnnnnnnnnnnnnnnnnnnnnnnnnnnnnnnnnnnnnnnnnnnnnnnnnnnnnnnnnnnnnnnnnnnnnnnnnnnnnnnnnnnnnnnnnnnnnnnnnnnnnnnnnnnnnnnnnnnnnnnnnnnnnnnnnnnnnnnnnnnnnnnnnnnnnnnnnnnnnnnnnnnnnnnnnnnnnnnnnnnnnnnnnnnnnnnnnnnnnnnnnnnnnnnnnnnnnnnnnnnnnnnnnnnnnnnnnnnnnnnnnnnnnnnnnnnnnnnnnnnnnnnnnnnnnnnnnnnnnnnnnnnnnnnnnnnnnnnnnnnnnnnnnnnnnnnnnnnnnnnnnnnnnnnnnnnnnnnnnnnnnnnnnnnnnnnnnnnnnnnnnnnnnnnnnnnnnnnnnnnnnnnnnnnnnnnnnnnnnnnnnnnnnnnnnnnnnnnnnnnnnnnnnnnnnnnnnnnnnnnnnnnnnnnnnnnnnnnnnnnnnnnnnnnnnnnnnnnnnnnnnnnnnnnnnnnnnnnnnnnnnnnnnnnnnnnnnnnnnnnnnnnnnnnnnnnnnnnnnnnnnnnnnnnnnnnnnnnnnnnnnnnnnnnnnnnnnnnnnnnnnnnnnnnnnnnnnnnnnnnnnnnnnnnnnnnnnnnnnnnnnnnnnnnnnnnnnnnnnnnnnnnnnnnnnnnnnnnnnnnnnnnnnnnnnnnnnnnnnnnnnnnnnnnnnnnnnnnnnnnnnnnnnnnnnnnnnnnnnnnnnnnnnnnnnnnnnnnnnnnnnnnnnnnnnnnnnnnnnnnnnnnnnnnnnnnnnnnnnnnnnnnnnnnnnnnnnnnnnnnnnnnnnnnnnnnnnnnnnnnnnnnnnnnnnnnnnnnnnnnnnnnnnnnnnnnnnnnnnnnnnnnnnnnnnnnnnnnnnnnnnnnnnnnnnnnnnnnnnnnnnnnnnnnnnnnnnnnnnnnnnnnnnnnnnnnnnnnnnnnnnnnnnnnnnnnnnnnnnnnnnnnnnnnnnnnnnnnnnnnnnnnnnnnnnnnnnnnnnnnnnnnnnnnnnnnnnnnnnnnnnnnnnnnnnnnnnnnnnnnnnnnnnnnnnnnnnnnnnnnnnnnnnnnnnnnnnnnnnnnnnnnnnnnnnnnnnnnnnnnnnnnnnnnnnnnnnnnnnnnnnnnnnnnnnnnnnnnnnnnnnnnnnnnnnnnnnnnnnnnnnnnnnnnnnnnnnnnnnnnnnnnnnnnnnnnnnnnnnnnnnnnnnnnnnnnnnnnnnnnnnnnnnnnnnnnnnnnnnnnnnnnnnnnnnnnnnnnnnnnnnnnnnnnnnnnnnnnnnnnnnnnnnnnnnnnnnnnnnnnnnnnnnnnnnnnnnnnnnnnnnnnnnnnnnnnnnnnnnnnnnnnnnnnnnnnnnnnnnnnnnnnnnnnnnnnnnnnnnnnnnnnnnnnnnnnnnnnnnnnnnnnnnnnnnnnnnnnnnnnnnnnnnnnnnnnnnnnnnnnnnnnnnnnnnnnnnnnnnnnnnnnnnnnnnnnnnnnnnnnnnnnnnnnnnnnnnnnnnnnnnnnnnnnnnnnnnnnnnnnnnnnnnnttggattaaattcttgcctgaaacccnttttctcccacacaaaatagttttagtgacttttttcagtgtccattacttgccaggggcagttttagcagcactttcgatagattacctctaatcttcccaaccaaccaacaaggtagctattactgtccgcattttacaggcaaggaaacaggctccaagaggctgaggactttgcccaggatgacatagccagtggacaagccgtgtctgtcagctgtgaaggcttcactctaattgtccttctaccttgaatagaagttttcctgataagaataaacaaggaaaaggtccttgcctcctggaagaacgaatctaccaggtgatctattcattgtttcaactcagaatgcaattcattcaggaggtcatctgaccttcaccttggatggttagtttcactttttacatatagtttttgcggggttttattttataaaatccaagctccccagtgattgtgttttcattgttttcagccccccaactccagcccgcagcacatttccgctgtccgtcagtaactgtgtcctctctttatgcttgctt

SEQ ID NO: 28952 - DNA, 154 bp, Macaca Mulatta
ccactccacggaagcagcggcgggagcgcaccaccttcacgcgttcacagctggacgtgctcgaggcactcttcgccaagactcgctaccctgacatcttcatgcgggaggaggtggcgctcaagatcaacctgccggagtccagagtccaggt

SEQ ID NO: 28953 - DNA, 393 bp, Macaca Mulatta
aaaactagaaacctcactaatttgcaccaagtcatcagtgaagaagaaaaaggtaaggacacaatgaaaaataaacttaagatacagtatacctactcattttgaaagttcattaattgagtaatttcatgctataaattttcattcatcctgcttaagccaggggcaggacaccttcctttccgtaggaaagaagcaaatacaatgagacacatcagttaaaaatcaaactcattgatgatttttaagaaaagttttaagttctctggggtctatttattcatttatgaaataagaaattagattacttataaactgtagttcaagtctagaatataataactctaaacgttgtatctccttttcaattaagaacagggaacatacttgtga

SEQ ID NO: 28954 - DNA, 705 bp, Macaca Mulatta
  misc_feature (1)...(705): n = A,T,C or G
tgaaactggccaaaccatttctagcttgacaccactgatcatggcnagctaaagaagcgatgaagagtaaccgttaacatcactgctgtggcctcatattcttttttccattttctacaagaagccttttagtatatgaaaattattactctttttggggtttaaagaaatggtctgcataacctgaatgaaagaagcaagtgactattctctgaagacaaccaagagaaaattgcaaaaagaaaagtatgacttttatatgaaccccttctttagggtccaaaaggaattgtggactgaatcactagccttaggtcttttcagcaaacagcctatcagggccatttatcatgtgtgagatttgcattttactttgctgactttgttgtaatagatcccattcattgtcccctttggggtatttccaatacttgaatggcagattggagtttttcagagtatttgtttatctgctagtctttctctccttcatagctttcctttccctggacttgctccttttgagttgcttttgagtttctcatgcctaggcaagtgtaatagaaattatgtagctccttctgttggcaaaggagctctatatagtttcactttgtataccagttaggaccagctgttgtttcctgttatattttagttcagaacttgaccttgaggcagggagaagcgtttgtgtttttactt

SEQ ID NO: 28955 - DNA, 227 bp, Macaca Mulatta
gtggaggtaaagccatatgtgctggatgaccagatgtgtgatgaatgccagggcgcacgctgtggtggaaaatttgctccctttttttgtgccaatgtcacttgcctgcagtattactgtgagttttgttgggcaaatatccactctcgtgctggacgtgagttccataagccattggtaaaggaaggtgctgatcgcccacgtcagatccacttccgctggaacta

SEQ ID NO: 28956 - DNA, 1108 bp, Macaca Mulatta
  misc_feature (1)...(1108): n = A,T,C or G
atggcgggccctgagggtttccagtaccgcgctctgtacccgttccgccgggagcggccagaggacctggagctgctgcctggcgatgtgctggtagtgagccgggcggccttgcaggcactgggtgtggccgagggtggcgagcgctgcccacagaatgtgggctggatgcccggcctcaacgagcgcacacggcagcgaggtgacttccctggcacctacgtcgagttcctgnnnnnnnnnnnnnnnnnnnnnnnnnnnnnnnnnnnnnnnnnnnnnnnnnnnnnnnnnnnnnnnnnnnnnnnnnnnnnnnnnnnnnnnnnnnnnnnnnnnnnnnnnnnnnnnnnnnnnnnnnnnnnnnnnnnnnnnnnnnnnnnnnnnnnnnnnnnnnnnnnnnnnnnnnnnnnnnnnnnnnnnnnnnnnnnnnnnnnnnnnnnnnnnnnnnnnnnnnnnnnnnnnnnnnnnnnnnnnnnnnnnnnnnnnnnnnnnnnnnnnnnnnnnnnnnnnnnnnnnnnnnnnnnnnnnnnnnnnnnnnnnnnnnnnnnnnnnnnnnnnnnnnnnnnnnnnnnnnnnnnnnnnnnnnnnnnnnnnnnnnnnnnnnnnnnnnnnnnnnnnnnnnnnnnnnnnnnnnnnnnnnnnnnnnnnnnnnnnnnnnnnnnnnnnnnnnnnnnnnnnnnnnnnnnnnnnnnnnnnnnnnnnnnnnnnnnnnnnnnnnnnnnnnnnnnnnnnnnnnnnnnnnnnnnnnnnnnnnnnnnnnnnnnnnnnnnnnnnnnnnnnnnnnnnnnnnnnnnnnnnnnnnnnnnnnnnnnnnnnnnnnnnnnnnnnnnnnnnnnnnnnnnnnnnnnnnnnnnnnnnnnnnnnnnnnnnnnnnnnnnnnnnnnnnnnnnnnnnnnnnnnnnnnnnnnnnnnnnnnnnnnnnnnnnnnnnnnnnnnnnnnnnnnnnnnnnnnnnnnnnnnnnnnnnnnnnnnnnnnnnnnnnnnnnnnnnnnnnnnnnnnnnnnnnnnnngggaggaggtgaacgagaaactccgagacactcccgatggcaccttcctagtccgagatgcttccagcaagatccagggcgagtacacgctgaccctcagg

SEQ ID NO: 28957 - DNA, 687 bp, Macaca Mulatta
  misc_feature (1)...(687): n = A,T,C or G
ggcggacaaagcccaattgttcctgggccctttccccatagcgccttggccggctccccagccctgggcaggggcgggggccagtgtggtgacacacactgnnnnnnnnnnnnnnnnnnnnnnnnnnnnnnnnnnnnnnnnnnnnnnnnnnnnnnnnnnnnnnnnnnnnnnnnnnnnnnnnnnnnnnnnnnnnnnnnnnnnnnnnnnnnnnnnnnnnnnnnnnnnnnnnnnnnnnnnnnnnnnnnnnnnnnnnnnnnnnnnnnnnnnnnnnnnnnnnnncagcctgggcagaggagcagaataagttggtgcatggcggaccctgcgacaagacatctcacccctaccaagctgctctctacacctccggtcacttgctgtgtggcggggtccttatccatccactgtgggtcctcacagctgcccactgcaaaaaaccnnnnnnnnnnnnnnnnnnnnnnnnnnnnnnnnnnnnnnnnnnnnnnnnnnnnnnnnnnnnnnnnnnnnnnnnnnnnnnnnnnnnnnnnnnnnnnnnnnnnnnnnnnnnnnnnnnnnnnnnnnnnnnnnnnnnnnnnnnnnnnnnnnnnnnnnnnnnnnnnnnnnnnnnnnnnnnnnnnnnnnnnnnnnnnnnnnnnnnnnnnnnnnnnnnnnnnnnnnnntcctgggctggggcaagacagcagatgg

SEQ ID NO: 28958 - DNA, 435 bp, Macaca Mulatta
acgagcgcagcctgtgggtgtcacgggtggcgcagatcgccgtgctctgcgtgctgtcgcttaccgtggtcttcggcgtcttcttcctgggctgcaacctgctcatcaagtccgagagcatgatcaactttctggtgcaggagcgccggccctccaaggacgtgggtgccgccatcctggggctgtactgagcgccatctgggcccgccctcgccagcgctgctgcaagaaggaccccggagacccggaccctcgcccggttctctctgcgctctgccgctgcctccgggctggcagctacgtgcctggggcgccagggcggggacgcggcgagactctcggcgggggcgcgggaagggacttggacgcctggctccgtcctgtgtgcgctgcagcgttgcgggtgggagagtgggggatgagggttcttaccag

SEQ ID NO: 28959 - DNA, 1102 bp, Macaca Mulatta
  misc_feature (1)...(1102): n = A,T,C or G
cagattttatcatgtgggcaacctgttgcaactggttctgcctggatggacagcctgaagaggtcccaccaccccagggagccaggatgcaggcctattccaatcctgggtacagctccttcccttccccaacaggcctggaaccaagctgcaagtcctgtggggctcactttgcaagcacagccaggaannnnnnnnnnnnnnnnnnnnnnnnnnnnnnnnnnnnnnnnnnnnnnnnnnnnnnnnnnnnnnnnnnnnnnnnnnnnnnnnnnnnnnnnnnnnnnnnnnnnnnnnnnnnnnnnnnnnnnnnnnnnnnnnnnnnnnnnnnnnnnnnnnnnnnnnnnnnnnnnnnnnnnnnnnnnnnnnnnnnnnnnnnnnnnnnnnnnnnnnnnnnnnnnnnnnnnnnnnnnnnnnnnnnnnnnnnnnnnnnnnnnnnnnnnnnnnnnnnnnnnnnnnnnnnnnnnnnnnnnnnnnnnnnnnnnnnnnnnnnnnnnnnnnnnnnnnnnnnnnnnnnnnnnnnnnnnnnnnnnnnnnnnnnnnnnnnnnnnnnnnnnnnnnnnnnnnnnnnnnnnnnnnnnnnnnnnnnnnnnnnnnnnnnnnnnnnnnnnnnnnnnnnnnnnnnnnnnnnnnnnnnnnnnnnnnnnnnnnnnnnnnnnnnnnnnnnnnnnnnnnnnnnnnnnnnnnnnnnnnnnnnnnnnnnnnnnnnnnnnnnnnnnnnnnnnnnnnnnnnnnnnnnnnnnnnnnnnnnnnnnnnnnnnnnnnnnnnnnnnnnnnnnnnnnnnnnnnnnnnnnnnnnnnnnnnnnnnnnnnnnnnnnnnnnnnnnnnnnnnnnnnnnnnnnnnnnnnnnnnnnnnnnnnnnnnnnnnnnnnnnnnnnnnnnnnnnnnnnnnnnnnnnnnnnnnnnnnnnnnnnnnnnnnnggggagcagtaccatcaggcttggaggagaacctgtgtaagatctgcatggactcacccattgactgtgttctgctggagtgtggccacatggtaacctgtaccaagtgtggcaagcgcatgaatgaatgtcccatctgccggcagtatgtaatccgagctgtgcatgtcttccggtcctgag

SEQ ID NO: 28960 - DNA, 351 bp, Macaca Mulatta
atgagctggggatgagagaagtcgcaggaagaatcctctgtccggagcctgcagactccaaacccccacagtacccacaacagcaggaagcaccagctccgggtcccaagaaaggagggctccaaatccaggagctgtggcccaggagctgagaacacgtcggctccgggagaggacaggacttcagggacctgagagccgccccgagcaccgggggttgtggctgcctcagtggccgagctggaagagccctcgaatgccattcacaggagcagccccggaggcagcccgggaacccatgggcctcagaaggactggtttgtccgaaaagtgagaggaagcggaggagag

SEQ ID NO: 28961 - DNA, 690 bp, Macaca Mulatta
agggaaggatatagagcggggatacatatgattgaaaccaggaaggtacttctgttaagtaagctatttcttttacaggagtttcagcagcttttgctgtaaagctctttaaatcatggataaacgaaaaagatatcaatgcagtagctgcaagtcttcggaaagtcagcatggataacagactgatggtttgtaacttttcttcccattcttgccagcaggtgtaaatgagagaaatttctcattttaagactgaaaagaaagtgttaaatctgatttaaagaaagtttaaccagataaattcttcttttaggaactctttcctgccaataagcaaagtgttgaacactttacaaagtattttactgaggcaggcttgaaagagctttcagaatatgttcggaatcagcaaaccattggagctcgtaaggagctccagaaagaacttcaagaacagatgtcccgtggtgatccatttaaggatataattttatatgtcaaggaggagatgaaaaaaaacaacatcccagaaccagttgtcattggaatagtctggtcaagtgtaatgagcactgtggaatggaacaaaaaagaggagcttgtagcagagcaagccatcaagcacttgaagcaatacagccctctacttgctgcctttactactcaaggtcagtctgagctgactctgtt

SEQ ID NO: 28962 - DNA, 582 bp, Macaca Mulatta
  misc_feature (1)...(582): n = A,T,C or G
ggtttaagtgacacttctccagatgtttttttaatagaggacttgactgtacaagacaaatttgtggagcaactggcagaaggattgctttctcactatttgccagatctgcagacatcaaaacaagccctccaggaactcacnnnnnnnnnnnnnnnnnnnnnnnnnnnnnnnnnnnnnnnnnnnnnnnnnnnnnnnnnnnnnnnnnnnnnnnnnnnnnnnnnnnnnnnnnnnnnnnnnnnnnnnnnnnnnnnnnnnnnnnnnnnnnnnnnnnnnnnnnnnnnnnnnnnnnnnnnnnnnnnnnnnnnnnnnnnnnnaaagagcccttaaactgcagcagaagaggcaaaaagaagagttagaaagggagcagcaacgagagaaggagtttgaaagagaaaagcagttaactgccagaccagccaaaaggacgtgaaaagttgtgtttgtgtgttttcttctcctgtcccatatttgcgttatgatgacttaatgtagactgaagttgaggtagtgccttatgccattatgtcatatgttgaaatccttattccggtattactgtgtctccatgcctttttt

SEQ ID NO: 28963 - DNA, 438 bp, Macaca Mulatta
tacgcggccgccgggatccgctcggacgcggccacgttgtcttgcgcgctttgcgcgcctggccctgggatcctgacccttggctacccgttcctgccccagtagcgtggccgcgagtctctgtgagccggctgtattcccgcactcgctcagggggcacaggcgcagggatcggcccggccactctgagccttcggtgcgcgggcgcgtctgggatacgggcccgggaggcaccgccctccgtccgcccggtgcctcccaggaacagcgaacgggagagagcgccggagagttgggctccgtgcagagctcggcgccggggcccatgcccgtgagcccccgcaggcccgcgccatggcctccgggagcgtgaccgagtgcctgcagcaggagaccacctgccccgtgtgccaacggtacttcgcagagcccatgatg

SEQ ID NO: 28964 - DNA, 137 bp, Macaca Mulatta
cccagccagattcttgagcactcatttcattttctcccctgctcctaatatgtttccttcttcaactcttagagctatttgttcttctctcctagcagagtgagaggctttgttttttcagttttgatggtctgtgc

SEQ ID NO: 28965 - DNA, 1691 bp, Macaca Mulatta
  misc_feature (1)...(1691): n = A,T,C or G
aggactggaccagtttgcaatgccaccagccacgtatgacactgccggtctcaccatgcccacggcaacactgggtannnnnnnnnnnnnnnnnnnnnnnnnnnnnnnnnnnnnnnnnnnnnnnnnnnnnnnnnnnnnnnnnnnnnnnnnnnnnnnnnnnnnnnnnnnnnnnnnnnnnnnnnnnnnnnnnnnnnnnnnnnnnnnnnnnnnnnnnnnnnnnnnnnnnnnnnnnnnnnnnnnnnnnnnnnnnnnnnnnnnnnnnnnnnnnnnnnnnnnnnnnnnnnnnnnnnnnnnnnnnnnnnnnnnnnnnnnnnnnnnnnnnnnnnnnnnnnnnnnnnnnnnnnnnnnnnnnnnnnnnnnnnnnnnnnnnnnnnnnnnnnnnnnnnnnnnnnnnnnnnnnnnnnnnnnnnnnnnnnnnnnnnnnnnnnnnnnnnnnnnnnnnnnnnnnnnnnnnnnnnnnnnnnnnnnnnnnnnnnnnnnnnnnnnnnnnnnnnnnnnnnnnnnnnnnnnnnnnnnnnnnnnnnnnnnnnnnnnnnnnnnnnnnnnnnnnnnnnnnnnnnnnnnnnnnnnnnnnnnnnnnnnnnnnnnnnnnnnnnnnnnnnnnnnnnnnnnnnnnnnnnnnnnnnnnnnnnnnnnnnnnnnnnnnnnnnnnnnnnnnnnnnnnnnnnnnnnnnnnnnnnnnnnnnnnnnnnnnnnnnnnnnnnnnnnnnnnnnnnnnnnnnnnnnnnnnnnnnnnnnnnnnnnnnnnnnnnnnnnnnnnnnnnnnnnnnnnnnnnnnnnnnnnnnnnnnnnnnnnnnnnnnnnnnnnnnnnnnnnnnnnnnnnnnnnnnnnnnnnnnnnnnnnnnnnnnnnnnnnnnnnnnnnnnnnnnnnnnnnnnnnnnnnnnnnnnnnnnnnnnnnnnnnnnnnnnnnnnnnnnnnnnnnnnnnnnnnnnnnnnnnnnnnnnnnnnnnnnnnnnnnnnnnnnnnnnnnnnnnnnnnnnnnnnnnnnnnnnnnnnnnnnnnnnnnnnnnnnnnnnnnnnnnnnnnnnnnnnnnnnnnnnnnnnnnnnnnnnnnnnnnnnnnnnnnnnnnnnnnnnnnnnnnnnnnnnnnnnnnnnnnnnnnnnnnnnnnnnnnnnnnnnnnnnnnnnnnnnnnnnnnnnnnnnnnnnnnnnnnnnnnnnnnnnnggtatggggcgctgggggctccctgaaggtcaccattctgcagagcagtgacagccgggcctttagcactgtacccctgacacctgtgccccgccccagtgactctgcctcctccacccctgcagctaccagcactccctcaaagcaggccctccagttcttctgctacatctgcaaggccagctgctccagccagcagnnnnnnnnnnnnnnnnnnnnnnnnnnnnnnnnnnnnnnnnnnnnnnnnnnnnnnnnnnnnnnnnnnnnnnnnnnnnnnnnnnnnnnnnnnnnnnnnnnnnnnnnnnnnnnnnnnnnnnnnnnnnnnnnnnnnnnnnnnnnnnnnnnnnnnnnnnnnnnnnnnnnnnnnnnnnnnnnnnnnnnnnnnnnnnnnnnnnnnnnnnnnnnnnnnagatcgccaaacaatccttgcgaccgttctgcaccgtttgcaaccgctacttcaaaacccctcgcaagtttgtggagcacgtgaagtcccagggtcataaggacaaagccaagga

SEQ ID NO: 28966 - DNA, 135 bp, Macaca Mulatta
ggcccagggacggatctttgggaaactgaaagaggaaaacttctttaaccccaaagaagaagtgaagctggaagcccatatcagagtgccctcttccacagctggccgggtgattggcaaaggtggcaagaccgt

SEQ ID NO: 28967 - DNA, 494 bp, Macaca Mulatta
cccctcgaggtcgacagcgacctcgggtgggaacacctttttcaggtcctcgagcacggtcagccgggtgcctgctccaaaatactggggctgatctgtgttcaatcctaagctgctggcacagagatacacggccgagtccccctgctctgtgcgctggatcttcagagtggagacggatccctcagtcctctctgcagagaagcgatcactgggcagccctgatttgtctggttgatcgtcgtctctggaagtaagttagaagctctgggccctttcccagggtctgtcggtaccaataaagggctgcatgacccgaaattggatcacacctgagagctacatcctgtcccctcttcgtgactttgtacctcggggactgggagactccagcacctgtgtgacctgtccctaggaaacccaggaccacccagcagaggagcctggtgcccatggcagggtcaggccaggacaggggcgttaccagatcagtc

SEQ ID NO: 28968 - DNA, 4164 bp, Macaca Mulatta
  misc_feature (1)...(4164): n = A,T,C or G
tggagttgctgtgggtgagctgctgcggtttgtagccaagcatgctgtggtcggatctgcccagccgtggaacagaaacatttgctggatggaaaatccataaaagaaagctcctgtgaaaagctgaggctgacaataatttaagcaaaatcagnnnnnnnnnnnnnnnnnnnnnnnnnnnnnnnnnnnnnnnnnnnnnnnnnnnnnnnnnnnnnnnnnnnnnnnnnnnnnnnnnnnnnnnnnnnnnnnnnnnnnnnnnnnnnnnnnnnnnnnnnnnnnnnnnnnnnnnnnnnnnnnnnnnnnnnnnnnnnnnnnnnnnnnnnnnnnnnnnnnnnnnnnnnnnnnnnnnnnnnnnnnnnnnnnnnnnnnnnnnnnnnnnnnnnnnnnnnnnnnnnnnnnnnnnnnnnnnnnnnnnnnnnnnnnnnnnnnnnnnnnnnnnnnnnnnnnnnnnnnnnnnnnnnnnnnnnnnnnnnnnnnnnnnnnnnnnnnnnnnnnnnnnnnnnnnnnnnnnnnnnnnnnnnnnnnnnnnnnnnnnnnnnnnnnnnnnnnnnnnnnnnnnnnnnnnnnnnnnnnnnnnnnnnnnnnnnnnnnnnnnnnnnnnnnnnnnnnnnnnnnnnnnnnnnnnnnnnnnnnnnnnnnnnnnnnnnnnnnnnnnnnnnnnnnnnnnnnnnnnnnnnnnnnnnnnnnnnnnnnnnnnnnnnnnnnnnnnnnnnnnnnnnnnnnnnnnnnnnnnnnnnnnnnnnnnnnnnnnnnnnnnnnnnnnnnnnnnnnnnnnnnnnnnnnnnnnnnnnnnnnnnnnnnnnnnnnnnnnnnnnnnnnnnnnnnnnnnnnnnnnnnnnnnnnnnnnnnnnnnnnnnnnnnnnnnnnnnnnnnnnnnnnnnnnnnnnnnnnnnnnnnnnnnnnnnnnnnnnnnnnnnnnnnnnnnnnnnnnnnnnnnnnnnnnnnnnnnnnnnnnnnnnnnnnnnnnnnnnnnnnnnnnnnnnnnnnnnnnnnnnnnnnnnnnnnnnnnnnnnnnnnnnnnnnnnnnnnnnnnnnnnnnnnnnnnnnnnnnnnnnnnnnnnnnnnnnnnnnnnnnnnnnnnnnnnnnnnnnnnnnnnnnnnnnnnnnnnnnnnnnnnnnnnnnnnnnnnnnnnnnnnnnnnnnnnnnnnnnnnnnnnnnnnnnnnnnnnnnnnnnnnnnnnnnnnnnnnnnnnnnnnnnnnnnnnnnnnnnnnnnnnnnnnnnnnnnnnnnnnnnnnnnnnnnnnnagatatatggagtgatcactcatttcagactgatccggatttgccgcctggctggaaaagagtcagtgacatcgctgggacctattactggcacatcccaacaggaacgactcagtgggaacggcctgtctccatcccagcagatctccagggttctaggaaagggtcacttagttctgtaacgccatctcccaccccagagaacgagnnnnnnnnnnnnnnnnnnnnnnnnnnnnnnnnnnnnnnnnnnnnnnnnnnnnnnnnnnnnnnnnnnnnnnnnnnnnnnnnnnnnnnnnnnnnnnnnnnnnnnnnnnnnnnnnnnnnnnnnnnnnnnnnnnnnnnnnnnnnnnnnnnnnnnnnnnnnnnnnnnnnnnnnnnnnnnnnnnnnnnnnnnnnnnnnnnnnnnnnnnnnnnnnnnnnnnnnnnnnnnnnnnnnnnnnnnnnnnnnnnnnnnnnnnnnnnnnnnnnnnnnnnnnnnnnnnnnnnnnnnnnnnnnnnnnnnnnnnnnnnnnnnnnnnnnnnnnnnnnnnnnnnnnnnnnnnnnnnnnnnnnnnnnnnnnnnnnnnnnnnnnnnnnnnnnnnnnnnnnnnnnnnnnnnnnnnnnnnnnnnnnnnnnnnnnnnnnnnnnnnnnnnnnnnnnnnnnnnnnnnnnnnnnnnnnnnnnnnnnnnnnnnnnnnnnnnnnnnnnnnnnnnnnnnnnnnnnnnnnnnnnnnnnnnnnnnnnnnnnnnnnnnnnnnnnnnnnnnnnnnnnnnnnnnnnnnnnnnnnnnnnnnnnnnnnnnnnnnnnnnnnnnnnnnnnnnnnnnnnnnnnnnnnnnnnnnnnnnnnnnnnnnnnnnnnnnnnnnnnnnnnnnnnnnnnnnnnnnnnnnnnnnnnnnnnnnnnnnnnnnnnnnnnnnnnnnnnnnnnnnnnnnnnnnnnnnnnnnnnnnnnnnnnnnnnnnnnnnnnnnnnnnnnnnnnnnnnnnnnnnnnnnnnnnnnnnnnnnnnnnnnnnnnnnnnnnnnnnnnnnnnnnnnnnnnnnnnnnnnnnnnnnnnnnnnnnnnnnnnnnnnnnnnnnnnnnnnnnnnnnnnnnnnnnnnnnnnnnnnnnnnnnnnnnnnnnnnnnnnnnnnnnnnnnnnnnnnnnnnnnnnnnnnnnnnnnnnnnnnnnnnnnnnnnnnnnnnnnnnnnnnnnnnnnnnnnnnnnnnnnnnnnnnnnnnnnnnnnnnnnnnnnnnnnnnnnnnnnnnnnnnnnnnnnnnnnnnnnnnnnnnnnnnnnnnnnnnnngttacgatatcagaagtgcttggtagccaggccgccttctcagaaagttcgaccacctccaccgccagcagactcagtgaccagaagagtcacaaccaatgtaaaacgaggggtcttatccctcattgacactttgaaacagaaacgccctgtcaccgaaatgccatagctgcacatgggaaaagactcggctatttacctgaaaattgactagctacactaaagaaaatgaactctgccatctgaccttccatccagttgctgatgctttgtcttcagagaatttacccttaaccaagcagtgttagacaagcatgttctctcgtcttgccaccatcatgtgatatgaaaagaagcatgaataattttttttgctgtaagttacatcatgcgcagtggaaggtctttttcttattgtaaatattgtgaacattacttaacttcacacatacagagagaagaatgtggccacacccctcctagtgaactaatgctgcgtccttggattgaatgatgcgtgagttagtttcactgtcttcttggctggatctgtcacaagcaacatttaagtcctactgcactttgccctgttatccacattggagtaggcactgcatagcagnnnnnnnnnnnnnnnnnnnnnnnnnnnnnnnnnnnnnnnnnnnnnnnnnnnnnnnnnnnnnnnnnnnnnnnnnnnnnnnnnnnnnnnnnnnnnnnnnnnnnnnnnnnnnnnnnnnnnnnnnnnnnnnnnnnnnnnnnnnnnnnnnnnnnnnnnnnnnnnnnnnnnnnnnnnnnnnnnnnnnnnnnnnnnnnnnnnnnnnnnnnnnnnnnnnnnnnnnnnnnnnnnnnnnnnnnnnnnnnnnnnnnnnnnnnnnnnnnnnnnnnnnnnnnnnnnnnnnnnnnnnnnnnnnnnnnnnnnnnnnnnnnnnnnnnnnnnnnnnnnnnnnnnnnnnnnnnnnnnnnnnnnnnnnnnnnnnnnnnnnnnnnnnnnnnnnnnnnnnnnnnnnnnnnnnnnnnnnnnnnnnnnnnnnnnnnnnnnnnnnnnnnnnnnnnnnnnnnnnnnnnnnnnnnnnnnnnnnnnnnnnnnnnnnnnnnnnnnnnnnnnnnnnnnnnnnnnnnnnnnnnnnnnnnnnnnnnnnnnnnnnnnnnnnnnnnnnnnnnnngctagtccatgtgctagaggtaaaggttctgctggaattctgcatccagctcagtccccctctgatgctttttgcccagaaagctgtctgtccatcatttattgtccatggcaacaaattacattaggttgaacctttccttgaatttatgtatttaatattagaatttgttggactcaactagatnnnnnnnnnnnnnnnnnnnnnnnnnnnnnnnnnnnnnnnnnnnnnnnnnncatatctgagcaaagtctacatagaaataatggactatttaacaagtttcccaaaaatagcattttcctgctcctttttatgtagatgagaaacttagctgtaaagacatacagatttagactcttgttgacattgtcgttttaaaaggaagttgctaaggcgatcaatctcaatattagtcttgtttacttctttttaatgttaaaattaacatttacaacatccaattataaaagtaatgctttatgttta

SEQ ID NO: 28969 - DNA, 139 bp, Macaca Mulatta
tctggagcacctattcttacagatgatgttagtttacaagtgtttatggatcacttgaagaaacttgctgtgtccagtgctgcttgaagtgctaaacatgttaaagacacttaagaagatgaaataatattcaaatttc

SEQ ID NO: 28970 - DNA, 384 bp, Macaca Mulatta
caaatgcctgtactttattctccggggagggccagcggctcgcatctccctcgtctccagctgcagctcggatggtgggttttcagtggcgacagacacgtctgctgtgagctcgcggacaccagggagccctgtagtgacatgttatctgaccacctcgccacctgcccatgaccttgaccatgaggagctgctatccacagctagcgccaacaccacgcctgctcttcctggtgacacccacgacaaccaggatttgcttcgatctcagcccagtaggccaggcagaggcgccccgctgtgccttaggaaggtgtgagaccggcttccccccatccccacagcaaaacacggcattcccaagccagtgaggagctaaagaca

SEQ ID NO: 28971 - DNA, 591 bp, Macaca Mulatta
gtcggaagggccacccttcccggccctggcagggtgctggacactggccattttcactggaggttgcccggcagggacccatctctgccccttcctctccccaggcctctagctgcagtgatgctgcagaatcctaagccaggtgcctcctgagcagcccgtgtgcctctccacagcggcgtttgccacccaatgcggctcccttcagatgctctgatgcagagggcacgcccgtagtccctctgcagagcctcacactggggccagggcaggcaccagccccaggcagccagtcgaccacggcctggcgtcttcctcgtagcgtctgttcctcactttgtgttgatgctgacttagaagaatgttccgattttccatgatctaagcaggccacgtttaaaataacatcaaggcaagcgtacgtgtcatcctctgtactgacatctcttcccctgaaatgcttttcaatttgacagcccatttcctagacaagtgcacctggggtttcaggaactttgtctcttttgggagggggttggtggggaggtcaggatgcctgggatcccttcctggagagtcagcttctctctg

SEQ ID NO: 28972 - DNA, 182 bp, Macaca Mulatta
  misc_feature (1)...(182): n = A,T,C or G
cttctccaatttgggaaatacctgctatatgaatgctattctacaatctctgttttcactccagtcatttgcaaatgacttgcttaaacagggtatcccatggaagaaaatcccactcaatgcacttatcagncagacgctttgcacacttgcttgttaaaaaagatatctgtaattcagag

SEQ ID NO: 28973 - DNA, 254 bp, Macaca Mulatta
gtggaaataaaccctatcagtgtcgctgtttgtgggaaggcctttacaaagagctcaacccttactcgacatcagagaattcatactggagaaaaaccctatcactgtaagaaatgtgggaaagcctttcggcacagctcaggccttgttgaacatcagagactccatactggggaaaaaccttataaatgtaatgaatgtgggaaagcttttccccaaagttcagcccttaaacaacataagaaaattcataa

SEQ ID NO: 28974 - DNA, 869 bp, Macaca Mulatta
gtgtggcaacacaacaaaatctttggaacaactggaacctgactattttaaggacatgacaccaactattaggaaaactcagaaaattgttattaagaagagagaaccattgaattttggcatcccagatgggagcacaggtttttctagtagattagcagctacgcaagatctgccttttattcatcagtcttctgaattaggtgacttagatacctggcaagaaaataccaatgcatgggaagaagaagaagatgcagcctggcaagcagaagaagttctaagacagcagaaactagcagacagagaaaagagagcagccgaacaacaaaggaagaaaatggaaaaggaagcacaacggctaatgaagaaggaacaaaataaaattggtgtgaaactttcataacacatgttcttcacattttatcatgccagtaggagaaatctcagctccacaactctagcaacatttgtatggatgtaagagtattttaagaatatacactgcttgattttaatacattgatcaagccatccaggacaccagaattctcccaaagtaccttgaactcttagtgattgagactcaaaaaaacaaaaagaccttgagacaatgttttctttccacgtgcctccaaatataaaaccattgttttgctggaccgaaaagtttcctaaatgggaatatttcagtaccctctcaggctaagggtttcttagctaaataaatgggggggaaaataaattctaagggggggaaaaaggccgggttatgaatttcccttccaaggggcccttcatggataaaataaatcaattttcaaaattgggttcccagggggtcacctggaccctaaatttgggaaaaa

SEQ ID NO: 28975 - DNA, 751 bp, Macaca Mulatta
  misc_feature (1)...(751): n = A,T,C or G
ggggtgtcaatcaaggtgtggcttacaaagatatttttgagggggtttactttccagccatctcactgtacaagagctgcacggtttccattaactttggaccatgcttcaagtatcctccgaaggatctcacttaccgccctatgagtgacatgggctggggcgccgtggtagagcacaccctggctgacgtcttgtatcacgtggagacagaagtggatgggaggcgcagtcccccgtgggaaccctgaccaggtccctcttttctgtcaaggactttctggggaataatactgggnnnnnnnnnnnnnnnnnnnnactgtctcaaatattctcccaaagatgctacaaaacacagcctctccttttagcaagttaaaaggctgggtaggactacgggagactgcctgcctttcaccattttctcccaacttccagtgactgctcttattttgtgtaccacaagccaacaaccgctgactccaggattgtgtaagccccctgtgaaatcagtgctgtactgcataccctgccagctgtgacttgttatcctactatattttctaaagagtgaataatattgtccngagtaacttatttgaaagacatttccttctgtgggcattgactccatcccacctgtttttccaaggaaatggtaaacctgttttctgagaacaacctgaaaatcaatgggctacacatttccaaaccaaatcttaaacacctattttccccctttgggtggtgg

SEQ ID NO: 28976 - DNA, 683 bp, Macaca Mulatta
tgtcctggtcacaattgagccctccagcccaggccccattcctggtgagtgacagggaacagtgggcgatgcacaggcacggcgccccttcccagcgctgctcctctcctctctcccagccaggcgcttactgttgcctgccggcggggtttcgtaccacagaggatcaagccaacccaggtgttcccaagtctgacgatggtcccgtcccctcaaccaggggtccccagccctgggtgtcaggaggacacttgagtccccagggaaaggagacccttcttaggttacatcagccactctcaagccactgcacccccaggaccaactggagttggccttcactgccaccaccttcagcccctgccttgatcccgggagcctggcctctctcacccaccccctgtgcccacagctccaggactggcccagcccatctacatcgaggcttcctcttcacacgtgactgaagggcagactctggatctgaactgtgtggtgcccgggcaggcccatgcccaggtcacgtggtacaagcgcgggggcagcctccccgcccggcaccaggtacaggggccaggatggggaggattccagggcaggcaaggttagacctgcagttgctttctgcacccaaacctcatgcaaacaccagcctgcttgggtaccccgggggataaaatact

SEQ ID NO: 28977 - DNA, 111 bp, Macaca Mulatta
  misc_feature (1)...(111): n = A,T,C or G
gtgctatcggacgtactcgcagaagtgccgtggagatanggggcgctcacgcggcaggccgaggagcgtgagcacacactgcgccgctgccagcaggagggccaggagctg

SEQ ID NO: 28978 - DNA, 791 bp, Macaca Mulatta
  misc_feature (1)...(791): n = A,T,C or G
cagggcgtgctgatgcacgcannnnnnnnnnnnnnnnnnnnnnnnnnnnnnnnnnnnnnngcgnnnnnnnnnnnnnngnnnnnnnnnnnnnnnnnnnnnncgnnnnnnnnnnnnnnnnnnnnnnnnnnnnnnnnnnnnnnnnnnnnnnnnnnnnnnnnnnnnnnnnnnnnnnngttttaaaaactaaatatggaggaaatggaatgaatgttataggtggttggatatagagcaaatgatttcatttattcatccgtctccttgtatatctgtttttcagtttctgtgtgctctgccaagaagggaaggttatgagttctttgtaggacaatggacaggtactgaactccacttcactgcacttataaatattcaggtaggtggcttgtgcccttcctctagaggaaagaggactatcccttggtgggactagaaacccttgctgaggctcaaggacacagaatatctacttactccaagcatgtattattgtggcacacttgaattgtcatactttttgtggtggactagttttctaggccctcctcaatacctggaaattggaaaagactccaaaacaccttctctgactacttctggttctcttttgtctcttccccagacctctagttgcacatactgcatgtgcctcatttaacaaacatgcctgagttatgatggttatatttttcaccccagctagaagccccttgaagaaagctcccagtcttaaatgtggtttaattaacctagttcaacaccttccaacatgctaaagtgaaatattttct

SEQ ID NO: 28979 - DNA, 824 bp, Macaca Mulatta
tgcgtgaggcgagcggatacggggacgagaccagaggccgaactcgggttctgacaagatggccgggctgccccgcaggatcatcaaggaaacccagcgtttgctggcagaaccagttcctggcatcaaagcagaaccatatgagagcaacgcccgttattttcatgtggtcattgctggccctcaagattccccctttgagggagggacttttaaacttgaactattccttcctgaagaatacccaatggcagcccctaaagtacgtttcatgaccaaaatttatcatcctaatgtagacaagttgggaagaatatgtttagatattttgaaagataagtggtccccagcactgcagatccgcacagttctgctatcgatccaggccttgttaagtgctcccaatccagatgatccattagcaaatgatgtagcggagcagtggaagaccaacgaagcccaagccatagaaacagctagagcatggactaggctatatgccatgaataatatttaaattgatccgatcatcaagtgtgcatcacttctcctgttctgccaagacttcctcctttttgtttgcatttaatggacacagtcttagaaacattacagaaataaaaaagcccagaaatcttccagggcctttggtggattgaatgccccattaagcaaatccattgccttggtcctggattccctggtccttaaagccatgaaacagaaaggctaaaaagtattcctcctgggagtttgttgggggaaaacccttttagaaaagcagatagggcccccccttccccggccttttttaatcccatatt

SEQ ID NO: 28980 - DNA, 372 bp, Macaca Mulatta
ggcagggaggccggctgggggcaggcaggcagcgatgcccgcgtcggccgcagctgcctggcactgccctcctttgtgcctgcctcctctgtcagcctccgctccaacgccccacccccacgaggcctgctcctgggcccggccgcagggcctgttgcccgcagagctcccaccctgcgcccacttggtgtgccctcaccttctgggcccccggctcctggcctcaggtcctgctggtgcccaggtcgcccggccccgtcctccgtgctctgcgttcgccccaccctgctgcccgagctcggcggcgagcctggcaccgtgccaggctgcctgggagcccagcccgggcagggcgaactttccggcgagggt

SEQ ID NO: 28981 - DNA, 68 bp, Macaca Mulatta
agcagcaacatgaagcgagcagcctccttgaactatctgaaccaacctagtgcagcacccctccaggt

SEQ ID NO: 28982 - DNA, 1859 bp, Macaca Mulatta
  misc_feature (1)...(1859): n = A,T,C or G
agtttccatggagaatggactggggccagccccatggatccccagagaaacagcctggctccccatcccctcccagcattccagagactggtcagggtgtaaccaagggtgaaggggggactccagccccagcttccttgcctggcggtagcaaggaagaggaagagaaagccaagcggctgctctaccgtgctctgtgcaaggtggctgtgaactccctgtcccagcttgaggcacataacacaggtannnnnnnnnnnnnnnnnnnnnnnnnnnnnnnnnnnnnnnnnnnnnnnnnnnnnnnnnnnnnnnnnnnncctcccaccccgggggaaccagaggatcctgcccaggaccgaactctccactgtgagatatgcaatgtcaaggtcaacttggaggtnnnnnnnnnnnnnnnnnnnnnnnnnnnnnnnnnnnnnnnnnnnnnnnnnnnnnnnnnnnnnnnnnnnnnnnnnnnnnnnnnnnnnnnnnnnnnnnnnnnnnnnnnnnggcacgctgactttctccaaggagctgcccaagttcctggagggcggccttctccccagccccctggcggtggctgcagtgatggcagcggcagcaggctcgccgctgtccctgcgcccggctccagccgcacctcttctccagggaccgccgatcactcaccctctgcttcacccggcccccggacccatccgaactgcgcacggacccatcctcttctccccctactgacctcaaccctgaacccctcccattcaactccccacctccagccgggacccaggcctccgggctcccagcccgcctctcctcccggcactccctaaatgatctctccttcccccccccaccccgagatacggggttccaggaannnnnnnnnnnnnnnnnnnnnnnnnnnnnnnnnnnnnnnnnacaccccagatctcagggaaccccgccccctgcctttccctctcccctagaaaagggggggccgtctcacccccgagcccccttggagacaccccccctcccaaaagccatgtccatccagcccttcccccccaaacctagcacaaaacggggttcacaagccatggtgggggtccggggggacagaaatggattttcttggcannnnnnnnnnnnnnnnnnnnnnnnnnnnnnnnnnnnnnnnnnnnnnnnnnnnnnnnnnnnnnnnnnnnnnnnnnnnnnnnnnnnnnnnnnnnnnnnnnnnnnnnnnnnnnnnnnnnnnnnnnnnnnnnnnnnnnnnnnnnnnnnnnnnnnnnnnnnnnnnnnnnnnnnnnnnnnnnnnnnnnnnnnnnnnnnnnnnnnnnnnnnnnnnnnnnnnnnnnnnnnnnnnnnnnnnnnnnnnnnnnnnnnnnnnnnnnnnnnnnnnnnnnnnnnnnnnnnnnnnnnnnnnnnnnnnnnnnnnnnnnnnnnnnnnnnnnnnnnnnnnnnnnnnnnnnnnnnnnnnnnnnnnnnnnnnnnnnnnnnnnnnnnnnnnnnnnnnnnnnnnnnnnnnnnnnnnnnnnnnnnnnnnnnnnnnnnnnnnnnnnnnnnnnnnnnnnnnnnnnnnnnnnnnnnnnnnnnnnnnnnnnnnnnnnnnnnnnnnnnnnnnnnnnnnnnnnnnnnnnnnnnnnnnnnnnnnnnnnnnnnnnnnnnnnnnnnnnnnnnnnnnnnnnnnnnnnnnnnnnnnnnnnnnnnnnnnnnnnnnnnnnnnnnnnnnnnnnnnnnnnnnnnnnnnnnnnnnnnnnnnnnnncatcaactctttctgcttgacaatgtagcaaccccggccccccacccacggtcctcctcatttttgctctccccgacaataaagtctgaatttgttctgccctcc

SEQ ID NO: 28983 - DNA, 440 bp, Macaca Mulatta
tacttcggaacgacaaaatgaaacggaacttgaccctgagcttaaataacaaaactgtgccaactactactggtgatgcctaattatgaatccaacgtgtaaccagttataaatacatatatatataaaaggatctatttttgtgtaaatgtacaaatactgtaaagctgtttgccataagtattttgcaggagggtctgtacttgagtcttttaggactggagctggaatttcatcaaggggaaattgcctgttgtgtcccagggcggggaggctcgggcatctgtgagagacggggagggtggttaaggtcccattgcttttgagtgccccatggaactcgatgggagtggggttggaaagccttgattgcctcctctgtcacataccactcttggagctggaacttagtgatatgacaatgagagatactcttgtct

SEQ ID NO: 28984 - DNA, 311 bp, Macaca Mulatta
ggatgtagtttagttgctattaccatagccaacccgtagttttacatatacaatctcttgtggagcaatagagttctccattttacagaagcattttaaatgtagtttgaatattttccacaagatgctgcaatgtgagttatcacttcatttatcttaaaaactaaactggttgtcagctacatctaacagaaagaaaaatcactgtgtaacctggttaagtggtaaaataatccaggcgtcagtcaaaggcattttgctgactataatattgattatatttttaacaggaatttaagaaaatattactg

SEQ ID NO: 28985 - DNA, 531 bp, Macaca Mulatta
gcagcacttctaaaagattgaaaacaccaagaagatagatagaatattcactatttctcatattgatgcaattatggtgttctttttcatttgaaacatcttctcctaaaatacatactttaagaaatagtcatttctgtttttgcattaaagtaaattaaagcagaaaacaagctcacttttggctaacttcagtgtatagatttcatacgtatgttgtctttcctgggtacagatttattactgaacaagtacgggtaaataaaatgtcactggtgagcaagacacaagataaaaggtgaacaccacatatggtgtgaattgtaaatgcttgtaccaaccttgaaaacatgtgtcatgtagagccatggaaaatgtttatttgtttttatgcagtacacacatttttaatggcactaataacctgggctctttttgttcatacagtttttctgaaaaaaatttcataaaagacactgcttaaaagaaggttagaataggctggtgcctgatttactgtagaataaaaac

SEQ ID NO: 28986 - DNA, 377 bp, Macaca Mulatta
  misc_feature (1)...(377): n = A,T,C or G
cggaagtcaagttagtctagttagtaccggccnnnnnnnnnnnnnnnnnnnnnnnnnnnnnnctgttccgcctgaggcgagtgacgctggccgccaacgaggtatacgtcctgggtccctcgccctcagtctcgtctccggcgcggctgctcgccccgttttccctctgagctgacctgctccgagccgtgggccgcccatggcgggggccgctccgaccacggccttcgggcaggcggtgatcggccctccgggctcagggaagaccacgtactgtctgggcatgagtgagttcctgcgcgcgctgggccggcgcgtggccgtggtgaacctggacccggccaacgaggggctgccgtacgagtgtgccgtggacg

SEQ ID NO: 28987 - DNA, 729 bp, Macaca Mulatta
  misc_feature (1)...(729): n = A,T,C or G
tcacattttgganagggcaagttctcactaacagccacctttggacccttcgcctttatggttcccctgccctctcccatctttgattggcttggtgtttggagcttctgttaacattatagagactcctaggatgtgtgttcatggcgttatagcttttgaagaaaggccagtgatccagcaaagggggaaaatatatgcatttcaccccacatgactgtaggaatccacgtcagaatgatacagagttagcaggtttttctaaggaaatgccgttcaaatgcctcctaacttttatagttattttgttttatatttctaaattcttgtatcagatccaaagctctattgtacagcaaattattcttcaaaatgattataaccagttgcaacctgtatttctttttgcagccagcacaatgtgacccaacttaaaatttgggggaaaaagaatgcaggagtgaaataaccaagtcaaaaccatgtactatctccttgggggttagggatgctaagaagagcccacaaatagaggattactcttcccccgaatctctaaactcagaaacaattgccaaaaaatacataactcttccctgtaggaccctttccttattcatttaggtagtgtgaacattaagtataaaataaattatgttcttaatgcctcttaaaccacttacattcagaggggaacagaaatcattctaagcaggaaaatacttccat

SEQ ID NO: 28988 - DNA, 2793 bp, Macaca Mulatta
  misc_feature (1)...(2793): n = A,T,C or G
aaggttttctggaagcaagctaaagaatgaggnnnnnnnnnnnnnnnnnnnnnnnnnnnnnnnnnnnnnnnnnnnnnnnnnnnnnnnnnnnnnnnnnnnnnnnnnnnnnnnnnnnnnnnnnnnnnnnnnnnnnnnnnnnnnnnnnnnnnnnnnnnnnnnnnnnnnnnnnnnnnnnnnnnnnnnnnnnnnnnnnnnnnnnnnnnnnnnnnnnnnnnnnnnnnnnnnnnnnnnnnnnnnnnnnnnnnnnnnnnnnnnnnnnnnnnnnnnnnnnnnnnnnnnnnnnnnnnnnnnnnnnnnnnnnnnnnnnnnnnnnnnnnnnnnnnnnnnnnnnnnnnnnnnnnnnnnnnnnnnnnnnnnnnnnnnnnnnnnnnnnnnnnnnnnnnnnnnnnnnnnnnnnnnnnnnnnnnnnnnnnnnnnnnnnnnnnnnnnnnnnnnnnnnnnnnnnnnnnnnnnnnnnnnnnnnnnnnnnnnnnnnnnnnnnnnnnnnnnnnnnnnnnnnnnnnnnnnnnnnnnnnnnnnnnnnnnnnnnnnnnnnnnnnnnnnnnnnnnnnnnnnnnnnnnnnnnnnnnnnnnnnnnnnnnnnnnnnnnnnnnnnnnnnnnnnnnnnnnnnnnnnnnnnnnnnnnnnnnnnnnnnnnnnnnnnnnnnnnnnnnnnnnnnnnnnnnnnnnnnnnnnnnnnnnnnnnnnnnnnnnnnnnnnnnnnnnnnnnnnnnnnnnnnnnnnnnnnnnnnnnnnnnnnnnnnnnnnnnnnnnnnnnnnnnnnnnnnnnnnnnnnnnnnnnnnnnnnnnnnnnnnnnnnnnnnnnnnnnnnnnnnnnnnnnnnnnnnnnnnnnnnnnnnnnnnnnnnnnnnnnnnnnnnnnnnnnnnnnnnnnnnnnnnnnnnnnnnnnnnnnnnnnnnnnnnnnnnnnnnnnnnnnnnnnnnnnnnnnnnnnnnnnnnnnnnnnnnnnnnnnnnnnnnnnnnnnnnnnnnnnnnnnnnnnnnnnnnnnnnnnnnnnnnnnnnnnnnnnnnnnnnnnnnnnnnnnnnnnnnnnnnnnnnnnnnnnnnnnnnnnnnnnnnnnnnnnnnnnnnnnnnnnnnnnnnnnnnnnnnnnnnnnnnnnnnnnnnnnnnnnnnnnnnnnnnnnnnnnnnnnnnnnnnnnnnnnnnnnnnnnnnnnnnnnnnnnnnnnnnnnnnnnnnnnnnnnnnnnnnnnnnnnnnnnnnnnnnnnnnnnnnnnnnnnnnnnnnnnnnnnnnnnnnnnnnnnnnnnnnnnnnnnnnnnnnnnnnnnnnnnnnnnnnnnnnnnnnnnnnnnnnnnnnnnnnnnnnnnnnnnnnnnnnnnnnnnnnnnnnnnnnnnnnnnnnnnnnnnnnnnnnnnnnnnnnnnnnnnnnnnnnnnnnnnnnnnnnnnnnnnnnnnnnnnnnnnnnnnnnnnnnnnnnnnnnnnnnnnnnnnnnnnnnnnnnnnnnnnnnnnnnnnnnnnnnnnnnnnnnnnnnnnnnnnnnnnnnnnnnnnnnnnnnnnnnnnnnnnnnnnnnnnnnnnnnnnnnnnnnnnnnnnnnnnnnnnnnnnnnnnnnnnnnnnnnnnnnnnnnnnnnnnnnnnnnnnnnnnnnnnnnnnnnnnnnnnnnnnnnnnnnnnnnnnnnnnnnnnnnnnnnnnnnnnnnnnnnnnnnnnnnnnnnnnnnnnnnnnnnnnnnnnnnnnnnnnnnnnnnnnnnnnnnnnnnnnnnnnnnnnnnnnnnnnnnnnnnnnnnnnnnnnnnnnnnnnnnnnnnnnnnnnnnnnnnnnnnnnnnnnnnnnnnnnnnnnnnnnnnnnnnnnnnnnnnnnnnnnnnnnnnnnnnnnnnnnnnnnnnnnnnnnnnnnnnnnnnnnnnnnnnnnnnnnnnnnnnnnnnnnnnnnnnnnnnnnnnnnnnnnnnnnnnnnnnnnnnnnnnnnnnnnnnnnnnnnnnnnnnnnnnnnnnnnnnnnnnnnnnnnnnnnnnnnnnnnnnnnnnnnnnnnnnnnnnnnnnnnnnnnnnnnnnnnnnnnnnnnnnnnnnnnnnnnnnnnnnnnnnnnnnnnnnnnnnnnnnnnnnnnnnnnnnnnnnnnnnnnnnnnnnnnnnnnnnnnnnnnnnnnnnnnnnnnnnnnnnnnnnnnnnnnnnnnnnnnnnnnnnnnnnnnnnnnnnnnnnnnnnnnnnnnnnnnnnnnnnnnnnnnnnnnnnnnnnnnnnnnnnnnnnnnnnnnnnnnnnnnnnnnnnnnnnnnnnnnnnnnnnnnnnnnnnnnnnnnnnnnnnnnnnnnnnnnnnnnnnnnnnnnnnnnnnnnnnnnnnnnnnnnnnnnnnnnnnnnnnnnnnnnnnnnnnnnnnnnnnnnnnnnnnnnnnnnnnnnnnnnnnnnnnnnnnnnnnnnnnnnnnnnnnnnnnnnnnnnnnnnnnnnnnnnnnnnnnnnnnnnnnnnnnnnnnnnnnnnnnnnnnnnnnnnnnnnnnnnnnnnnnnnnnnnnnnnnnnnnnnnnnnnnnnnnnnnnnnnnnnnnnnnnnnnnnnnnnnnnnnnnnnnnnnnnnnnnnnnnnnnnnnnnnnnnnnnnnnnnnnnnnnnnnnnnnnnnnnnnnnnnnnnnnnnnnnnnnnnngtatgttctacctccaatggaaatgtttacaagggtcaagacttaattcaattcagccaataccaaagttgcttgactttcaattcctgtgcattagtgtgatgatttctgtcacctagcagcattccgattctatgtaactgaatggagatgataagtgctttcccctctttatttaaaaaagattaaaaggaataaaagaaataa

SEQ ID NO: 28989 - DNA, 646 bp, Macaca Mulatta
  misc_feature (1)...(646): n = A,T,C or G
cacagatgtggactttgcagccttgaaggcagtggtgaggcttgctgaaccatacctctgtgactctcaagtgagcacttttaccatggagtgcatgaaggagctcctcgatctgaaggaacatcggttgcccctgcaggagctctgggtggtgtttgatgattcgggagtgtttgaccagacagcccttgcaattgagcatgtcagnnnnnnnnnnnnnnnnnnnnnnnnnnnnnnnnnnnnnnnnnnnnnnnnnnnnnnnnnnnnnnnnnnnnnnnnnnnnnnnnnnnnnnnnnnnnngcattatgacattcttgaagaccgagttccatcaggacttgttgttgactaccgcaatctgttgtctcagtgtgaggagagttacaggaagtttttaaatctgagaagcagtttgtcaaattgtaactctgattctgagcaggaaaatatctccatggtggaagggttaaaattgtattcggagatggaacagttgaaacaaaagctgaaactcattgagaatcctttgttgaggtatgtgtnaggtatgtgttcggttatcagaagaattctaatatccaagcaaagggtgttcgtcccagcggtcagaagatcactcacgtggtctcctccaccatggtggctg

SEQ ID NO: 28990 - DNA, 5624 bp, Macaca Mulatta
  misc_feature (1)...(5624): n = A,T,C or G
gatggactccttggagagaaaagctaccgggagcctgtgcnnnnnnnnnnnnnnnnnnnnnnnnnnnnnnnnnnnnnnnnnnnnnnnnnnnnnnnnnnnnnnnnnnnnnnnnnnnnnnnnnnnnnnnnnnnnnnnnnnnnnnnnnnnnnnnnnnnnnnnnnnnnnnnnnnnnnnnnnnnnnnnnnnnnnnnnnnnnnnnnnnnnnnnnnnnnnnnnnnnnnnnnnnnnnnnnnnnnnnnnnnnnnnnnnnnnnnnnnnnnnnnnnnnnnnnnnnnnnnnnnnnnnnnnnnnnnnnnnnnnnnnnnnnnnnnnnnnnnnnnnnnnnnnnnnnnnnnnnnnnnnnnnnnnnnnnnnnnnnnnnnnnnnnnnnnnnnnnnnnnnnnnnnnnnnnnnnnnnnnnnnnnnnnnnnnnnnnnnnnnnnnnnnnnnnnnnnnnnnnnnnnnnnnnagatgatgcaggtgattgaggagtacatagaggactacaaccagatcaacacggccaagctgaagctggtcctcttcatggacgccatgagccacatctgccgcatcagccgcaccctgcgccaggcgctgggcaatgcactcctgctgggtgtgggtggcagtggccgcagctccctcacacggctcgcctcgcacatnnnnnnnnnnnnnnnnnnnnnnnnnnnnnnnnnnnnnnnnnnnnnnnnnnnnnnnnnnnnnnnnnnnnnnnnnnnnnnnnnnnnnnnnnnnnnnnnnnnnnnnnnnnnnnnnnnnnnnnnnnnnnnnnnnnnnnnnnnnnnnnnnnnnnnnnnnnnnnnnnnnnnnnnnnnnnnnnnnnnnnnnnnnnnnnnnnnnnnnnnnnnnnnnnnnnnnnnnnnnnnnnnnnnnnnnnnnnnnnnnnnnnnnnnnnnnnnnnnnnnnnnnnnnnnnnnnnnnnnnnnnnnnnnnnnnnnnnnnnnnnnnnnnnnnnnnnnnnnnnnnnnnnnnnnnnnnnnnnnnnnnnnnnnnnnnnnnnnnnnnnnnnnnnnnnnnnnnnnnnnnnnnnnnnnnnnnnnnnnnnnnnnnnnnnnnnnnnnnnnnnnnnnnnnnnnnnnnnnnnnnnnnnnnnnnnnnnnnnnnnnnnnnnnnnnnnnnnnnnnnnnnnnnnnnnnnnnnnnnnnnnnnnnnnnnnnnnnnnnnnnnnnnnnnnnnnnnnnnnnnnnnnnnnnnnnnnnnnnnnnnnnnnnnnnnnnnnnnnnnnnnnnnnnnnnnnnnnnnnnnnnnnnnnnnnnnnnnnnnnnnnnnnnnnnnnnnnnnnnnnnnnnnnnnnnnnnnnnnnnnnnnnnnnnnnnnnnnnnnnnnnnnnnnnnnnnnnnnnnnnnnnnnnnnnnnnnnnnnnnnnnnnnnnnnnnnnnnnnnnnnnnnnnnnnnnnnnnnnnnnnnnnnnnnnnnnnnnnnnnnnnnnnnnnnnnnnnnnnnnnnnnnnnnnnnnnnnnnnnnnnnnnnnnnnnnnnnnnnnnnnnnnnnnnnnnnnnnnnnnnnnnnnnnnnnnnnnnnnnnnnnnnnnnnnnnnnnnnnnnnnnnnnnnnnnnnnnnnnnnnnnnnnnnnnnnnnnnnnnnnnnnnnnnnnnnnnnnnnnnnnnnnnnnnnnnnnnnnnnnnnnnnnnnnnnnnnnnnnnnnnnnnnnnnnnnnnnnnnnnnnnnnnnnnnnnnnnnnnnnnnnnnnnnnnnnnnnnnnnnnnnnnnnnnnnnnnnnnnnnnnnnnnnnnnnnnnnnnnnnnnnnnnnnnnnnnnnnnnnnnnnnnnnnnnnnnnnnnnnnnnnnnnnnnnnnnnnnnnnnnnnnnnnnnnnnnnnnnnnnnnnnnnnnnnnnnnnnnnnnnnnnnnnnnnnnnnnnnnnnnnnnnnnnnnnnnnnnnnnnnnnnnnnnnnnnnnnnnnnnnnnnnnnnnnnnnnnnnnnnnnnnnnnnnnnnnnnnnnnnnnnnnnnnnnnnnnnnnnnnnnnnnnnnnnnnnnnnnnnnnnnnnnnnnnnnnnnnnnnnnnnnnnnnnnnnnnnnnnnnnnnnnnnnnnnnnnnnnnnnnnnnnnnnnnnnnnnnnnnnnnnnnnnnnnnnnnnnnnnnnnnnnnnnnnnnnnnnnnnnnnnnnnnnnnnnnnnnnnnnnnnnnnnnnnnnnnnnnnnnnnnnnnnnnnnnnnnnnnnnnnnnnnnnnnnnnnnnnnnnnnnnnnnnnnnnnnnnnnnnnnnnnnnnnnnnnnnnnnnnnnnnnnnnnnnnnnnnnnnnnnnnnnnnnnnnnnnnnnnnnnnnnnnnnnnnnnnnnnnnnnnnnnnnnnnnnnnnnnnnnnnnnnnnnnnnnnnnnnnnnnnnnnnnnnnnnnnnnnnnnnnnnnnnnnnnnnnnnnnnnnnnnnnnnnnnnnnnnnnnnnnnnnnnnnnnnnnnnnnnnnnnnnnnnnnnnnnnnnnnnnnnnnnnnnnnnnnnnnnnnnnnnnnnnnnnnnnnnnnnnnnnnnnnnnnnnnnnnnnnnnnnnnnnnnnnnnnnnnnnnnnnnnnnnnnnnnnnnnnnnnnnnnnnnnnnnnnnnnnnnnnnnnnnnnnnnnnnnnnnnnnnnnnnnnnnnnnnnnnnnnnnnnnnnnnnnnnnnnnnnnnnnnnnnnnnnnnnnnnnnnnnnnnnnnnnnnnnnnnnnnnnnnnnnnnnnnnnnnnnnnnnnnnnnnnnnnnnnnnnnnnnnnnnnnnnnnnnnnnnnnnnnnnnnnnnnnnnnnnnnnnnnnnnnnnnnnnnnnnnnnnnnnnnnnnnnnnnnnnnnnnnnnnnnnnnnnnnnnnnnnnnnnnnnnnnnnnnnnnnnnnnnnnnnnnnnnnnnnnnnnnnnnnnnnnnnnnnnnnnnnnnnnnnnnnnnnnnnnnnnnnnnnnnnnnnnnnnnnnnnnnnnnnnnnnnnnnnnnnnnnnnnnnnnnnnnnnnnnnnnnnnnnnnnnnnnnnnnnnnnnnnnnnnnnnnnnnnnnnnnnnnnnnnnnnnnnnnnnnnnnnnnnnnnnnnnnnnnnnnnnnnnnnnnnnnnnnnnnnnnnnnnnnnnnnnnnnnnnnnnnnnnnnnnnnnnnnnnnnnnnnnnnnnnnnnnnnnnnnnnnnnnnnnnnnnnnnnnnnnnnnnnnnnnnnnnnnnnnnnnnnnnnnnnnnnnnnnnnnnnnnnnnnnnnnnnnnnnnnnnnnnnnnnnnnnnnnnnnnnnnnnnnnnnnnnnnnnnnnnnnnnnnnnnnnnnnnnnnnnnnnnnnnnnnnnnnnnnnnnnnnnnnnnnnnnnnnnnnnnnnnnnnnnnnnnnnnnnnnnnnnnnnnnnnnnnnnnnnnnnnnnnnnnnnnnnnnnnnnnnnnnnnnnnnnnnnnnnnnnnnnnnnnnnnnnnnnnnnnnnnnnnnnnnnnnnnnnnnnnnnnnnnnnnnnnnnnnnnnnnnnnnnnnnnnnnnnnnnnnnnnnnnnnnnnnnnnnnnnnnnnnnnnnnnnnnnnnnnnnnnnnnnnnnnnnnnnnnnnnnnnnnnnnnnnnnnnnnnnnnnnnnnnnnnnnnnnnnnnnnnnnnnnnnnnnnnnnnnnnnnnnnnnnnnnnnnnnnnnnnnnnnnnnnnnnnnnnnnnnnnnnnnnnnnnnnnnnnnnnnnnnnnnnnnnnnnnnnnnnnnnnnnnnnnnnnnnnnnnnnnnnnnnnnnnnnnnnnnnnnnnnnnnnnnnnnnnnnnnnnnnnnnnnnnnnnnnnnnnnnnnnnnnnnnnnnnnnnnnnnnnnnnnnnnnnnnnnnnnnnnnnnnnnnnnnnnnnnnnnnnnnnnnnnnnnnnnnnnnnnnnnnnnnnnnnnnnnnnnnnnnnnnnnnnnnnnnnnnnnnnnnnnnnnnnnnnnnnnnnnnnnnnnnnnnnnnnnnnnnnnnnnnnnnnnnnnnnnnnnnnnnnnnnnnnnnnnnnnnnnnnnnnnnnnnnnnnnnnnnnnnnnnnnnnnnnnnnnnnnnnnnnnnnnnnnnnnnnnnnnnnnnnnnnnnnnnnnnnnnnnnnnnnnnnnnnnnnnnnccaacctgtcagtggtgttcaaagactccaactccaccacgcccctcatctttgtgctgtcacccggcacagaccctgctgccgacctctacaagtttgccgaagaaatgaagttctccaaaaagctctctgccatctccctgggccaggggcagnnnnnnnnnnnnnnnnnnnnnnnnnnnnnnnnnnnnnnnnnnnnnnnnnnnnnnnnnnnnnnnnnnnnnnnnnnnnnnnnnnnnnnnnnnnnnnnnnnnnnnnnnnnnnnnnnnnnnnnnnnnnnnnnnnnnnnnnnnnnnnnnnnnnnnnnnnnnnnnnnnnnnnnnnnnnnnnnnnnnnnnnnnnnnnnnnnnnnnnnnnnnnnnnnnnnnnnnnnnnnnnnnnnnnnnnnnnnnnnnnnnnnnnnnnnnnnnnnnnnnnnnnnnnnnnnnnnnnnnnnnnnnnnnnnnnnnnnnnnnnnnnnnnnnnnnnnnnnnnnnnnnnnnnnnnnnnnnnnnnnnnnnnnnnnnnnnnnnnnnnnnnnnnnnnnnnnnnnnnnnnnnnnnnnnnnnnnnnnnnnnnnnnnnnnnnnnnnnnnnnnnnnnnnnnnnnnnnnnnnnnnnnnnnnnnnnnnnnnnnnnnnnnnnnnnnnnnnnnnnnnnnnnnnnnnnnnnnnnnnnnnnnnnnnnnnnnnnnnnnnnnnnnnnnnnnnnnnnnnnnnnnnnnnnnnnnnnnnnnnnnnnnnnnnnnnnnnnnnnnnnnnnnnnnnnnnnnnnnnnnnnnnnnnnnnnnnnnnnnnnnnnnnnnnnnnnnnnnnnnnnnnnnnnnnnnnnnnnnnnnnnnnnnnnnnnnnnnnnnnnnnnnnnnnnnnnnnnnnnnnnnnnnnnnnnnnnnnnnnnnnnnnnnnnnnnnnnnnnnnnnnnnnnnnnnnnnnnnnnnnnnnnnnnnnnnnnnnnnnnnnnnnnnnnnnnnnnnnnnnnnnnnnnnnnnnnnnnnnnnnnnnnnnnnnnnnnnnnnnnnnnnnnnnnnnnnnnnnnnnnnnnnnnnnnnnnnnnnnnnnnnnnnnnnnnnnnnnnnnnnnnnnnnnnnnnnnnnnnnnnnnnnnnnnnnnnnnnnnnnnnnnnnnnnnnnnnnnnnnnnnnnnnnnnnnnnnnnnnnnnnnnnnnnnnnnnnnnnnnnnnnnnnnnnnnnnnnnnnnnnnnnnnnnnnnnnnnnnnnnnnnnnnnnnnnnnnnnnnnnnnnnnnnnnnnnnnnnnnnnnnnnnnnnnnnnnnnnnnnnnnnnnnnnnnnnnnnnnnnnnnnnnnnnnnnnnnnnnnnnnnnnnnnnnnnnnnnnnnnnnnnnnnnnnnnnnnnnnnnnnnnnnnnnnnnnnnnnnnnnnnnnnnnnnnnnnnnnnnnnnnnnnnnnnnnnnnnnnnnnnnnnnnnnnnnnnnnnnnnnnnnnnnnnnnnnnnnnnnnnnnnnnnnnnnnnnnnnnnnnnnnnnnnnnnaaggtgcccgctgggatccagaggccttccagctggccgagtctcagcccaaggagctgtacacagagatggccgttatctggctcttgccaacacccaaccgcatggctcaggaccaggacttttacctgtgccccatctacaagacactga

SEQ ID NO: 28991 - DNA, 465 bp, Macaca Mulatta
gggaggcggccgcgctgagctcactccggcccctgcggaaagaattctgtaccgttcctgttgaacttcctgagggagcagagcagccgcgtcctcccgcaggggcccccgacccccgccaaggccccgggcgcctcggcagccttgccagggaggccgggaggcccgtcgcggggtagccgcggggcgcgcagccagctcttccctccgaccgaggccgcgagcaccgccgccgaggcccctctggtttttttgggggaaggaggcggggcccggggccggcccgctatcgtggaggccgcggcctggaggagggggtcagcggggagaacctgcccggagccgggggccggaggctcaggggctctggcagccccagccgccccagcctcacgctctctgatccaccaaacctcagcaacctggaggagttccctcccgtatgctcggatccccccggccctg

SEQ ID NO: 28992 - DNA, 2012 bp, Macaca Mulatta
  misc_feature (1)...(2012): n = A,T,C or G
atggccaacgtctctaagaaggtgtcgtggtccggccgggaccgggacgacgaggaggcggcgccgctgctgcggaggacggcgcggcccggcggggggacgccgctgctgaacggggctgggcccggggccgcgcgccannnnnnnnnnnnnnnnnnnnnnnnnnnnnnnnnnnnnnnnnnnnnnnnnnnnnnnnnnnnnnnnnnnnnnngatatggatcctccgcatcccttccccaaggagatcccacacaacgagaagctcctgtccctcaagtatgagnagagcttggactatgacaacagtgagaaccaactgttcctggaggaagagcggcggatnnnnnnnnnnnnnnnnnnnnnnnnnnnnnnnnnnnnnnnnnnnnnnnnnnnnnnnnnnnnnnnnnnnnnnnnnnnnnnnnnnnnnnnnnnnnnnnnnnnnnnnnnnnnnnnnnnnnnnnnnnnnnnnnnnnnnnnnnnnnnnnnnnnnnnnnnnnnnnnnnnnnnnnnnnnnnnnnnnnnnnnnnnnnnnnnnnnnnnnnnnnnnnnnnnnnnnnnnnnnnnnnnnnnnnnnnnnnnnnnnnnnnnnnnnnnnnnnnnnnnnnnnnnnnnnnnnnnnnnnnnnnnnnnnnnnnnnnnnnnnnnnnnnnnnnnnnnnnnnnnnnnnnnnnnnnagacgttggtgatcaaagtgtccggtgtgatcctgtcggtggtcgggggcctggccgtgggaaagnnnnnnnnnnnnnnnnnnnnnnnnnnnnnnnnnnnnnnnnnnnnnnnnnnnnnnnnnnnnnnnnnnnnnnnnnnnnnnnnnnnnnnnnnnnnnnnnnnnnnnnnnnnnnnnnnnnnnnnnnnnnnnnnnnnnnnnnnnnnnnnnnnnnnnnnnnnnnnnnnnnnnnnnnnnnnnnnnnnnnnnnnnnnnnnnnnnnnnnnnnnnnnnnnnnnnnnnnnnnnnnnnnnnnnnnnnnnnnnnnnnnnnnnnnnnnnnnnnnnnnnnnnnnnnnnnnnnnnnnnnnnnnnnnnnnnnnnnnnnnnnnnnnnnnnnnnnnnnnnnnnnnnnnnnnnnnnnnnnnnnnnnnnnnnnnnnnnnnnnnnnnnnnnnnnnnnnnnnnnnnnnnnnnnnnnnnnnnnnnnnnnnnnnnnnnnnnnnnnnnnnnnnnnnnnnnnnnnnnnnnnnnnnnnnnnnnnnnnnnnnnnnnnnnnnnnnnnnnnnnnnnnnnnnnnnnnnnnnnnnnnnnnnnnnnnnnnnnnnnnnnnnnnnnnnnnnnnnnnnnnnnnnnnnnnnnnnnnnnnnnnnnnnnnnnnnnnnnnnnnnnnnnnnnnnnnnnnnnnnnnnnnnnnnnnnnnnnnnnnnnnnnnnnnnnnnnnnnnnnnnnnnnnnnnnnnnnnnnnnnnnnnnnnnnnnnnnnnnnnnnnnnnnnnnnnnnnnnnnnnnnnnnnnnnnnnnnnnnnnnnnnnnnnnnnnnnnnnnnnnnnnnnnnnnnnnnnnnnnnnnnnnnnnnnnnnnnnnnnnnnnnnnnnnnnnnnnnnnnnnnnnnnnnnnnnnnnnnnnnnnnnnnnnnnnnnnnnnnnnnnnnnnnnnnnnnnnnnnnnnnnnnnnnnnnnnnnnnnnnnnnnnnnnnnnnnnnnnnnnnnnnnnnnnnnnnnnnnnnnnnnnnnnnnnnnnnnnnnnnnnnnnnnnnnnnnnnnnnnnnnnnnnnnnnnnnnnnnnnnnnnnnnnnnnnnnnnnnnnnnnnnnnnnnnnnnnnnnnnnnnnnnnnnnnnnnnnnnnnnnnnnnnnnnnnnnnnnnnnnnnnnnnnnnnnnnnnnnnnnnnnnnnnnnnnnnnnnnnnnnnnnnnnnnnnnnnnnnnnnnnnnnnnnnnnnnnnnnnnnnagggaggtgatgagcacgccagtgacctgcctgaggcggcgtgagaaggtcggcatcattgtggacgtgctgagcgacacggcgtccaatcacaatggcttccccgtggtggagcatgccgatgacacccag

SEQ ID NO: 28993 - DNA, 505 bp, Macaca Mulatta
catgaaagcattctttccatttgcaaggaacagagtcctttaatttggggctcatacataactataccataatcacagcaagcgaagttgggaagagggcccggatgaaatgtgtttgtggtgcctgctggccagtctctggcttcccttcctgtgaaggccttgccagtccagtggccccggcctgaactgtggcactgagctgctgcacggtcagctgccgaccagcccagcgctcagatgtcttgggccgatctctcggccgtcactggtggtgggaaagggcgggtccactgctctggggcggtgtggggttgcccggcaggctgtgataggagaggaggtggaatggtttgcctgagccttgtgcatgtgggaagaggcaagatcttgggcattgcactacagagctggatcaggtgttcggcagcttaagacattaggcagttggtgcaggggcccgaggggccgggtgtctgggagaggggtgaggcttggggcctga

SEQ ID NO: 28994 - DNA, 4616 bp, Macaca Mulatta
  misc_feature (1)...(4616): n = A,T,C or G
caaagtggtcaagttggataaacttccagttcatgtctacgaagttgatgaggaggtcgacaaagatgagnnnnnnnnnnnnnnnnnnnnnnnnnnnnnnnnnnnnnnnnnnnnnnnnnnnnnnnnnnnnnnnnnnnnnnnnnnnnnnnnnnnnnnnnnnnnnnnnnnnnnnnnnnnnnnnnnnnnnnnnnnnnnnnnnnnnnnnnnnnnnnnnnnnnnnnnnnnnnnnnnnnnnnnnnnnnnnnnnnnnnnnnnnnnnnnnnnnnnnnnnnnnnnnnnnnnnnnnnnnnnnnnnnnnnnnnnnnnnnnnnnnnnnnnnnnnnnnnnnnnnnnnnnnnnnnnnnnnnnnnnnnnnnnnnnnnnnnnnnnnnnnnnnnnnnnnnnnnnnnnnnnnnnnnnnnnnnnnnnnnnnnnnnnnnnnnnnnnnnnnnnnnnnnnnnnnnnnnnnnnnnnnnnnnnnnnnnnnnnnnnnnnnnnnnnnnnnnnnnnnnnnnnnnnnnnnnnnnnnnnnnnnnnnnnnnnnnnnnnnnnnnnnnnnnnnnnnnnnnnnnnnnnnnnnnnnnnnnnnnnnnnnnnnnnnnnnnnnnnnnnnnnnnnnnnnnnnnnnnnnnnnnnnnnnnnnnnnnnnnnnnnnnnnnnnnnnnnnnnnnnnnnnnnnnnnnnnnnnnnnnnnnnnnnnnnnnnnnnnnnnnnnnnnnnnnnnnnnnnnnnnnnnnnnnnnnnnnnnnnnnnnnnnnnnnnnnnnnnnnnnnnnnnnnnnnnnnnnnnnnnnnnnnnnnnnnnnnnnnnnnnnnnnnnnnnnnnnnnnnnnnnnnnnnnnnnnnnnnnnnnnnnnnnnnnnnnnnnnnnnnnnnnnnnnnnnnnnnnnnnnnnnnnnnnnnnnnnnnnnnnnnnnnnnnnnnnnnnnnnnnnnnnnnnnnnnnnnnnnnnnnnnnnnnnnnnnnnnnnnnnnnnnnnnnnnagggaatattntcagtcacttgtcctcatccagatatatttcttgtggccagaattgaaaaagtccttcaggggagcatcacacattgcgctgagccatatatgaaaagttcagactcttctaaggnnnnaaggtggctcagaaggtgctgaagaatgccannnnnnnnnnnnnnnnnnnnnnnnnnnnnnnnnnnnnnnnnnnnnnnnnnnnnnnnnnnnnnnnnnnnnnnnnnnnnnnnnnnnnnnnnnnnnnnnnnnnnnnnnnnnnnnnnnnnnnnnnnnnnnnnnnnnnnnnnnnnnnnnnnnnnnnnnnnnnnnnnnnnnnnnnnnnnnnnnnnnnnnnnnnnnnnnnnnnnnnnnnnnnnnnnnnnnnnnnnnnnnnnnnnnnnnnnnnnnnnnnnnnnnnnnnnnnnnnnnnnnnnnnnnnnnnnnnnnnnnnnnnnnnnnnnnnnnnnnnnnnnnnnnnnnnnnnnnnnnnnnnnnnnnnnnnnnnnnnnnnnnnnnnnnnnnnnnnnnnnnnnnnnnnnnnnnnnnnnnnnnnnnnnnnnnnnnnnnnnnnnnnnnnnnnnnnnnnnnnnnnnnnnnnnnnnnnnnnnnnnnnnnnnnnnnnnnnnnnnnnnnnnnnnnnnnnnnnnnnnnnnnnnnnnnnnnnnnnnnnnnnnnnnnnnnnnnnnnnnnnnnnnnnnnnnnnnnnnnnnnnnnnnnnnnnnnnnnnnnnnnnnnnnnnnnnnnnnnnnnnnnnnnnnnnnnnnnnnnnnnnnnnnnnnnnnnnnnnnnnnnnnnnnnnnnnnnnnnnnnnnnnnnnnnnnnnnnnnnnnnnnnnnnnnnnnnnnnnnnnnnnnnnnnnnnnnnnnnnnnnnnnnnnnnnnnnnnnnnnnnnnnnnnnagttggctactcctggcttcccctcctgaaagacggaagggtggtgacgagcgagcagcacgtcccggtctcggcgaaccttccttcaggctaccttggctaccaggagcttggaatgggcagnnnnnnnnnnnnnnnnnnnnnnnnnnnnnnnnnnnnnnnnnnnnnnnnnnnnnnnnnnnnnnnnnnnnnnnnnnnnnnnnnnnnnnnnnnnnnnnnnnnnnnnnnnnnnnnnnnnnnnnnnnnnnnnnnnnnnnnnnnnnnnnnnnnnnnnnnnnnnnnnnnnnnnnnnnnnnnnnnnnnnnnnnnnnnnnnnnnnnnnnnnnnnnnnnnnnnnnnnnnnnnnnnnnnnnnnnnnnnnnnnnnnnnnnnnnnnnnnnnnnnnnnnnnnnnnnnnnnnnnnnnnnnnnnnnnnnnnnnnnnnnnnnnnnnnnnnnnnnnnnnnnnnnnnnnnnnnnnnnnnnnnnnnnnnnnnnnnnnnnnnnnnnnnnnnnnnnnnnnnnnnnnnnnnnnnnnnnnnnnnnnnnnnnnnnnnnnnnnnnnnnnnnnnnnnnnnnnnnnnnnnnnnnnnnnnnnnnnnnnnnnnnnnnnnnnnnnnnnnnnnnnnnnnnnnnnnnnnnnnnnnnnnnnnnnnnnnnnnnnnnnnnnnnnnnnnnnnnnnnnnnnnnnnnnnnnnnnnnnnnnnnnnnnnnnnnnnnnnnnnnnnnnnnnnnnnnnnnnnnnnnnnnnnnnnnnnnnnnnnnnnnnnnnnnnnnnnnnnnnnnnnnnnnnnnnnnnnnnnnnnnnnnnnnnnnnnnnnnnnnnnnnnnnnnnnnnnnnnnnnnnnnnngagatgtttcaccttcatggacaggggctttgtcttcaagcagatcaacaactacattagctgctttgctcctggagacccaaagnagaccctgtttgaatacaagtttgaatttctccgtgtagtgtgcaaccatgaacattatattccattgaacttaccaatgccgtttggaanaggcaggattcanagataccaagnnnnnnnnnnnnnnnnnnnnnnnnnnnnnnnnnnnnnnnnnnnnnnnnnnnnnnnnnnnnnnnnnnnnnnnnnnnnnnnnnnnnnnnnnnnnnnnnnnnnnnnnnnnnnnnnnnnnnnnnnnnnnnnnnnnnnnnnnnnnnnnnnnnnnnnnnnnnnnnnnnnnnnnnnnnnnnnnnnnnnnnnnnnnnnnnnnnnnnnnnnnnnnnnnnnnnnnnnnnnnnnnnnnnnnnnnnnnnnnnnnnnnnnnnnnnnnnnnnnnnnnnnnnnnnnnnnnnnnnnnnnnnnnnnnnnnnnnnnnnnnnnnnnnnnnnnnnnnnnnnnnnnnnnnnnnnnnnnnnnnnnnnnnnnnnnnnnnnnnnnnnnnnnnnnnnnnnnnnnnnnnnnnnnnnnnnnnnnnnnnnnnnnnnnnnnnnnnnnnnnnnnnnnnnnnnnnnnnnnnnnnnnnnnnnnnnnnnnnnnnnnnnnnnnnnnnnnnnnnnnnnnnnnnnnnnnnnnnnnnnnnnnnnnnnnnnnnnnnnnnnnnnnnnnnnnnnnnnnnnnnnnnnnnnnnnnnnnnnnnnnnnnnnnnnnnnnnnnnnnnnnnnnnnnnnnnnnnnnnnnnnnnnnnnnnnnnnnnnnnnnnnnnnnnnnnnnnnnnnnnnnnnnnnnnnnnnnnnnnnnnnnnnnnnnnnnnnnnnnnnnnnnnnnnnnnnnnnnnnnnnnnnnnnnnnnnnnnnnnnnnnnnnnnnnnnnnnnnnnnnnnnnnnnnnnnnnnnnnnnnnnnnnnnnnnnagaacaggaatgatgcatgccagattgcagcagctgggcagcctggataactctctcacttttaaccacagnnnnnnnnnnnnnnnnnnnnnnnnnnnnnnnnnnnnnnnnnnnnnnnnnnnnnnnnnnnnnnnnnnnnnnnnnnnnnnnnnnnnnnnnnnnnnnnnnnnnnnnnnnnnnnnnnnnnnnnnnnnnnnnnnnnnnnnnnnnnnnnnnnnnnnnnnnnnnnnnnnnnnnnnnnnnnnnnnnnnnnnnnnnnnnnnnnnnnnnnnnnnnnnnnnnnnnnnnnnnnnnnnnnnnnnnnnnnnnnnnnnnnnnnnnnnnnnnnnnnnnnnnnnnnnnnnnnnnnnnnnnnnnnnnnnnnnnnnnnnnnnnnnnnnnnnnnnnnnnnnnnnnnnnnnnnnnnnnnnnnnnnnnnnnnnnnnnnnnnnnnnnnnnnnnnnnnnnnnnnnnnnnnnnnnnnnnnnnnnnnnnnnnnnnnnnnnnnnnnnnnnnnnnnnnnnnnnnnnnnnnnnnnnnnnnnnnnnnnnnnnnnnnnnnnnnnnnnnnnnnnnnnnnnnnnnnnnnnnnnnnnnnnnnnnnnnnnnnnnnnnnnnnnnnnnnnnnnnnnnnnnnnnnnnnnnnnnnnnnnnnnnnnnnnnnnnnnnnnnnnnnnnnnnnnnnnnnnnnnnnnnnnnnnnnnnnnnnnnnnnnnnnnnnnnnnnnnnnnnnnnnnnnnnnnnnnnnnnnnnnnnnnnnnnnnnnnnnnnnnnnnnnnnnnnnnnnnnnnnnnnnnnnnnnnnnnnnnnnnnnnnnnnnnnnnnnnnnnnnnnnnnnnnnnnnnnnnnnnnnnnnnggcagcaatgtgctatgtccatgtaacagccctggtggcagaatatctcacccggaaagngaagcagtccagtgggagccgccccttctcccccacagccatagcgcctgcctgaggaggagccggggagg

SEQ ID NO: 28995 - DNA, 576 bp, Macaca Mulatta
cttactattctttgtgggcatggttcatgctgggcctcggtcttttgagtggggtctatttagccagtcccctgttggtgatcacatcactaacttccggcattttcctatcaccgtcggtgcctcggtgaacatcttgtgaaagtgcttgtgcctttgttccggcatcagtgcagagcagggtccaaggagtgtgacagctgggctgaggggctggcatgtttcacattctgatagatagagccaagttgctcctatcaggttttcaagctgcccatttcccaccgtggagacagcaacagaggagacagcaacagaggagacatccccagctcctctggctttgcctgttcaaagctaccctgtgaggcctgaagacagctgccatgaaggcagctcatgtccaccaaacactgactgtgggccgcacgctgtgccaagggcttgacgtttcctctttacagatgaggaaacgggcagagaggcagctgattgtccagtcccctgcatggaggctgctcggctgggctcaagcctggcggtgttttcacagagcatgttgtgctgaatggctct

SEQ ID NO: 28996 - DNA, 121 bp, Macaca Mulatta
  misc_feature (1)...(121): n = A,T,C or G
naggtgaggaactccagaaggaactgccctctgcgcggatccgctgtcccaaaggctccaaggcctatggctcccactgctatgccttgtttttgtcaccaaaatcctggatggatgcaga

SEQ ID NO: 28997 - DNA, 1258 bp, Macaca Mulatta
ggggaggattccggacaacgcctggttcctctcgggtccttccggcgtcgccggagtgaattgatccgggagttgaagagggctgcaaaggtgggaagtgaagtcagtgcctcagttgctgctttctcctctaaatcttggtctcttgtttggaagtgactaacaacgttttggcgtgagaaaatgcctcagttgctgatcagtgtgttttgtgtccaattcttttatcaccaaaaaagagaagaaatattgcagtgaatgaagattcctctgcattttagcactgctttttcaactgtagttggcttttgaatgaggatgacaatggaagagatgaagaatgaagctgagaccacatccatggtttctatgcccctctatgcagtcatgtatcctgtgtttaatgagctagaacgagtaaatctgtctgcagcccagacactgagagccgctttcattaaggctgaaaaggaaaatccaggtctcacacaagacatcattatgaaaattttagagaaaaaaagtgtagaagttaacttcacggaatcccttcttcgtatggcagctgatgatgtagaagagtatatgattgagcgaccagagccagaattccaagacctaaacgaaaaggcacgagcacttaaacaaattctcagtaagatcccagatgagatcaatgacagagtgaggtttctgcagacaatcaaggatatagctagtgcaataaaagaacttcttgatacagtgaataacgtcttcaagaaatatcaataccagaaccgcaaggggcacttgaaacaccaaaagaaaagaatttgtaaagtactcaaaaaagtttcagtgataactctgaaaaacgtattttaaagatgggcaaggccaataaatgtgttcattaaatgccaaaccgactaattcatccaaacaaacttaaatacttcagaaccctcaaaaactgtggcccttgaaaggttggtaaattgttaaaaagaaggtaccttctccaagtggcaagtaattgaaactggccctttttatctgggaaaaatttttaaaaggtttggagctgggtttaaaaatttatcaagtccccctcccctggaaagggggatcttcaaattcccccgggaaagtttggtaaaagaggggaattataattggccacttcttttaaaaacacccaaatatttttttgtgggaaaaaaggggagagcctttaataaacccaataaatacccccccccaccccgggaaaaaa

SEQ ID NO: 28998 - DNA, 648 bp, Macaca Mulatta
cagctgtgggtccagctgtggccagaccagctcctgtgcccctgtctactgcagaaggacctgctaccaccccacatgtgtctgcctgcctggttgcctaaaccagagctatggatccagctgctgccagccctgctgccgcccagcctgctgtgagaccacctgctgcaggaccacttgcttccagcccacctgtgtgaccaactgctgccagccttcttgctgctgatcaagacccaagagaaccaccgtcctcacacaagaactttctgctcgactgacttatcttttgggggactaatttactttgctgctgacagccaccatgctctcacccaaatttttatgaattctctgcgtgtatgagtcttgggaatctgtttcacggatggcaaaatacttcatcctgattctccttttccttccaccttgtggatcatgtgccaacttcgtgtgttctcaatttggagtcattgtcccagcttgacttgatattcaagtgcttccttctctgcttctaagcaatttaggtttctgcaattgatcaataatctttgcaatcgtatttttgttttcaaatatcctccttacgtttcttgtacctttctttcttgtgttcatgataactttgggttatgtccctggtag

SEQ ID NO: 28999 - DNA, 213 bp, Macaca Mulatta
gaacacagacttaaattttctcctatgttaattggcttgtattacagttgaatctatgatatttgtgcatgttgtctttatgacttcataagttaccaatttctaaagggtttcaattttgggggttattggtggtttaaaaaattgcccgattatatcttatctcattcccaaaccatgtccttagccacctttattttcctttgatttggt

SEQ ID NO: 29000 - DNA, 541 bp, Macaca Mulatta
taagatttcaaaacagtgggtcccaaagcctaaccactttaagagtttatggagggtacttggcattacagacgattcatacacttccagtgctgccttctttacactgccagttttgacaaaacaggtttgtttgttttttattttacaacaacttatgcctaattctgcaggattgcaagtaactttttaatgcattgtgattacttattggtaataatagggctgatggcagtttactagatcactggttataatttgggacaaaaactgctacatcgactttcatctcgcccagagttctcaaggctggtatgatcagtggatcaggaatgctgaattcctgcccattgcctctcttggtgaatgtggaaatggccaccttggttttcccatatcaggaagggctttgggatggcacctatattggctaacaattgaggatgcgaacattccattcattagtgtgctcgagctgttagtttttagactatagatcaaaatgtgaaacattttatgttcaatccatatttgtcttgca

SEQ ID NO: 29001 - DNA, 341 bp, Macaca Mulatta
atataaaaataggcacagcctttagtatctgctcgcatcctactttacatcagtttggacgtaacaaagttattataaatttaattactattgaaagacctttcatgaaatataagtctccagagcacacaagagtatttcttctgaaaaaaaagttacaattatgttttatactagatggaagacatgcaacagttgcttaaacttccagagaatttgtagagaaacccaacaaatatcataactgtggaataacatttgttcaaaaacgatagcttagaaaacatcagagttcatactaaaagatattttgcaaatacagtaaatgggaaacataagca

SEQ ID NO: 29002 - DNA, 556 bp, Macaca Mulatta
ccaccagccatgcagcagcagcagcgcatgcagcagcatctgcccctccagggtcagctccatgggccagatggcggctcagatgggacagcttggccagatggggcagccggggctgggggcagacagcacccccaacatccagcaagccctgcagcagcggattctgcagcaacagcagatgaagcagcagattgggtccccaggccagccaaaccccatgagcccccagcaacacatgctctcaggacagccacaggcctcgcatctccctggccagcagatcgccacatcccttagtaaccaggtgcggtctccagcccctgtccagtctccacggacccagtcccagcctccacattccagcccatcaccacggatacagccccagccttcgccacaccacgtctcaccccagactggttccccccaccccggacttgcagtcaccatggccagctccatagatcagggacacttggggaaccccgaacagagtgcaatgatcacccagctgaacacccccagcaaggagcgcgctgtccagcgaactgtc

SEQ ID NO: 29003 - DNA, 1118 bp, Macaca Mulatta
  misc_feature (1)...(1118): n = A,T,C or G
gggagctgcctaaagccctggacaggcacacagggggaggtctgtaggccacagcagctgcagtgctgaaaggtagcaacacccagacctccaggagagaccaggcccaggatgcctcgcctgttcttgtttcatctgctaggagtctgtttactactgaaccaattttccagagcagtcgcggccaaatggatggacgacgttattaaagcatgcggccgcgaattagttcgcgcccagattgccatttgcggcaagagcaccttgggcaaaaggtctctgaaccaggaagatgctcctctgaaacctagaccagcggcagaaattgtgccatccctcatcaaccaagatacagaaaccataaatatgatgtcagaatttgttgctaatttgccacaggagctgaagttaaccctgtctgagaggcagccagcattatcagagctacaacaacatgtacctgtattaaaagattccaatcttagctttgaagaatttaagaaaattattcgcaagagacaaagtgaagccacagacagcagtccttcagaattaaaatccttaggcttggatactcattctcgaagaaagagacaactctacatgacattgtctaataaatgttgccatattggttgtaccaaaaaatctcttgctaaattttgctgagatgaagctaattgtgcacatctcatctaatattcacacatagtcttgatgacattttcactgatgcttctgtcaggtcccaccaattcttagaatataagaaacttttgttgatgtttagacttttgtatttgatgtgtaagaaaatgttcttgtattattgtagtttctataaatgacactttttatgctgaaaaccctttttgtctttttgttaacattatgattatgttgtgttattctttttcatgctgtttacttaaaatttcaataaaaccctctacccactttaaaaactaaaaaaatatcacctcatcctttcggtttttctaaaatcacataaataataaatttnaacatgttgggccggccttcgggccctccaaaaaagcttttccaaaaaccatttctttttgggccccgcggggcccccttttaggtaatgtgaa

SEQ ID NO: 29004 - DNA, 788 bp, Macaca Mulatta
  misc_feature (1)...(788): n = A,T,C or G
ggggaacgcggctgcaggggcgggtcttcagtttgcacagctagaggccgcgcagtagcaaaggatgagcggaaccttggaaaaggtgctgtgcctgaggaacaataccatttttaagcaagccttttctctcttaaggtttagaacttcaagagagaagcccatctattctgtaggtggaattctactaagtgccagtcggccctacaagacaaagcccacccatggcattggaaaatacaagcacttaattaaagcagaagagcccaagaagaagaagggaaaagtggaagtgagagtcattaatttggggacagattatgaatatggggttttaaacattcatctgactgcatatgacatgaccctggcagagagttatgcccagtatgttcacaacctctgcaactctctctccattaaagtcgaggaaagttatgcgatgccaaccaaaaccatggaagtgttacatttgcaggaccaagggagcaaaatgttactggactcagtgcttaccacccatgagcgagtggttcagatcagcggtttgagtgctacgtttgcagaaattttcttggaaataatccaaagcagtcttccntgaaggagtcagactgtcagtgaaagagcacactgaaagagatttcaagggacgattcanagctcgaccagaactgggaagaactgttggccaaagttgaactagctactgtagaactctttcatgccccgcaatggtcatattgaagtgccaaaggaaaaagaagcttacctggggtagtcaggaa

SEQ ID NO: 29005 - DNA, 1840 bp, Macaca Mulatta
  misc_feature (1)...(1840): n = A,T,C or G
gagaaaccttacaagtataatgagtatggcaaagcctttagtgaacattcaaacctaactacccatcaggtcatccatactggcgaaaaaccttacaagtgtaatgagtgtggcaaggtcttcactcagaattcacaccttgcaagacatcggagagttcatactggagataaaccttacaagtgtagtgaatgtggcagagcctttagtcaaacatcaaagcttgcaaggcatcagagagttcatactggagagaaaccatatgagtgtaatcagtgtgggaaagcctttagtgtccgttcaagcctaactacccatcaggcaatccatagtggaaaaaaaccttacaaatgcaatgagtgtgggaaggtcttnnnnnnnnnnnnnnnnnnnnnnnnnnnnnnnnnnnnnnnnnnnnnnnnnaaaccttacaaatgcaatgagtgtgggaaggtcttcactcagaattcgcaccttgcaagacatcgaggaattcatactggagataaaccttacaagtgtagtgagtgtggcaaagcctttagtgaacattcaaacctaactacccatcaggtcatccatactggcgaaaaaccttacaagtgtaatgannnnnnnnnnnnnnnnnnnnnnnnnnnnacctttcagggcatcagcgaattccatactggagagaaaccttacaagtataatgagtatggcaaagcctttagtgaacattcaaacctaactacccatcaggtcatccatactggcgaaaaaccttacaagtgtaatgagtgtggcaaggtcttcactcagaattcacaccttgcaagacatcggagagttcatactggagataaaccttacaagtgtagtgaatgtggcagagcctttagtcaaacatcaaagcttgcaaggcatcagagagttcatactggagagaaaccatatgagtgtaatcagtgtgggaaagcctttagtgtccgttcaagcctaactacccatcaggcaatccatagtggaaaaaaaccttacaaatgcaatgagtgtgggaaggtcttcactcagaattcgcaccttgcaagacatcgaggaattcatactggagataaaccttacaagtgtagtgagtgtggcaaagcctttagtcaaacttcaaaacttgaaaggcatcagagagttcataccggagagaaaccatatgagtgtgggaaaccctttagtatctgttcaagcctaactacccatcagacaatccatactggtggaaaaccttacaaatataacgtgtggaaagttctaaagtcagagttcaaaccttgcaagtcatcacaggattcatagtggggagaaaccttacaaatgnnnnnnnnnnnnnnnnnnnnnnnnnnnnnnnnnntacctttcagggcatcagcgaattccatactggagagaaaccttacaagtataatgagtatggcaaagcctttagtgaacattcaaacctaactacccatcaggtcatccatactggcgaaaaaccttacaagtgtaatgagtgtggcaaggtcttcactcagaattcacaccttgcaagacatcggagagttcatactggagataaaccttacaagtgtagtgaatgtggcagagcctttagtcaaacatcaaagcttgcaaggcatcagagagttcatactggagagaaaccatatgagtgtaatcagtgtgggaaagcctttagtgtccgttcaagcctaactacccatcaggcaatccatagtggaaaaaaaccttacaaatgcaatgagtgtgggaaggtcttcactcagaattcgcaccttgcaagacatcgaggaattcatactggaga

SEQ ID NO: 29006 - DNA, 730 bp, Macaca Mulatta
tgggagcactggacatctcagggccaggtgcgcattaggctctttggccaaaggtgccagaagtgctcctggtccctatatgagatgcctgagttctcctcggatagcaccatgaggattctgagcaacctggtgcagcatatactgaagaaatactatggaaatggcacgaggaagtctccagaaatgccagtaatcctggaagtggccctggaaggatcccatgacacagccaattgtgaggcatgcactctgggcatctgtggacagggcttaaaaagctacatgacaaagccatccaaatccccactctcccacctaaagactgggaattcctcacctggaattggtgctgcatacatcccaaaccaaggcaagaaccagtcagctgagacaaaagaggctaaggggagagggtatgagaaattagggcccagtcgagacccagatccattgaacatctgtgtctttgttttgctgcttgtatttattatagtcaaatgctttacatcagaatgatgaaaataggcttgccaccttctcttgttttaattccatggtaatcaatgaactggctgccattttaatataactgagaattcgctttgagaccaagcagcatcaagtttgtagaataaaccctggtttcctagttatcctctgaaaacagtgtaaaacatgaccaaacacataataaatttagtaataaatattgtcgaattgctgaaaa

SEQ ID NO: 29007 - DNA, 679 bp, Macaca Mulatta
  misc_feature (1)...(679): n = A,T,C or G
gggggggaagggtcagatcaccgtccagtcctccctccccctcctccttcacccccaagtctctcccacaactgccctccccaacctctagctgatcatggcatcagaggcagagaaaacattcaatcggtttgctgcctttggagaatcatcaagcagtggcactgaaatgaacaacaagaacttctccaagctatgcaaagactgtggcatcatggatggcaagacggtcacctccacagatgtggacatcgtgttcagcaaagtcaaggccaagaacgcccgaaccatcacgtttcaacagttcaaagaggcagtgaaggaactgggccagaagcgcttcaaagggaagagtccagatgaagtcctggagagcatttatggactcatggagggcaaggacccagccaccactggcgcaactaaagcaacaacagtgggtgcagtggaccgtttgacagacaccagcaagtacaccggcacccacaaggagcgctttgatgagagtggcaagggcaagggcattgccggacgggaagtgatgaatgacaacacaggctatgtgagtggttacaanggtgctggcaccctatgatagaagaccaagtaaggaggagcttcatcttagctcactagcccccctgaccctgcatgttacaccaggaacttggaaatataa

SEQ ID NO: 29008 - DNA, 842 bp, Macaca Mulatta
gggcaattttggtctgcgccacataaccattctgaagcttttaggcgttggagaggaagttgggggagtgttagaactgttcccaattaatgggagctccgttgttgagcgagaagatgtaccagcccatttggtgaaagacattcgtaactattttcaagtgagcccggagtacttctccatgcttctagttggaaaagacggaaatgtcaaatcctggtatccttccccaatgtggtccatggtgattgtgtacgatttaattgattcgatgcaacttcggagacaggaaatggcaattcagcagtcactggggatgcgctgcccagaagatgagtatgcaggctacggttaccatagttaccaccaaggataccaggatggttaccaggatgactaccgtcatcatgagagttatcaccatggataccccttactgaactgaaatatgtaacccttagactcagccagtttcctctgcagctgctaaaaaccacttgtggcccagctcccttttcttccttgttgcctactaagttccctgcccttttttcttttcagtgtttttcttaagattaaatttaaatcgccatacctttccccctagttttaacgccatcgtattcgtcattttcctccatatcccgctcgtttgttacgttttattaaccgttatctaactttgttttagggcccacccttgacccctattgatactcttttcaaaaacaactttttttgtgcgccccccgggccccaattgtaggataaggtcaacattgagctcaccgacttttttccccatggagaaatatcggcgtacaataatctacaacacccgg

SEQ ID NO: 29009 - DNA, 874 bp, Macaca Mulatta
ggggtttctgagcagggcttcctttttgtccgacatcttagcaagcctgcggtgtctgctgctgctccccgagcttcgcaatgccgcccaaggacgacaagaagaagaaggacgccggaaagtcggccaagaaagacaaagacccagtgaacaaatctgggggcaaggccaaaaagaagaagtggtccaaaggcaaagttcgggacaagctcaataacttagtcttgtttgacaaagctacctacgacaaactctgtaaggaagttcccaactataaacttataaccccagctgtagtctctgagagactgaagattcgaggctccctggccagggcagcccttcaggagctccttagtaaaggacttatcaaactggtttcaaagcacagagctcaagtaatttacaccagaaataccaagggcggagatgctccagctgctggtgaagatgcatgaataggtccaaccaattgtacatttggaaaaataaaactttattaaagcccccccgcggaccctgggacacaccaaattcctgtcggccgccctcggccctccaaaaaacctttctagaacctttcgtttgggcgcgcgggccccagtaaggggaagtgtaccctgggcccctagcctggtttttctaaggagaaccctcgcgtcattgacctacctggtcctgacattcccccccctatagagacccccccccgcggggcaacccgaagcccttctcgaacaccatttcccaaccgccacctcttgcgggcacctttcttggggctctttctcgcccgtggcacttgcgcgtcgttgcgcccccgctttatctccttttttcgtgtccctgcaccgtatgcctgccgtcgatattt

SEQ ID NO: 29010 - DNA, 139 bp, Macaca Mulatta
catttttattctgtagaatgcattgagcttttttctatttctaaatgtttcaatattctatttgagttttaagactaaattgtgtccattttatagctggaaattttttcacctattttgtttaaattacctatagctg

SEQ ID NO: 29011 - DNA, 404 bp, Macaca Mulatta
gactgcggccaactcctggggcccagcctggggcgagagaggccacttccgcatcgtgcgcggcgtcaatgagtgcgacatcgagagcttcgtgctgggcgtctggggccgagtgggcatggaggacatgggtcatcactgaggttgtgggcaccacgcggggtctggcctgggatccaggctgagggccggcggaagaggcccctatggggcggtgaccccagcctcccccaacagagccggggcgcaggccggcgccagggcgctaatcccggcgcgggttccgctgacgcagcgccccgcctgggagccgcgggcaggccaggctggcggagaaaccagacctcccagtggggacagggaagggcctggcctgggaagagcacagccgcagatcccaggcc

SEQ ID NO: 29012 - DNA, 204 bp, Macaca Mulatta
tttaaagttaaacagtatattaagattactttcaccattcttcactcgagattaaaacattttttgaaaagcagtagagtctgcttaaaatacaagttaattattcttgactataaccttgtaaaagtaaatctaatgtataaatttttgaaaaattttgcaccacaggtcatagcatctatctcctttgccttaatttactga

SEQ ID NO: 29013 - DNA, 95 bp, Macaca Mulatta
aaacagcatcaagtgtgcggagacaggcagctgaaagccggcagcacaaactgcccatcagagaagtgcacagcctgggccagatactcccacag

SEQ ID NO: 29014 - DNA, 156 bp, Macaca Mulatta
ccaggtgaaacctatcatggagcagaactgggatgagctggccagcagtcctcatgacatggactgtgaccctgaggcacgaattccctgtgcgctgtatgttgttgtctctgtcctgctggagctggctgaggggactacctccgtctcttccta

SEQ ID NO: 29015 - DNA, 214 bp, Macaca Mulatta
aggcctacattaaggaaaacacgagtctccgcggctccccccgcccagtggggtcagcaggcatagctggtagcctgatctgtcctgagggtggaaggtcaggcagtccaggtctgtctgggagcactttgcgcacctcagtctggggcggcgacgtgtaatcgcccgggagagcccagcgcaggctccgagcagacaataaagaagtgaaatg

SEQ ID NO: 29016 - DNA, 145 bp, Macaca Mulatta
aatcatttttgctttaccttttttctctcaggaaaggggaagtgtccacttatacgtaggaaagataatttagaaatatattaatcatatacaaaggaaaattcaaaacaagagtagttcatgaccagcctggagtagaaggcag

SEQ ID NO: 29017 - DNA, 98 bp, Macaca Mulatta
gattcgaatgcaggctcaaggaagcttgttccaagggagcatgattggaagctttatcgatatataccaacaagaaggcaccaggggtctgtggaggg

SEQ ID NO: 29018 - DNA, 300 bp, Macaca Mulatta
tcagatcaccggagccagtctatagtacacaccacacatctgccaaggagcaacagaatcctaccgggaccgttcacatacaaagaaaagaaaagtagtggtattttggtatgtacaaatatttccatatgttagccgtttcctgtctggtttcttcttatctgttaatcccagacaatggcaatgaaaagactagtaggatcctttcctgacataagaaatgttttaatgccttttgatgaagcagcagattttggagcaatcttttaactcaatttgtatttagaaattctcaaaggg

SEQ ID NO: 29019 - DNA, 1959 bp, Macaca Mulatta
  misc_feature (1)...(1959): n = A,T,C or G
ccactcggacgagcggcccttcaaatgccagaatctgcccctacgccagccggaactccagccagctcaccgtccacctgcgatcccacacgggnggggacgcccccttccagtgctggctctgtagcgccaagttcaaaatcagctcggacttgaaaaggcacatgcgggtgcactcaggggagaagcctttcaagtgcgagttctgcaacgtccgctgcaccatgaaagggaacctcaagtcgcacatccgcatcaagcacagcnnnnnnnnnnnnnnnnnnnnnnnnnnnnnnnnnnnnnnnnnnnnnnnnnnnnnnnnnnnnnnnnnnnnnnnnnnnnnnnnnnnnnnnnnnnnnnnnnnnnnnnnnnnnnnnnnnnnnnnnnnnnnnnnnnnnnnnnnnnnnnnnnnnnnnnnnnnnnnnnnnnnnnnnnnnnnnnnnnnnnnnnnnnnnnnnnnnnnnnnnnnnnnnnnnnnnnnnnnnnnnnnnnnnnnnnnnnnnnnnnnnnnnnnnnnnnnnnnnnnnnnnnnnnnnnnnnnnnnnnnnnnnnnnnnnnnnnnnnnnnnnnnnnnnnnnnnnnnnnnnnnnnnnnnnnnnnnnnnnnnnnnnnnnnnnnnnnnnnnnnnnnnnnnnnnnnnnnnnnnnnnnnnnnnnnnnnnnnnnnnnnnnnnnnnnnnnnnnnnnnnnnnnnnnnnnnnnnnnnnnnnnnnnnnnnnnnnnnnnnnnnnnnnnnnnnnnnnnnnnnnnnnnnnnnnnnnnnnnnnnnnnnnnnnnnnnnnnnnnnnnnnnnnnnnnnnnnnnnnnnnnnnnnnnnnnnnnnnnnnnnnnnnnnnnnnnnnnnnnnnnnnnnnnnnnnnnnnnnnnnnnnnnnnnnnnnnnnnnnnnnnnnnnnnnnnnnnnnnnnnnnnnnnnnnnnnnnnnnnnnnnnnnnnnnnnnnnnnnnnnnnnnnnnnnnnnnnnnnnnnnnnnnnnnnnnnnnnnnnnnnnnnnnnnnnnnnnnnnnnnnnnnnnnnnnnnnnnnnnnnnnnnnnnnnnnnnnnnnnnnnnnnnnnnnnnnnnnnnnnnnnnnnnnnnnnnnnnnnnnnnnnnnnnnnnnnnnnnnnnnnnnnnnnnnnnnnnnnnnnnnnnnnnnnnnnnnnnnnnnnnnnnnnnnnnnnnnnnnnnnnnnnnnnnnnnnnnnnnnnnnnnnnnnntcaggaggggacagcagaagtgacagtggtgagcgatggaggccagaacatcgcagtggccaccactgcgccgccggtgttctcctcctcttcccagcaagaactacccaagcagacctactccatcattcaaggggcagcccatccagctttgctctgtcctgctgactccataccagattagtgcttaaaaaacaaaaggagtgggggaaaggaattgagaaaaagaaatcataagtagaattctctaaaaggtttgctctnnnnnnnnnnnnnnnnnnnnnnnnnnnnnagacggagtctcgctctgtttcccaggctggagtgcagtggcgcaatcttggctcactgcaagtcagcctcccaggttcaagcgattctggtgcctcagcctcccaagtagctgggaccacaggtgtacgacaccatgactggctaatttttgtatatttgatagagacggggtttcatcatgttgaactcctgacctcaagtgatctgcccacctcagcctcccaaaagtgctgggattacaggtgtgagccaccatgcctggccgtggtttgctcttaatatttttaaggatggctgtgaatccccctggccccataataaattgtaattttatactgcttactataatttttttaacactgtaacaactttgagaccacctctgaatcgtcacatcatactgttgtagaatcttaaatgttaccaaggtgattccaatgaggggttggaagaaaaatgcattaagtagt

SEQ ID NO: 29020 - DNA, 552 bp, Macaca Mulatta
  misc_feature (1)...(552): n = A,T,C or G
nagaagctctacattctcggtggggaggttgcagagtctgcacaaaagtgcacgcatctcgttgccagcaaagtgactcgcactgtgaagttcctgacggcaatttctgtcgtgaagcacatagtgacgccagagtggctggaagaatgcttcaggtgtcagaagttcattnnnnnnnnnnnnnnnnnnnnnnnnnnnnnnnnnnnnnnnnnnnnnnnnnnnnnnnnnnnnnnnnnnnnnnnnnnnnnnnnnnnnnnnnnnnnnnnnnnnnnnnnnnnnnnnnnnnnnnnnnnnnnnnnnnnnnnnnnnnnnnnnnnnnnnnnnnnnnnnnnnnnnnnnnnnnnnnnnnnnnnnnnnnnnnnnnnnnnnnnnnnnnnnnnnnnnnnnnnnnnnnnnnnnnnnnnnnnnnnnnnnnnnnnnnnnnnnnnnnnnnnnnnnnnnnnnnnnnnnnnnnnnnnnnnnnnnnnnnnnnnnnnnnnnnagatgttcacaatgcagagttcgttctgaccggagtactcacacaaacgctggactatgaatcatatcctt

SEQ ID NO: 29021 - DNA, 716 bp, Macaca Mulatta
  misc_feature (1)...(716): n = A,T,C or G
tgcacttacttccctaagtcactgtcttatgttcatctaatacaatgataggttgagttaaaatacagaaggggtgtttgagtattcagatttcataaaacacttccttggaatatagctgcattaacttggaaagaagcctgttaggctagaagacagaaactccaactggcaaaaaagcaaggatctaagaaaaaaaaccaccaaaggtcttgaatttactgtatttaaatgcattggttaagtttattttgctaaataaagtgaactactttttgtctctaaaatgatattctaaataaaaccttaactttttgnnnnnnnnnnnnnnnnnnnnnnnnnnnnnnnnnnnnnnnnnnnnnnnnnnnnnnnnnnnnnnnnnnnnnnnnnnnnnnnnnnnnnnnnnnnnnnnnnnnnnnnnnnnnnnnnnnnnnnnnnnnnnnnnnnnnnnnnnnnnnnnnnnnnnnnnnnnnnnnnnnnnnnnnnnnnnnnnnnnnnnnnnnnnnnnnnnnnnnnnnnnnnnnnnnnnnnnnnnnnnnnnnnnnnnnnnnnnnnnnnnnnnnnnnnnnnnnnnnnnnnnnnnnnnnnnnnnnnnnnnnnnnnnnnnnnnnnnnnnnnnnnnnnnnnnnnnnnnnnnnnnnnnnnnnnnnnnnnnnnnnnnnnnnnnnnnnnnnnnnnnnnnnnnnnnnnnnnnnnnnnnnnnnnnnnnnnnnnnn

SEQ ID NO: 29022 - DNA, 471 bp, Macaca Mulatta
atggatcccccggccagcagctgcatgaggagcctccagcccccagcccctgtctggggctgccttcgaaacccccactcagaaggcaatggggcctcagggctaccccactacccgcccaccccgttctccttccaccagaaaccagacttcccggcgacagcgacggcagcgtaccccgacttctcagcctcctgcctggcggccaccccacacagcctgcctcaggaggagcgcatcttcactgagcagcaccctgctttcccacagtcccccaactggcacttccctgtctcagaggcccggcgcaggcccaactcaggcctggcagggggttccaaggaaatggggaccagcagcctgggcctggtggacaccacaggaggcccaggcgaggactacggggtgtttgggagcactgccaatgagacagagaagaaatcatccaggcggagaaaggagagttcaggt

SEQ ID NO: 29023 - DNA, 139 bp, Macaca Mulatta
cagtctactctggatgatgccactgatgcctggggaataaaggtggagcgtgtggaaatcaaggatgtgaaactacctgtgcagctccagagagctatggctgcagaagcagaagcgtcccgtgaggcccgcgccaagg

SEQ ID NO: 29024 - DNA, 195 bp, Macaca Mulatta
gtactgccagtccagccagtgaggagcattgaagaacaggggtgccttttctaaagctaagcacaaagttggttatagaaggtgtatgtttatgaaaaagtttgtttaaaggcctttcatttacagggaaggaggttgataaaataggttgaggaaatagcctgaaaaacaaaaatgagcttattttagaaacaa

SEQ ID NO: 29025 - DNA, 1336 bp, Macaca Mulatta
  misc_feature (1)...(1336): n = A,T,C or G
agatttagtacctcaagacaaactcttatgtggattccagattcnnnnnnnnnnnnnnnnnnnnnnnnnnnnnnnnnnnnnnnnnnnnnnnnnnnnnnnnnnatatttattgatagagatccagcagcatttgcacccattttaaattttcttcgaacaaaagaactagacttaagnnnnnnnnnnnnnnnnnnnnnnnnnnnnnnnnnnnnnnnnnnnnnnnnnnnnnnnnnnnnnnnnnnnnnnnnnnnnnnnnnnnnnnnnnnnnnnnnnnnnnnnnnnnnnnnnnnnnnnnnnnnnnnnnnnnnnnnnnnnnnnnnnnnnnnnnnnnnnnnnnnnnnnnnnnnnnnnnnnnnnnnnnnnnnnnnnnnnnnnnnnnnnnnnnnnnnnnnnnnnnnnnnnnnnnnnnnnnnnnnnnnnnnnnnnnnnnnnnnnnnnnnnnnnnnnnnnnaggatttcctgtggatccacgaaaggtgctaatagtagctggccatcacaactggattgtagctgcatatgcccattttgctgtgtgttacannnnnnnnnnnnnnnnnnnnnnnnnnnnnnnnnnnnnnnnnnnnnnnnnnnnnnnnnnnnnnnnnnnnnnnnnnnnnnnnnnnnnnnnnnnnnnnnnnnnnnnnnnnnnnnnnnnnnnnnnnnnnnnnnnnnnnnnnnnnnnnnnnnnnnnnnnnnnnnnnnnnnnnnnnnnnnnnnnnnnnnnnnnnnnnnnnnnnnnnnnnnnnnnnnnnnnnnnnnnnnnnnnnnnnnnnnnnnnnnnnnnnnnnnnnnnnnnnnnnnnnnnnnnnnnnnnnnnnnnnnnnnnnnnnnnnnnnnnnnnnnnnnnnnnnnnnnnnnnnnnnnnnnnnnnnnnnnnnnnnnnnnnnnnnnnnnnnnnnnnnnnnnnnnnnnnnnnnnnnnnnnnnnnnnnnnnnnnnnnnnnnnnnnnnnnnnnnnnnnnnnnnnnnnnnnnnnnnnnnnnnnnnnnnnnnnnnnnnnnnnnnnnnnnnnnnnnnnnnnnnnnnnnnnnnnnnnnnnnnnnnnnnnnnnnnnnnnnnnnnnnnnnnnnnnnnnnnnnnnnnnnnnnnnnnnnnnnnnnnnnnnnnnnnnnnnnnnnnnnnnnnnnnnnnnnnnnnnnnnnnnnnnnnnnnnnnnnnnnnnnnnnnnnnnnnnnnnnnnnnnnnnnnnnnnnnnnnnnnnnnnnnnnnnnnnnnnnnnnnngtctgtgcagataataaccatgtccggacgtggacagtaacgcgattcagaggaatgatctctactcaaccaggttctactcctttagcgtcattcaagatactgtccctgg

SEQ ID NO: 29026 - DNA, 1660 bp, Macaca Mulatta
  misc_feature (1)...(1660): n = A,T,C or G
aggaaatctatacctttggaagaatattgggaaaagggagctttggaatggtcattgaagcgacagacaaggaaacagaaacgaagtgggcaattaaaaaagtgaacaaagaaaagnnnnnnnnnnnnnnnnnnnnnnnnnnnnnnnnnnnnnnnnnnnnnnnnnnnnnnnnnnnnnnnnnnnnnnnnnnnnnnnnnnnnnnnnnnnnnnnnnnnnnnnnnnnnnnnnnnnnnnnnnnnnnnnnnnnnnnnnnnnnnnnnnnnnnnnnnnnnnnnnnnnnnnnnnnnnnnnnnnnnnnnnnnnnnnnnnnnnnnnnnnnnnnnnnnnnnnnnnnnnnnnnnnnnnnnnnnnnnnnnnnnnnnnnnnnnnnnnnnnnnnnnnnnnnnnnnnnnnnnnnnnnnnnnnnnnnnnnnnnnnnnnnnnnnnnnnnnnnnnnnnnnnnnnnnnnnnnnnnnnnnnnnnnnnnnnnnnnnnnnnnnnnnnnnnnnnnnnnnnnnnnnnnnnnnnnnnnnnnnnnnnnnnnnnnnnnnnnnnnnnnnnnnnnnnnnnnnnnnnnnnnnnnnnnnnnnnnnnnnnnnnnnnnnnnnnnnnnnnnnnnnnnnnnnnnnnnnnnngtggagaaccaccctttttggcaagctcagaagagaagctttttgaattaataagaaaaggagaactacattttgaaaatccagtctggaattccataagtgattgtgnnnnnnnnnnnnnnnnnnnnnnnnnnnnnnnnnnnnnnnnnnnnnnnnnnnnnnnnnnnnnnnnnnnnnnnnnnnnnnnnnnnnnnnnnnnnnnnnnnnnnnnnnnnnnnnnnnnnnnnnnnnnnnnnnnnnnnnnnnnnnnnnnnnnnnnnnnnnnnnnnnnnnnnnnnnnnnnnnnnnnnnnnnnnnnnnnnnnnnnnnnnnnnnnnnnnnnnnnnnnnnnnnnnnnnnnnnnnnnnnnnnnnnnnnnnnnnnnnnnnnnnnnnnnnnnnnnnnnnnnnnnnnnnnnnnnnnnnnnnnnnnnnnnnnnnnnnnnnnnnnnnnnnnnnnnnnnnnnnnnnnnnnnnnnnnnnnnnnnnnnnnnnnnnnnnnnnnnnnnnnnnnnnnnnnnnnnnnnnnnnnnnnnnnnnnnnnnnnnnnnnnnnnnnnnnnnnnnnnnnnnnnnnnnnnnnnnnnnnnnnnnnnnnnnnnnnnnnnnnnnnnnnnnnnnnnnnnnnnnnnnnnnnnnnnnnnnnnnnnnnnnnnnnnnnnnnnnnnnnnnnnnnnnnnnnnnnnnnnnnnnnnnnnnnnnnnnnnnnnnnnnnnnnnnnnnnnnnnnnnnnnnnnnnnnnnnnnnnnnnnnnnnnnnnnnnnnnnnnnnnnnnnnnnnnnnnnnnnnnnnnnnnnnnnnnnnnnnnnnnnnnnnnnnnnnnnnnnnnnnnnnnnnnnnnnnnnnnnnnnnnnnnnnnnnnnnnnnnnnnnnnnnnnnnnnnnnnnnnnnnnnnnnnnnnnnnnnnnnnnnnnnnnnnnnnnngctcatttttacttcaaattcttatgtttaggtacagctatttataggggaaaacaagaggccaaatatggtaatggagattccaaatgatacatgcactttgtactagaagactttgttagaaaattactaataaacttgccat

SEQ ID NO: 29027 - DNA, 496 bp, Macaca Mulatta
tttgaaactgaataacttaatacagaggcaagattttaggagtttgaattggttcttgtttgttctcattctacgtaaaattttgtttatttcagataattttatgtaaacaaattaagagttattcattcaaatttttacagtgttaatctgtaaatgatggcttgatatacagaaaatgtatttttgtttaaaagatgcctgggtaccttttattttatgacatttgtattaaaaataaatataatggtaagaagaatagcttttaaactgcttcttttcattcactccactttcttctccagaatattcctatatgatactttccttctcttcaccttttagaaaaggtaacattgtgaactagtcacactttatgatcacattttattggcactggccccactatttccatttcaatatagttcatccagagtttgccaaagatcacaacattgttaatcacttaagctgcttagcactatatttttcttta

SEQ ID NO: 29028 - DNA, 887 bp, Macaca Mulatta
  misc_feature (1)...(887): n = A,T,C or G
gcagcccggggctgctccctgcaagcagtctttccgccttgcccacccgctcaccggccacattgtcaacctcgcggccttctccaacagctgcctcaaccccctcatctacagctttctcggggagaccttcagggaaaagctgaggctgtacattgagcagaaaacaaacctgccggccctgaaccgcttctgccacgccgccctgaaggctgtcattccagacagcaccgagcagacggacgtgaggttcagcagtgccgtgtagacggcctcggccgcacaggccccgccggcgtgtgactcgggagctgcacgcacctaggtggacacaaggcacggccatgtcatgtctctagaccgctgtcagacgtggctccggctcctcggggcctcgcgagnnnnnnnnnngcctggtcaccctggggctgctaaggaaacctcacgactggtnnnnnnnnnnnnnnacacagaattgctacaatcccaaaacgctcgccccgcagggtccaaaggtcagctctgaccagcctgtnnnnnnnnnnnnnnnnnnnnnnnnnnnnnnnnnnnnnnnnnnnnnnnnnnnnnnnnnnnnnnnnnnnnnnnnnnnnnnnnnnnnnnnnnnnnnnnnnnnnnnnnnnnnnnnnnnnnnnnnnnnnnnnnnnnnnnnnnnnnnnnnnnnnnnnnnnnnnnnnnnnnnnnnnnnnnnnnnnnnnnnnnnnnnnnnnnnnnnnnnnnnnnnnnnnnnnnnnnnnnnnnnnnnnnnnntgagctagctggtgcactgccgagttaaagaggaaaaggaaaacacacgctctggtgcatgcctgagcaccctccatcttccaggacggcagcaatggcgctgtgcagcctcgccaggc

SEQ ID NO: 29029 - DNA, 2567 bp, Macaca Mulatta
  misc_feature (1)...(2567): n = A,T,C or G
agaactggacttgaagccatcatggagacttatgcattctggagacctcctgtgcgcacactcaccttcgaagacttcaccaccatgcagaagcagcaaggnnnnnnnnnnnnnnnnnnnnnnnnnnnnnnnnnnnnnnnnnnnnnnnnnnnnnnnnnnnnnnnnnnnnnnnnnnnnnnnnnnnnnnnnnnnnnnnnnnnnnnnnnnnnnnnnnnnnnnnnnnnnnnnnnnnnnnnnnnnnnnnnnnnnnnnnnnnnnnnnnnnnnnnnnnnnnnnnnnnnnnnnnnnnnnnnnnnnnnnnnnnnnnnnnnnnnnnnnnnnnnnnnnnnnnnnnnnnnnnnnnnnnnnnnnnnnnnnnnnnnnnnnnnnnnnnnnnnnnnnnnnnnnnnnnnnnnnnnnnnnnnnnnnnnnnnnnnnnnnnnnnnnnnnnnnnnnnnnnnnnnnnnnnnnnnnnnnnnnnnnnnnnnnnnnnnnnnnnnnnnnnnnnnnnnnnnnnnnnnnnnnnnnnnnnnnnnnnnnnnnnnnnnnnnnnnnnnnnnnnnnnnnnnnnnnnnnnnnnnnnnnnnnnnnnnnnnnnnnnnnnnnnnnnnnnnnnnnnnnnnnnnnnnnnnnnnnnnnnnnnnnnnnnnngatacaatttccccacttcccttagactagctgcaagcccagaaaaactgagcgcctctctttcactttactctgttcttctccttccaacggggcctttggagagaggcagtacctgccgtcagggatggatcacagcatgcacatgattagcccttcacccaataaccaacaggcaaccaacacttgtgatggccggcaatatggggcagttccaggctcctcctcccagatgtccgtgcacatggtttaaaggccagtccaaacaccacggagcatttggcaatcaaggccccagagtctccgtggtcagatcctcctctttgggagtccagtgccttcagaaaacaggaacnnnnnnnnnnnnnnnnnnnnnnnnnnnnnnnnnacatatccccaagaactagagacacctttaagccagtgagggatacttgtggtagaatcatccacaactcagtggccattctcctgccttcccagaccttaattttataaagcattgtctgttccaaagtgtcctttgaagagactgaataatcacttcgtcatgatgttaagggagatgctagcgtgtggcagccatgaaaagttacacatacccacccacatacagacagacctaccnnnnnnnnnnnnnnnnnnnnnnnnnnnnnnnnnnnnnnnnnnnnnnnnnnnnnnnnnnnnnnnnnnnnnactctgaactgggtgaactctgtggagggagnnnnnnnnnnnnnnnnnnnnnnnnnnnnnnnnnnnnnnnnnnnnnnnnnnnnnnnnnnnnnnnnnnnnnnnnnnnnnnnnnnnnnnnnnnnnnnnnnnnnnnnnnnnnnnnnnnnnnnnnnnnnnnnnnnnnnnnnnnnnnnnnnnnnnnnnnnnnnnnnnnnnnnnnnnnnnnnnnnnnnnnnnnnnnnnnnnnnnnnnnnnnnnnnnnnnnnnnnnnnnnnnnnnnnnnnnnnnnnnnnnnnnnnnnnnnnnnnnnnnnnnnnnnnnnnnnnnnnnnnnnnnnnnnnnnnnnnnnnnnnnnnnnnnnnnnnnnnnnnnnnnnnnnnnnnnnnnnnnnnnnnnnnnnnnnnnnnnnnnnnnnnnnnnnnnnnnnnnnnnnnnnnnnnnnnnnnnnnnnnnnnnnnnnnnnnnnnnnnnnnnnnnnnnnnnnnnnnnnnnnnnnnnnnnnnnnnnnnnnnnnnnnnnnnnnnnnnnnnnnnnnnnnnnnnnnnnnnnnnnnnnnnnnnnnnnnnnnnnnnnnnnnnnnnnnnnnnnnnnnnnnnnnnnnnnnnnnnnnnnnnnnnnnnnnnnnnnnnnnnnnnnnnnnnnnnnnnnnnnnnnnnnnnnnnnnnnnnnnnnnnnnnnnnnnnnnnnnnnnnnnnnnnnnnnnnnnnnnnnnnnnnnnnnnnnnnnnnnnnnnnnnnnnnnnnnnnnnnnnnnnnnnnnnnnnnnnnnnnnnnnnnnnnnnnnnnnnnnnnnnnnnnnnnnnnnnnnnnnnnnnnnnnnnnnnnnnnnnnnnnnnnnnnnnnnnnnnnnnnnnnnnnnnnnnnnnnnnnnnnnnnnnnnnnnnnnnnnnnnnnnnnnnnnnnnnnnnnnnnnnnnnnnnnnnnnnnnnnnnnnnnnnnnnnnnnnnnnnnnnnnnnnnnnnnnnnnnnnnnnnnnnnnnnnnnnnnnnnnnnnnnnnnnnnnnnnnnnnnnnnnnnnnnnnnnnnnnnnnnnnnnnnnnnnnnnnnnnnnnnnnnnnnnnntctggttttgaggtgttgtacataaatgtatttatagttcctagtaggggaatccaatattatgaatatgaaaaagagggcaataaaagggtatgtaaaatatgtatgaagaaaaggtgtataaaaatttgcccttatgcacggaactctgtttctaagtgccaagcacagaaagccgctaaataaaatctttgcaattgt

SEQ ID NO: 29030 - DNA, 266 bp, Macaca Mulatta
ggaaacaaacaaattcagcagctatccactgtatcacagtgtctatgagacatatgagttggtggaaaagttttatgatccaatgtttaaatatcacctcactgtggcccaggttcgaggagggatggtgtttgaactagccaattccgtagtgctcccttttgattgtcgagattatgctgtagttttaagaaagtatggtgacaaaatctacaatatttctatgaaacatccacaggaaatgaagacatacagtgtatcatttg

SEQ ID NO: 29031 - DNA, 442 bp, Macaca Mulatta
ctcacattcccctttggccacctccctgtttctctgttcctcttcacagcaaaaactcttcaaagagttgttgattactttcatttccactttcttacccctgtttcccctcaattaactctccttcatccccatgatgccattatgtggctcttattagagtcaccaacgttattctccaaaacaaaagcaacaaggactttgacttctcagcagcactcagctctggttcttgaaacaccccccattacttgcttttcctcctacctcataactctctttcccagcctctactgcggccttctctgagttcttcccagggtcctaggctctgatacagtgtagctcaaccctgctacacaaagaatctcctgaaagcctgtaaaactgtccatgcatgttctgtgagtgacctaccaagagaataaacaattttaaaaat

SEQ ID NO: 29032 - DNA, 165 bp, Macaca Mulatta
caacctagatcctcatgtgtgtggtcaaaagttatctttcctctttgactgcagggctaggggtaaaggtgcctggctctattattatatatccaaagggcagatacacctctatgtgttattcaagataccaaataagctattcctaagaaaagtctagaacat

SEQ ID NO: 29033 - DNA, 747 bp, Macaca Mulatta
  misc_feature (1)...(747): n = A,T,C or G
caggataccttctcagtggctgtctccttcctgacgggccgaatcgtctacatttcggagcaggcagctgtcctgctgcgttgcaagcgggacgtgttccggggtacccgcttctccgagctcctggctccccaggatgtgggagtcttctatggttccactgctccatctcgcctgcccacctggggcacaggggcctcagcaggtncaggttcaggcctcagggactttacccaggagaagtctgtcttctgccgtatcagnnnnnnnnnnnnnnnnnnnnnnnnnnnnnnnnnnnnnnnnnnnnnnnnnnnnnnnnnnnnnnnnnnnnnnnnnnnnnnnnnnnnnnnnnnnnnnnnnnnnnnnnnnnnnnnnnnnnnnnnnnnnnnnnnnnnnnnnnnnnnnnnnnnnnnnnnnnnnnnnnnnnnnnnnnnnnnnnnnnnnnnnnnnnnnnnnnnnnnnnnnnnnnnnnnnnnnnnnnnnnnnnnnnnnnnnnnnnnnnnnnnnnnnnnnnnnnnnnnnnnnnnnnnnnnnnnnnnnnnnnnnnnnnnnnnnnnnnnnnnnnnnnnnnnnnnnnnnnnnnnnnnnnnnnnnnctgcagttggcgggccagccctttgaccactcccccatccgcttctgtgcccgcaacggggagtatgtcaccatggacaccagttgggctggctttgtgcatccctggagccgcaaggtagccttcgtgttgggccgccacaaagtacgcac

SEQ ID NO: 29034 - DNA, 4425 bp, Macaca Mulatta
  misc_feature (1)...(4425): n = A,T,C or G
agatcagtgcattgttgatgacatcacttacaatgtgaatgacacattccacaagcgtcatgaagagggacacatgctgaactgtacatgcttcggtcagggtcggggtagatggaagtgtgatcccgtcnnnnnnnnnnnnnnnnnnnnnnnnnnnnnnnnnnnnnnnnnnnnnnnnnnnnnnnnnnnnnnnnnnnnnnnnnnnnnnnnnnnnnnnnnnnnnnnnnnnnnnnnnnnnnnnnnnnnnnnnnnnnnnnnnnnnnnnnnnnnnnnnnnnnnnnnnnnnnnnnnnnnnnnnnnnnnnnnnnnnnnnnnnnnnnnnnnnnnnnnnnnnnnnnnnnnnnnnnnnnnnnnnnnnnnnnnnnnnnnnnnnnnnnnnnnnnnnnnnnnnnnnnnnaaaattctgtaggccgttggaaggaagctaccataccaggccacttaaactcctacaccatcaaaggcctgaagcctggtgtggtatacgagggccagctcatcagcatccagcagtacggccaccgagaagtgactcgctttgacttcaccaccaccagcaccagcacacctgtgaccagnnnnnnnnnnnnnnnnnnnnnnnnnnnnnnnnnnnnnnnnnnnnnnnnnnnnnnnnnnnnnnnnnnnnnnnnnnnnnnnnnnnnnnnnnnnnnnnnnnnnnnnnnnnnnnnnnnnnnnnnnnnnnnnnnnnnnnnnnnnnnnnnnnnnnnnnnnnnnnnnnnnnnnnnnnnnnnnnnnnnnnnnnnnnnnnnnnnnnnnnnnnnnnnnnnnnnnnnnnnnnnnnnnnnnnnnnnnnnnnnnnnnnnnnnnnnnnnnnnnnnnnnnnnnnnnnnnnnnnnnnnnnnnnnnnnnnnnnnnnnnnnnnnnnnnnnnnnnnnnnnnnnnnnnnnnnnnnnnnnnnnnnnnnnnnnnnnnnnnnnnnnnnnnnnnnnnnnnnnnnnnnnnnnnnnnnnnnnnnnnnnnnnnnnnnnnnnnnnnnnnnnnnnnnnnnnnnnnnnnnnnnnnnnnnnnnnnnnnnnnnnnnnnnnnnnnnnnnnnnnnnnnnnnnnnnnnnnnnnnnnnnnnnnnnnnnnnnnnnnnnnnnnnnnnnnnnnnnnnnnnnnnnnnnnnnnnnnnnnnnnnnnnnnnnnnnnnnnnnnnnnnnnnnnnnnnnnnnnnnnnnnnnnnnnnnnnnnnnnnnnnnnnnnnnnnnnnnnnnnnnnnnnnnnnnnnnnnnnnnnnnnnnnnnnnnnnnnnnnnnnnnnnnnnnnnnnnnnnnnnnnnnnnnnnnnnnnnnnnnnnnnnnnnnnnnnnnnnnnnnnnnnnnnnnnnnnnnnnnnnnnnnnnnnnnnnnnnnnnnnnnnnnnnnnnnnnnnnnnnnnnnnnnnnnnnnnnnnnnnnnnnnnnnnnnnnnnnnnnnnnnnnnnnnnnnnnnnnnnnnnnnnnnnnnnnnnnnnnnnnnnnnnnnnnnnnnnnnnnnnnnnnnnnnnnnnnnnnnnnnnnnnnnnnnnnnnnnnnnnnnnnnnnnnnnnnnnnnnnnnnnnnnnnnnnnnnnnnnnnnnnnnnnnnnnnnnnnnnnnnnnnnnnnnnnnnnnnnnnnnnnnnnnnnnnnnnnnnnnnnnnnnnnnnnnnnnnnnnnnnnnnnnnnnnnnnnnnnnnnnnnnnnnnnnnnnnnnnnnnnnnnnnnnnnnnnnnnnnnnnnnnnnnnnnnnnnnnnnnnnnnnnnnnnnnnnnnnnnnnnnnnnnnnnnnnnnnnnnnnnnnnnnnnnnnnnnnnnnnnnnnnnnnnnnnnnnnnnnnnnnnnnnnnnnnnnnnnnnnnnnnnnnnnnnnnnnnnnnnnnnnnnnnnnnnnnnnnnnnnnnnnnnnnnnnnnnnnnnnnnnnnnnnnnnnnnnnnnnnnnnnnnnnnnnnnnnnnnnnnnnnnnnnnnnnnnnnnnnnnnnnnnnnnnnnnnnnnnnnnnnnnnnnnnnnnnnnnnnnnnnnnnnnnnnnnnnnnnnnnnnnnnnnnnnnnnnnnnnnnnnnnnnnnnnnnnnnnnnnnnnnnnnnnnnnnnnnnnncagacattactggttatagaattaccacaacccctacaaacggccagcagggatattctttggaagaagtggtccatgctgatcagagctcctgcacttttgataacctgagtcccggcctggagtacaatgtcagtgtttacactgtcaaggatgacaaggaaagtgtccctatctctgataccatcatcccagnnnnnnnnnnnnnnnnnnnnnnnnnnnnnnnnnnnnnnnnnnnnnnnnnnnnnnnnnnnnnnnnnnnnnnnnnnnnnnnnnnnnnnnnnnnnnnnnnnnnnnnnnnnnnnnnnnnnnnnnnnnnnnnnnnnnnnnnnnnnnnnnnnnnnnnnnnnnnnnnnnnnnnnnnnnnnnnnnnnnnnnnnnnnnnnnnnnnnnnnnnnnnnnnnnnnnnnnnnnnnnnnnnnnnnnnnnnnnnnnnnnnnnnnnnnnnnnnnnnnnnnnnnnnnacaggtcttgattccccaactggcattgacttttctgatattactgccaactcttttactgtgcactggattgctcctcgagccaccatcactggctacaggatccgccatcaccccgagcacatgagcgggagacctcgagaagatcgggtgcccccctctcggaattccatcaccctcaccaacctcactccaggcacagagtatgtggtcagcatcgttgctcttaatggcagagaggaaagtcccttattgattggccaacaatcaacagnnnnnnnnnnnnnnnnnnnnnnnnnnnnnnnnnnnnnnnnnnnnnnnnnnnnnnnnnnnnnnnnnnnnnnnnnnnnnnnnnnnnnnnnnnnnnnnnnnnnnnnnnnnnnnnnnnnnnnnnnnnnnnnnnnnnnnnnnnnnnnnnnnnnnnnnnnnnnnnnnnnnnnnnnnnnnnnnnnnnnnnnnnnnnnnnnnnnnnnnnnnnnnnnnnnnnnnnnnnnnnnnnnnnnnnnnnnnnnnnnnnnnnnnnnnnnnnnnnnnnnnnnnnnnnnnnnnnnnnnagaaattgacaaaccatcacagatgcaagtgaccgatgttcaggacaacagcattagtgtcaagtggctgccttcaagttcccctgttactggttacagagtaaccaccactcccaaaaatggaccaggaccaacaaaaactaaaactgcaggtccannnnnnnnnnnnnnnnnnnnnnnnnnnnnnnnnnnnnnnnnnnnnnnnnnnnnnnnnnnnnnnnnnnnnnnnnnnnnnnnnnnnnnnnnnnnnnnnnnnnnnnnnnnnnnnnnnnnnnnnnnnnnnnnnnnnnnnnnnnnnnnnnnnnnnnnnnnnnnnnnnnnnnnnnnnnnnnnnnnnnnnnnnnnnnnnnnnnnnnnnnnnnnnnnnnnnnnnnnnnnnnnnnnnnnnnnnnnnnnnnnnnnnnnnnnnnnnnnnnnnnnnnnnnnnnnnnnnnnnnnnnnnnnnnnnnnnnnnnnnnnnnnnnnnnnnnnnnnnnnnnnnnnnnnnnnnnnnnnnnnnnnnnnnnnnnnnnnnnnnnnnnnnnnnnnnnnnnnnnnnnnnnnnnnnnnnnnnnnnnnnnnnnnnnnnnnnnnnnnnnnnnnnnnnnnnnnnnnnnnnnnnnnnnnnnnnnnnnnnnnnnnnnnnnnnnnnnnnnnnnnnnnnnnnnnnnnnnnnnnnnnnnnnnnnnnnnnnnnnnnnnnnnnnnnnnnnnnnnnnnnnnnnnnnnnnnnnnnnnnnnnnnnnnnnnnnnnnnnnnnnnnnnnnnnnnnnnnnnnnnnnnnnnnnnnnnnnnnnnnnnnnnnnnnnnnnnnnnnnnnnnnnnnnnnnnnnnnnnnnnnnnnnnnnnnnnnnnnnnnnnnnnnnnnnnnnnnnnnnnnnnnnnnnnnnnnnnnnnnnnnnnnnnnnnnnnnnnnnnnnnnnnnnnnnnnnnnnnnnnnnnnnnnnnnnnnnnnnnnnnnnnnnnnnnnnnnnnnnnnnnnnnnnnnnnnnnnnnnnnnnnnnnnnnnnnnnaggtttacaaccaggcactgactacaagatctacctgtacaccctgaacgacaatgcccggagctcccctgtggtcatcgacgcctccactgnnnnnnnnnnnnnnnnnnnnnnnnnnnnnnnnnnnnnnnnnnnnnnnnnnnnnnnnnnnnnnnnnnnnnnnnnnnnnnnnnnnnnnnnnnnnnnnnnnnnnnnnnnnnnnnnnnnnnnnnnnnnnnnnnnnnnnnnnnnnnnnnnnnnnnnnnnnnnnnnnnnnnnnnnnnnnnnnnnngcctggaaccgggaaccgaatataccatttatgtcattgccctgaagaataatcagaagagcgagcccctgattggaaggaaaaagacag

SEQ ID NO: 29035 - DNA, 731 bp, Macaca Mulatta
aacactctcctctgttgaagctcttggtgacgggcgagctcaggccctgatgggtgacttcgcaggcatagacattgtgactctggtagtctgtgctgctcagcgtcagggtgctgctcaggctgtaggtgttgtccttgctgtcctgctctgtgacactctcctgggagttacccgttttgaggacaccatccaccttccactttacgctggcctctctgggatagaagttattcagcaggcacacaacagagacagttccagatttcacctgatcttcagatggcgggaagatgaagacagatggtggagccacagcccgtttgatctccaccttggtcccttggccgaaagtgcacggaagctgtgtaccttgcacgcagtaataaaccccaacatcctcagcctccactctgctgattttcagtgtgaaatctgtccctgacccactgccactgaatctgtctgggaccccagagtcccggttagaaacctcataaatcaggagccttggaggctggcctggcttctgctgataccaattcaagtaggtttttccatcactgtgtacaaggctctgactagacctgcaggagatggaggccggctctccaggggtgacgggcagggagagtggagtctgggtcatcacaatgtccccactggatcccagggagccagagcaacagcagccccagaactgagcgaggagccagcattgtccataagtg

SEQ ID NO: 29036 - DNA, 673 bp, Macaca Mulatta
gcctctatggcaaggactacaatgtctacacacatagcttcttgtgcctatgggaaggatcaggcactctggcagaaactggccaaggacattcaggttgcaagtaacgaaattctcagggacccatgctttcatcccggatataagaaggtagtgaacgtaagtgacctttacaagaccccctgcaccaagagatttgagatgactcttccattccagcagtttgaaatccagggtattggaaactatcaacaatgccatcaaagcgtcctggagctcttcaacaccagttactgcccttactcccagtgtgccttcaatgggattttcttgccaccactccaggcggattttggggcattttcagctttttactttgtgatgaattttttaaacttgacatcagagaaagtctctcaggaaaaggtgactgagatgatgaaaaagttctgctctcagccttgggaggagataaaaacatcttacgctggagtaaaggagaagtacctgagtgaatactgcttttctggtacctacattctctccctacttctgcaaggctatcattttcacagctgattcctgggagcacatccatttcattggcaagatccagggcagcgacgccggctgggactttgggctacatgctgaacctgaccaacatgatccc

SEQ ID NO: 29037 - DNA, 468 bp, Macaca Mulatta
cagcggtcagactttcctttggcagccccagaaaatgctagtaccggtccagcccatgtcaggggacgaaccgcagtagaaactgacttgacttttgggctgacttctaacagaccttcactttctgcgtgtagctctgaagctcccgaagagagatccagtagaagactggcagacagtgaatccctgggccatggagctcagagaaatacagatttggaaagggaagattccataagcagaggaaggaggtcaccaagcaagccggacttcctctacaaaaagtctgccctctgagagcaacctccaagtcgtctgtgcctgagatgtgaaacatcccattttatgatgtaacccaacaacttacagaccagtttatcaatgccagctgataactccgtttcatatgattttgttgtagtttttgtgtatatatgtgtttattagacacagcatgctaagaaggtt

SEQ ID NO: 29038 - DNA, 6586 bp, Macaca Mulatta
  misc_feature (1)...(6586): n = A,T,C or G
tatgagtatcattgggcagatggaacgaacataaagaaacctataaagtgctctgcaccaaagtatattgattacttgatgacttgggttcaggaccagttggatgatgagacgttatttccatcnnnnnnnggtgtcccattcccaaagaatttcatgtctgtggcaaaaactatactcaaacgcctctttagggtttatgctcacatttatcatcagcattttgaccctgtgatccaacttcaggaggaagcacatctgaatacatctttcaagcactttnnnnnnnnnnnnnnnnnnnnnnnnnnnnnnnnnnnnnnnnnnnnnnnnnnnnnnnnnnnnnnnnnnnnnnnnnnnnnnnnnnnnnnnnnnnnnnnnnnnnnnnnnnnnnnnnnnnnnnnnnnnnnnnnnnnnnnnnnnnnnnnnnnnnnnnnnnnnnnnnnnnnnnnnnnnnnnnnnnnnnnnnnnnnnnnnnnnnnnnnnnnnnnnnnnnnnnnnnnnnnnnnnnnnnnnnnnnnnnnnnnnnnnnnnnnnnnnnnnnnnnnnnnnnnnnnnnnnnnnnnnnnnnnnnnnnnnnnnnnnnnnnnnnnnnnnnnnnnnnnnnnnnnnnnnnnnnnnnnnnnnnnnnnnnnnnnnnnnnnnnnnnnnnnnnnnnnnnnnnnnnnnnnnnnnnnnnnnnnnnnnnnnnnnnnnnnnnnnnnnnnnnnnnnnnnnnnnnnnnnnnnnnnnnnnnnnnnnnnnnnnnnnnnnnnnnnnnnnnnnnnnnnnnnnnnnnnnnnnnnnnnnnnnnnnnnnnnnnnnnnnnnnnnnnnnnnnnnnnnnnnnnnnnnnnnnnnnnnnnnnnnnnnnnnnnnnnnnnnnnnnnnnnnnnnnnnnnnnnnnnnnnnnnnnnnnnnnnnnnnnnnnnnnnnnnnnnnnnnnnnnnnnnnnnnnnnnnnnnnnnnnnnnnnnnnnnnnnnnnnnnnnnnnnnnnnnnnnnnnnnnnnnnnnnnnnnnnnnnnnnnnnnnnnnnnnnnnnnnnnnnnnnnnnnnnnnnnnnnnnnnnnnnnnnnnnnnnnnnnnnnnnnnnnnnnnnnnnnnnnnnnnnnnnnnnnnnnnnnnnnnnnnnnnnnnnnnnnnnnnnnnnnnnnnnnnnnnnnnnnnnnnnnnnnnnnnnnnnnnnnnnnnnnnnnnnnnnnnnnnnnnnnnnnnnnnnnnnnnnnnnnnnnnnnnnnnnnnnnnnnnnnnnnnnnnnnnnnnnnnnnnnnnnnnnnnnnnnnnnnnnnnnnnnnnnnnnnnnnnnnnnnnnnnnnnnnnnnnnnnnnnnnnnnnnnnnnnnnnnnnnnnnnnnnnnnnnnnnnnnnnnnnnnnnnnnnnnnnnnnnnnnnnnnnnnnnnnnnnnnnnnnnnnnnnnnnnnnnnnnnnnnnnnnnnnnnnnnnnnnnnnnnnnnnnnnnnnnnnnnnnnnnnnnnnnnnnnnnnnnnnnnnnnnnnnnnnnnnnnnnnnnnnnnnnnnnnnnnnnnnnnnnnnnnnnnnnnnnnnnnnnnnnnnnnnnnnnnnnnnnnnnnnnnnnnnnnnnnnnnnnnnnnnnnnnnnnnnnnnnnnnnnnnnnnnnnnnnnnnnnnnnnnnnnnnnnnnnnnnnnnnnnnnnnnnnnnnnnnnnnnnnnnnnnnnnnnnnnnnnnnnnnnnnnnnnnnnnnnnnnnnnnnnnnnnnnnnnnnnnnnnnnnnnnnnnnnnnnnnnnnnnnnnnnnnnnnnnnnnnnnnnnnnnnnnnnnnnnnnnnnnnnnnnnnnnnnnnnnnnnnnnnnnnnnnnnnnnnnnnnnnnnnnnnnnnnnnnnnnnnnnnnnnnnnnnnnnnnnnnnnnnnnnnnnnnnnnnnnnnnnnnnnnnnnnagttagaaatatatacccttcctctctttgaaaatacacctttttcacatctaggaagaaatgcttgcccttaaatagtatagattaaaaacactcagtagaaaagaaactaaattaaatcaatttgttttgccattaacaagtagagcagtgatacaatttaatgccattacaattatgttgactagaaactgcctttttctccacttcatttctaggaattattcaccgagtaccaacagtagaagtaacaggaaagtctggcagagttaaatatattggacatttattggtaaagcttatttataaactgcagtcagagctagttaatatccttaaatctttttattttcagatagataatatgaatcattatgggttgattcagaaataaaatttgtgaggtgatttcgagtcttgtctatataggaaaatgaagcacagaattactcagtcttccatattgtatttgacttcatatctatctaataacaaaggagttgcagtagccaagtgtagagagaatagtgaaaaattaatcttgccctttcaagccttatacagtagtacactgtacttatttttagtagtaagacctactttcccactatatgtacatagtttgttttcactgtgccagaatctcaggtgcctgcttagagtatttctttaatcacagtcactgggaagtaaggatatgtgtatatgtgtatatatgttaacaaagcatagcagttctctaggggagaggcctggcattgcacatggtgttacatgggtacaagtaagnnnnnnnnnnnnnnnnnnnnnnnnnnnnnnnnnnnnnnnnnnnnnnnnnnnnnnnnnnnnnnnnnnnnnnnnnnnnnnnnnnnnnnnnnnnnnnnnnnnnnnnnnnnnnnnnnnnnnnnnnnnnnnnnnnnnnnnnnnnnnnnnnnnnnnnnnnnnnnnnnnnnnnnnnnnnnnnnnnnnnnnnnnnnnnnnnnnnnnnnnnnnnnnnnnnnnnnnnnnnnnnnnnnnnnnnnnnnnnnnnnnnnnnnnnnnnnnnnnnnnnnnnnnnnnnnnnnnnnnnnnnnnnnnnnnnnnnnnnnnnnnnnnnnnnnnnnnnnnntttggttaaatgttgatatgacgcaatgttttagaattactttaattgatggagtagtggtgctagagagaaattaataacaaaaagagtgaaaatattttaattagcagtagatggtgctactggctttcatttgctgacttgattattccctttcccttaaaaaccatggcattagactgcactaaaataacaagcacattagttgctggtagaggttttggaggttaatttagcttaaattggaagatttttaattgcagtctctacctttcctctgttagtcatttgtaaattctaaatggtcaccataaaatgtattaggtaggagatgatatgttttgtgtataatatatctcagactgagttactgcctggcttatcagtatggataaaacactacaatctcttatcaggaaatagagatgatgcggatatttatgtattacatatataaccaccagactccattttatgtattagcattttctttgcttaaggaaaaatagcaaaacaacatttcatttatacttttgtttacccctctctgagagaggttttgataaccactgaaatggtagaatatgtgagatacaaatattgagttgtagaacttactttgtaagatgaataagtcatgccttaacatccaaatgagagttgatcttcagagtggttcttttgggaacactgtttgttccagctatactgcaaaagtgtaatgtttttggaactcttctagagcatgacgtgaaaagcagttttttattatgcaggaaaatcaatttcatcattttagttgcaccaaacacttttggcagcttatatgaccnnnnnnnnnnnnnnnnnnnnnnnnnnnnnnnnnnnnnnnnnnnnnnnnnnnnnnnnnnnnnnnnnnnnnnnnnnnnnnnnnnnnnnnnnnnnnnnnnnnnnnnnnnnnnnnnnnnnnnnnnnnnnnnnnnnnnnnnnnnagatggagtcttgctctgttgcccagagctggagtgcagtggcacgatctcagctcactgcaagctccgccgcctcccgggttcacgccattctcctgcctcagcctcacaagtcactggggattacaggctcccaccaccacacctcactaatttttgtatttttagtagagacagggttttaccatattggccaggctgatctcaaactcctgtcttctggtgatcctcctgcctcagcttcccaaagtgctgggattacaggcgtgagccaccatagccagccagtatgacctatcttaatcatcagctcaactgtaatttaaacttggctcttttctgagagggaaaccattagggaagttcaaagaaaagtgccataatttccgaatttgcacaagagaatgttttaagccattggtagcatcattgaataaaataatagtttcctgatgtcactatttnnnnnnnnnnnnnnnnnnnnnnnnnnnnnnnnnnnnnnnnnnnnnnnnnnnnnnnnnnnnnnnnnnnnnnnnnnnnnnnnnnnnnnnnnnnnnnnnnnnnnnnnnnnnnnnnnnnnnnnnnnnnnnnnnnnnnnnnnnnnnnnnnnnnnnnnnnnnnnnnnnnnnnnnnnnnnnnnnnnnnnnnnnnnnnnnnnnnnnnnnnnnnnnnnnnnnnnnnnnnnnnnnnnnnnnnnnnnnnnnnnnnnnnnnnnnnnnnnnnnnnnnnnnnnnnnnnnnnnnnnnnnnnnnnnnnnnnnnnnnnnnnnnnnnnnnnnnnnnnnnnnnnnnnnnnnnnnnnnnnnnnnnnnnnnnnnnnnnnnnnnnnnnnnnnnnnnnnnnnnnnnnnnnnnnnnnnnnnnnnnnnnnnnnnnnnnnnnnnnnnnnnnnnnnnnnnnnnnnnnnnnnnnnnnnnnnnnnnnnnnnnnnnnnnnnnnnnnnnnnnnnnnnnnnnnnnnnnnnnnnnnnnnnnnnnnnnnnnnnnnnnnnnnnnnnnnnnnnnnnnnnnnnnnnnnnnnnnnnnnnnnnnnnnnnnnnnnnnnnnnnnnnnnnnnnnnnnnnnnnnnnnnnnnnnnnnnnnnnnnnnnnnnnnnnnnnnnnnnnnnnnnnnnnnnnnnnnnnnnnnnnnnnnnnnnnnnnnnnnnnnnnnnnnnnnnnnnnnnnnnnnnnnnnnnnnnnnnnnnnnnnnnnnnnnnnnnnnnnnnnnnnnnnnnnnnnnnnnnnnnnnnnnnnnnnnnnnnnnnnnnnnnnnnnnnnnnnnnnnnnnnnnnnnnnnnnnnnnnnnnnnnnnnnnnnnnnnnnnnnnnnnnnnnnnnnnnnnnnnnnnnnnnnnnnnnnnnnnnnnnnnnnnnnnnnnnnnnnnnnnnnnnnnnnnnnnnnnnnnnnnnnnnnnnnnnnnnnnnnnnnnnnnnnnnnnnnnnnnnnnnnnnnnnnnnnnnnnnnnnnnnnnnnnnnnnnnnnnnnnnnnnnnnnnnnnnnnnnnnnnnnnnnnnnnnnnnnnnnnnnnnnnnnnnnnnnnnnnnnnnnnnnnnnnnnnnnnnnnnnnnnnnnnnnnnnnnnnnnnnnnnnnnnnnnnnnnnnnnnnnnnnnnnnnnnnnnnnnnnnnnnnnnnnnnnnnnnnnnnnnnnnnnnnnnnnnnnnnnnnnnnnnnnnnnnnnnnnnnnnnnnnnnnnnnnnnnnnnnnnnnnnnnnnnnnnnnnnnnnnnnnnnnnnnnnnnnnnnnnnnnnnnnnnnnnnnnnnnnnnnnnnnnnnnnnnnnnnnnnnnnnnnnnnnnnnnnnnnnnnnnnnnnnnnnnnnnnnnnnnnnnnnnnnnnnnnnnnnnnnnnnnnnnnnnnnnnnnnnnnnnnnnnnnnnnnnnnnnnnnnnnnnnnnnnnnnnnnnnnnnnnnnnnnnnnnnnnnnnnnnnnnnnnnnnnnnnnnnnnnnnnnnnnnnnnnnnnnnnnnnnnnnnnnnnnnnnnnnnnnnnnnnnnnnnnnnnnnnnnnnnnnnnnnnnnnnnnnnnnnnnnnnnnnnnnnnnnnnnnnnnnnnnnnnnnnnnnnnnnnnnnnnnnnnnnnnnnnnnnnnnnnnnnnnnnnnnnnnnnnnnnnnnnnnnnnnnnnnnnnnnnnnnnnnnnnnnnnnnnnnnnnnnnnnnnnnnnnnnnnnnnnncagtatatatgagaacacttaaaattcaaatagaaatcattttctgaagacaaaagcagaggaatattgtcagtaccaagtaatgtaagaataagggcagcatttacactgtacaagtattgaggagagtgcataaagacagggaactactctcatggagacagtttttctcttataatgaagtagaaggggaaaaatcgtctaagttatgaaattcaacataggcgctatattacaaactgtgccagattatgcaaattgtgattgtcactgatcaaagtttaatcgcttcatttttgtttaaaaagggatactgaatgtcagaaaatctgtaatatgttttattcaaaagatgtaaataatgtatacagacttgtatgtgatgggatgggaaatatttaaattctaggtgtttgttttttttaaaagaagaaactcaatgtttttaagaaaaaaatgaataaatagttatgtttggccatgaa

SEQ ID NO: 29039 - DNA, 135 bp, Macaca Mulatta
  misc_feature (1)...(135): n = A,T,C or G
cctcagcctacctgaaacagaacaagtaccaacaatgcggaagagctgtacaaagaaatcctccacaaggaggatctacctgcccctctcggtgnggtgcccccaacacaggcacagctggtgacacataacagg

SEQ ID NO: 29040 - DNA, 695 bp, Macaca Mulatta
tgtcaccattgtcatgagtggcttttctgtccaattcccttcaaggtatatgattccagcatccttgctcagccctagagcaagtgctctccgtgcagtacagtgtgataacccccctgctgaaccccctcatctacagtctgaagaaccaggaggtaaaggtggctctggggaggatgctggccaggaagtccaggcttcccttgtagcccaatgcccctgcctcagcaggaggaaaagtaatggggaaaaaggacggaggaagagctatcaccactcagctacctcagcattcatctctctccaaaacagagaccttagtttctcttcctccaatgccctgctctcagccaaaggcaatgaggaaactgtcacagagcaggtaacacccatcagatggggcccagtcattatacaagaaaattctcagggcatccctggccatttctatagctaatgctttttcctctcatttcttgcctgtttttacctctcttcttcctgcctctccctctgccttttacttatgtctatgcacaaaaggtaaatcaacctatcagaccactagcaaatgtccttctgcattcttggatagtcccatcttggcactgtgacccaactcctcttttgttctcatgccaaaaagtccttttaaagatctacatcccataacatcttagaaagaaatcaaatag

SEQ ID NO: 29041 - DNA, 1061 bp, Macaca Mulatta
  misc_feature (1)...(1061): n = A,T,C or G
agaagaacccatttcctactcctggcttaaacctttgctttcttatttccagctcacagctttaagtcttttgtagttaaaggacacttatccnatttttccacctccttggagaacacagccctccagtgtctcctgcagcctggagcctgtaacattctggaagcatggaaggcgtggacttgctagggtttctcatcatcacactaaattgcaacgtgaccatggtggnggaaagctctggttcgtcctcacgatgctgctacggatgctggtgatcgtcttggcggggcgccccgtctaccaggacgagcaggagagatttgtctgcaacacgctgcagccgggatgcgccaacgtttgctatgacgtcttcttccccgtgtctcacctgcggttctggctgatccagggcgtgtgcgtcctcctcccctccgctgtcttcagcgtctatgtcctgcaccgaggagccacgctagccgcgctaggcccccgccgctgccccgaaccccgggacacggcctccgggcagagacgctgcccggggtcctgcagggagcgcggcggcctcgaggtgcccgacttctcggccggctacatcatccacctcctcctccggaccctgctggaggcagccttcggggccttgaactaccttctctttgggttcctggccccaaataagttcccttgcacgcgtcctccgtgcacgggcgtggtggactgctacgtgtcgcggcccacggagaagtccctgctgatgctgttcctctgggcggtcagcgcactgtctttcctgctgggcctcgcggacctggtctgcagcctgcggcggcggatgcgcaggaggcccggacccccgacgagcccctccatccggaagcagagcggagcccctggccaccccgagggacgcccgacggacaaggagggtgggcgggagcaagagggggcacctgcgcccccggttgcacgcgccggaggggagggggccggcagccccagggttacatccagggtgtcagggcacacgaagattccggatgaggatgcgagtgagg

SEQ ID NO: 29042 - DNA, 11671 bp, Macaca Mulatta
  misc_feature (1)...(11671): n = A,T,C or G
gcctctggaggagcctaaggtgatctccgccttctctggaaagcaggccgggaagcacgtggtgcacatcgcttgcgggagcacttacagcgcggccatcacagccgagggggagctgtacacttggggccgcgggaactacggccggctgggccnnnnnnnnnnnnnnnnnnnnnnnnnnnnnnnnnnnnnnnnnnnnnnnnnnnnnnnnnnnnnnnnnnnnnnnnnnnnnnnnnnnnnnnnnnnnnnnnnnnnnnnnnnnnnnnnnnnnnnnnnnnnnnnnnnnnnnnnnnnnnnnnnnnnnnnnnnnnnnnnnnnnnnnnnnnnnnnnnnnnnnnnnnnnnnnnnnnnnnnnnnnnnnnnnnnnnnnnnnnnnnnnnnnnnnnnnnnnnnnnnnnnnnnnnnnnnnnnnnnnnnnnnnnnnnnnnnnnnnnnnnnnnnnnnnnnnnnnnnnnnnnnnnnnnnnnnnnnnnnnnnnnnnnnnnnnnnnnnnnnnnnnnnnnnnnnnnnnnnnnnnnnnnagggaagaaggtgattgatgcggctgccggctccacccactgcctggctctgactgaggacagcgaggtccacagctcagggagcaacgaccagtgccagcactttgacaccttgcgtgtgaccaagccagaacctgcagcattgccgggactggacaccaaacacacagtgggaattgcctgtgnnnnnnnnnnnnnnnnnnnnnnnnnnnnnnnnnnnnnnnnnnnnnnnnnnnnnnnnnnnnnnnnnnnnnnnnnnnnnnnnnnnnnnnnnnnnnnnnnnnnnnnnnnnnnnnnnnnnnnnnnnnnnnnnnnnnnnnnnnnnnnnnnnnnnnnnnnnnnnnnnnnnnnnnnnnnnnnnnnnnnnnnnnnnnnnnnnnnnnnnnnnnnnnnnnnnnnnnnnnnnnnnnnnnnnnnnnnnnnnnnnnnnnnnnnnnnnnnnnnnnnnnnnnnnnnnnnnnnnnnnnnnnnnnnnnnnnnnnnnnnnnnnnnnnnnnnnnnnnnnnnnnnnnnnnnnnnnnnnnnnnnnnnnnnnnnnnnnnnnnnnnnnnnnnnnnnnnnnnnnnnnnnnnnnnnnnnnnnnnnnnnnnnnnnnnnnnnnnnnnnnnnnnnnnnnnnnnnnnnnnnnnnnnnnnnnnnnnnnnnnnnnnnnnnnnnnnnnnnnnnnnnnnnnnnnnnnnnnnnnnnnnnnnnnnnnnnnnnnnnnnnnnnnnnnnnnnnnnnnnnnnnnnnnnnnnnnnnnnnnnnnnnnnnnnnnnnnnnnnnnnnnnnnnnnnnnnnnnnnnnnnnnnnnnnnnnnnnnnnnnnnnnnnnnnnnnnnnnnnnnnnnnnnnnnnnnnnnnnnnnnnnnnnnnnnnnnnnnnnnnnnnnnnnnnnnnnnnnnnnnnnnnnnnnnnnnnnnnnnnnnnnnnnnnnnnnnnnnnnnnnnnnnnnnnnnnnnnnnnnnnnnnnnnnnnnnnnnnnnnnnnnnnnnnnnnnnnnnnnnnnnnnnnnnnnnnnnnnnnnnnnnnnnnnnnnnnnnnnnnnnnnnnnnnnnnnnnnnnnnnnnnnnnnnnnnnnnnnnnnnnnnnnnnnnnnnnnnnnnnnnnnnnnnnnnnnnnnnnnnnnnnnnnnntccagagctaatgggcgttggttccttgctgaagaagtacacagcccttctgtgcacgcacattggagatatactgcctgtggcagccagcgttgcttctaccagctggcggcacttcgcagaggtggcttgcattgtggaaggggactttacnnnnnnnnnnnnnnnnnnnnnnnnnnnnnnnnnnnnnnnnnnnnnnnnnnnnnnnnnnnnnnnnnnnnnnnnnnnnnnnnnnnnnnnnnnnnnnnnnnnnnnnnnnnnnnnnnnnnnnnnnnnnnnnnnnnnnnnnnnnnnnnnnnnnnnnnnnnnnnnnnnnnnnnnnnnnnnnnnnnnnnnnnnnnnnnnnnnnnnnnnnnnnnnnnnnnnnnnnnnnnnnnnnnnnnnnnnnnnnnnnnnnnnnnnnnnnnnnnnnnnnnnnnnnnnnnnnnnnnnnnnnnnnnnnnnnnnnnnnnnnnnnnnnnnnnnnnnnnnnnnnnnnnnnnnnnnnnnnnnnnnnnnnnnnnnnnnnnnnnnnnnnnnnnnnnnnnnnnnnnnnnnnnnnnnnnnnnnnnnnnnnnnnnnnnnnnnnnnnnnnnnnnnnnnnnnnnnnnnnnnnnnnnnnnnnnnnnnnnnnnnnnnnnnnnnnnnnnnnnnnnnnnnnnnnnnnnnnnnnnnnnnnnnnnnnnnnnnnnnnnnnnnnnnnnnnnnnnnnnnnnnnnnnnnnnnnnnnnnnnnnnnnnnnnnnnnnnnnnnnnnnnnnnnnnnnnnnnnnnnnnnnnnnnnnnnnnnnnnnnnnnnnnnnnnnnnnnnnnnnnnnnnnnnnnnnnnnnnnnnnnnnnnnnnnnnnnnnnnnnnnnnnnnnnnnnnnnnnnnnnnnnnnnnnnnnnnnnnnnnnnnnnnnnnnnnnnnnnnnnnnnnnnnnnnnnnnnnnnnnnnnnnnnnnnnnnnnnnnnnnnnnnnnnnnnnnnnnnnnnnnnnnnnnnnnnnnnnnnnnnnnnnnnnnnnnnnnnnnnnnnnnnnnnnnnnnnnnnnnnnnnnnnnnnnnnnnnnnnnnnnnnnnnnnnnnnnnnnnnnnnnnnnnnnnnnnnnnnnnnnnnnnnnnnnnnnnnnnnnnnnnnnnnnnnnnnnnnnnnnnnnnnnnnnnnnnnnnnnnnnnnnnnnnnnnnnnnnnnnnnnnnnnnnnnnnnnnnnnnnnnnnnnnnnnnnnnnnnnnnnnnnnnnnnnnnnnnnnnnnnnnnnnnnnnnnnnnnnnnnnnnnnnnnnnnnnnnnnnnnnnnnnnnnnnnnnnnnnnnnnnnnnnnnnnnnnnnnnnnnnnnnnnnnnnnnnnnnnnnnnnnnnnnnnnnnnnnnnnnnnnnnnnnnnnnnnnnnnnnnnnnnnnnnnnnnnnnnnnnnnnnnnnnnnnnnnnnnnnnnnnnnnnnnnnnnnnnnnnnnnnnnnnnnnnnnnnnnnnnnnnnnnnnnnnnnnnnnnnnnnnnnnnnnnnnnnnnnnnnnnnnnnnnnnnnnnnnnnnnnnnnnnnnnnnnnnnnnnnnnnnnnnnnnnnnnnnnnnnnnnnnnnnnnnnnnnnnnnnnnnnnnnnnnnnnnnnnnnnnnnnnnnnnnnnnnnnnnnnnnnnnnnnnnnnnnnnnnnnnnnnnnnnnnnnnnnnnnnnnnnnnnnnnnnnnnnnnnnnnnnnnnnnnnnnnnnnnnnnnnnnnnnnnnnnnnnnnnnnnnnnnnnnnnnnnnnnnnnnnnnnnnnnnnnnnnnnnnnnnnnnnnnnnnnnnnnnnnnnnnnnnnnnnnnnnnnnnnnnnnnnnnnnnnnnnnnnnnnnnnnnnnnnnnnnnnnnnnnnnnnnnnnnnnnnnnnnnnnnnnnnnnnnnnnnnnnnnnnnnnnnnnnnnnnnnnnnnnnnnnnnnnnnnnnnnnnnnnnnnnnnnnnnnnnnnnnnnnnnnnnnnnnnnnnnnnnnnnnnnnnnnnnnnnnnnnnnnnnnnnnnnnnnnnnnnnnnnnnnnnnnnnnnnnnnnnnnnnnnnnnnnnnnnnnnnnnnnnnnnnnnnnnnnnnnnnnnnnnnnnnnnnnnnnnnnnnnnnnnnnnnnnnnnnnnnnnnnnnnnnnnnnnnnnnnnnnnnnnnnnnnnnnnnnnnnnnnnnnnnnnnnnnnnnnnnnnnnnnnnnnnnnnnnnnnnnnnnnnnnnnnnnnnnnnnnnnnnnnnnnnnnnnnnnnnnnnnnnnnnnnnnnnnnnnnnnnnnnnnnnnnnnnnnnnnnnnnnnnnnnnnnnnnnnnnnnnnnnnnnnnnnnnnnnnnnnnnnnnnnnnnnnnnnnnnnnnnnnnnnnnnnnnnnnnnnnnnnnnnnnnnnnnnnnnnnnnnnnnnnnnnnnnnnnnnnnnnnnnnnnnnnnnnnnnnnnnnnnnnnnnnnnnnnnnnnnnnnnnnnnnnnnnnnnnnnnnnnnnnnnnnnnnnnnnnnnnnnnnnnnnnnnnnnnnnnnnnnnnnnnnnnnnnnnnnnnnnnnnnnnnnnnnnnnnnnnnnnnnnnnnnnnnnnnnnnnnnnnnnnnnnnnnnnnnnnnnnnnnnnnnnnnnnnnnnnnnnnnnnnnnnnnnnnnnnnnnnnnnnnnnnnnnnnnnnnnnnnnnnnnnnnnnnnnnnnnnnngaagccgaacaaactgaaaggaacattcaccccactgcaatgatgtttaccagcactattaacttactgcagactctttgtctgtctgccggagttcatgccgagatcatgcagagcgaagccaccaagactttgtgcggactgctgcgaatgttagtggaaagcggaacgacggacaagacannnnnnnnnnnnnnnnnnnnnnnnnnnnnnnnnnnnnnnnnnnnnnnnnnnnnnnnnnnnnnnnnnnnnnnnnnnnnnnnnnnnnnnnnnnnnnnnnnnnnnnnnnnnnnnnnnnnnnnnnnnnnnnnnnnnnnnnnnnnnnnnnnnnnnnnnnnnnnnnnnnnnnnnnnnnnnnnnnnnnnnnnnnnnnnnnnnnnnnnnnnnnnnnnnnnnnnnnnnnnnnnnnnnnnnnnnnnnnnnnnnnnnnnnnnnnnnnnnnnnnnnnnnnnnnnnnnnnnnnnnnnnnnnnnnnnnnnnnnnnnnnnnnnnnnnnnnnnnnnnnnnnnnnnnnnnnnnnnnnnnnnnnnnnnnnnnnnnnnnnnnnnnnnnnnnnnnnnnnnnnnnnnnnnnnnnnnnnnnnnnnnnnnnnnnnnnnnnnnnnnnnnnnnnnnnnnnnnnnnnnnnnnnnnnnnnnnnnnnnnnnnnnnnnnnnnnnnnnnnnnnnnnnnnnnnnnnnnnnnnnnnnnnnnnnnnnnnnnnnnnnnnnnnnnnnnnnnnnnnnnnnnnnnnnnnnnnnnnnnnnnnnnnnnnnnnnnnnnnnnnnnnnnnnnnnnnnnnnnnnnnnnnnnnnnnnnnnnnnnnnnnnnnnnnnnnnnnnnnnnnnnnnnnnnnnnnnnnnnnnnnnnnnnnnnnnnnnnnnnnnnnnnnnnnnnnnnnnnnnnnnnnnnnnnnnnnnnnnnnnnnnnnnnnnnnnnnnnnnnnnnnnnnnnnnnnnnnnnnnnnnnnnnnnnnnnnnnnnnnnnnnnnnnnnnnnnnnnnnnnnnnnnnnnnnnnnnnnnnnnnnnnnnnnnnnnnnnnnnnnnnnnnnnnnnnnnnnnnnnnnnnnnnnnnnnnnnnnnnnnnnnnnnnnnnnnnnnnnnnnnnnnnnnnnnnnnnnnnnnnnnnnnnnnnnnnnnnnnnnnnnnnnnnnnnnnnnnnnnnnnnnnnnnnnnnnnnnnnnnnnnnnnnnnnnnnnnnnnnnnnnnnnnnnnnnnnnnnnnnnnnnnnnnnnnnnnnnnnnnnnnnnnnnnnnnnnnnnnnnnnnnnnnnnnnnnnnnnnnnnnnnnnnnnnnnnnnnnnnnnnnnnnnnnnnnnnnnnnnnnnnnnnnnnnnnnnnnnnnnnnnnnnnnnnnnnnnnnnnnnnnnnnnnnnnnnnnnnnnnnnnnnnnnnnnnnnnnnnnnnnnnnnnnnnnnnnnnnnnnnnnnnnnnnnnnnnnnnnnnnnnnnnnnnnnnnnnnnnnnnnnnnnnnnnnnnnnnnnnnnnnnnnnnnnnnnnnnnnnnnnnnnnnnnnnnnnnnnnnnnnnnnnnnnnnnnnnnnnnnnnnnnnnnnnnnnnnnnnnnnnnnnnnnnnnnnnnnnnnnnnnnnnnnnnnnnnnnnnnnnnnnnnnnnnnnnnnnnnnnnnnnnnnnnnnnnnnnnnnnnnnnnnnnnnnnnnnnnnnnnnnnnnnnnnnnnnnnnnnnnnnnnnnnnnnnnnnnnnnnnnnnnnnnnnnnnnnnnnnnnnnnnnnnnnnnnnnnnnnnnnnnnnnnnnnnnnnnnnnnnnnnnnnnnnnnnnnnnnnnnnnnnnnnnnnnnnnnnnnnnnnnnnnnnnnnnnnnnnnnnnnnnnnnnnnnnnnnnnnnnnnnnnnnnnnnnnnnnnnnnnnnnnnnnnnnnnnnnnnnnnnnnnnnnnnnnnnnnnnnnnnnnnnnnnnnnnnnnnnnnnnnnnnnnnnnnnnnnnnnnnnnnnnnnnnnnnnnnnnnnnnnnnnnnnnnnnnnnnnnnnnnnnnnnnnnnnnnnnnnnnnnnnnnnnnnnnnnnnnnnnnnnnnnnnnnnnnnnnnnnnnnnnnnnnnnnnnnnnnnnnnnnnnnnnnnnnnnnnnnnnnnnnnnnnnnnnnnnnnnnnnnnnnnnnnnnnnnnnnnnnnnnnnnnnnnnnnnnnnnnnnnnnnnnnnnnnnnnnnnnnnnnnnnnnnnnnnnnnnnngctttcagtgccaatggaaaagatatcattgtcgactttccccagcagtctcactggactgggttgctgtcagaaatggagttggtccccagtattcatcctggggttacgtgngtgtgatggatgtcatatgtttcctatcaatggatccagattcaaatgcagaaactgtgatgactttgatttttgtgaaacgtgtttcaagaccaaaaaacacaataccaggcacacatttggcagaatcaatgaaccaggtnnnnnnnnnnnnnnnnnnnnnnnnnnnnnnnnnnnnnnnnnnnnnnnnnnnnnnnnnnnnnnnnnnnnnnnnnnnnnnnnnnnnnnnnnnnnnnnnnnnnnnnnnnnnnnnnnnnnnnnnnnnnnnnnnnnnnnnnnnnnnnnnnnnnnnnnnnnnnnnnnnnnnnnnnnnnnnnnnnnnnnnnnnaaagcactggattcgtttggagattttcccagatgttcttgttcataggttaaaaatgatcgtagatcctgctgacagtagctacatgccgtccctggtggtagtgtcaggnnnnnnnnnnnnnnnnnnnnnnnnnnnnnnnnnnnnnnnnnnnnnnnnnnnnnnnnnnnnnnnnnnnnnnnnnnnnnnnnnnnnnnnnnnnnnnnnnnnnnnnnnnnnnnnnnnnnnnnnnnnnnnnnnnnnnnnnnnnnnnnnnnnnnnnnnnnnnnnnnnnnnnnnnnnnnnnnnnnnnnnnnnnnnnnnnnnnnnnnnnnnnnnnnnnnnnnnnnnnnnnnnnnnnnnnnnnnnnnnnnnnnnnnnnnnnnnnnnnnnnnnnnnnnnnnnnnnnnnnnnnnnnnnnnnnnnnnnnnnnnnnnnnnnnnnnnnnnnnnnnnnnnnnnnnnnnnnnnnnnnnnnnnnnnnnnnnnnnnnnnnnnnnnnnnnnnnnnnnnnnnnnnnnnnnnnnnnnnnnnnnnnnnnnnnnnnnnnnnnnnnnnnnnnnnnnnnnnnnnnnnnnnnnnnnnnnttgcagtgactgtggaagggaaggtgtacgcctgtggagaagccacgaatggccggctggggctgggcatttccagcgggacggtgcccatcccacggcagatcacagctctcagcagctacgtggtgaagaaggtggctgttcactcaggnnnnnnnnnnnnnnnnnnnnnnnnnnnnnnnnnnnnnnnnnnnnnnnnnnnnnnnnnnnnnnnnnnnnnnnnnnnnnnnnnnnnnnnnnnnnnnnnnnnnnnnnnnnnnnnnnnnnnnnnnnnnnnnnnnnnnnnnnnnnnnnnnnnnnnnnnnnnnnnnnnnnnnnnnnnnnnnnnnnnnnnnnnnnnnnnnnnnnnnnnnnnnnnnnnnnnnnnnnnnnnnnnnnnnnnnnnnnnnnnnnnnnnnnnnnnnnnnnnnnnnnnnnnnnnnnnnnnnnnnnnnnnnnnnnnnnnnnnnnnnnnnnnnnnnnnnnnnnnnnnnnnnnnnnnnnnnnnnnnnnnnnnnnnnnnnnnnnnnnnnnnnnnnnnnnnnnnnnnnnnnnnnnnnnnnnnnnnnnnnnnnnnnnnnnnnnnnnnnnnnnnnnnnnnnnnnnnnnnnnnnnnnnnnnnnnnnnnnnnnnnnnnnnnnnnnnnnnnnnnnnnnnnnnnnnnnnnnnnnnnnnnnnnnnnnnnnnnnnnnnnnnnnnnnnnnnnnnnnnnnnnnnnnnnnnnnnnnnnnnnnnnnnnnnnnnnnnnnnnnnnnnnnnnnnnnnnnnnnnnnnnnnnnnnnnnnnnnnnnnnnnnnnnnnnnnnnnnnnnnnnnnnnnnnnnnnnnnnnnnnnnnnnnnnnnnnnnnnnnnnnnnnnnnnnnnnnnnnnnnnnnnnnnnnnnnnnnnnnnnnnnnnnnnnnnnnnnnnnnnnnnnnnnnnnnnnnnnnnnnnnnnnnnnnnnnnnnnnnnnnnnnnnnnnnnnnnnnnnnnnnnnnnnnnnnnnnnnnnnnnnnnnnnnnnnnnnnnnnnnnnnnnnnnnnnnnnnnnnnnnnnnnnnnnnnnnnnnnnnnnnnnnnnnnnnnnnnnnnnnnnnnnnnnnnnnnnnnnnnnnnnnnnnnnnnnnnnnnnnnnnnnnnnnnnnnnnnnnnnnnnnnnnnnnnnnnnnnnnnnnnnnnnnnnnnnnnnnnnnnnnnnnnnnnnnnnnnnnnnnnnnnnnnnnnnnnnnnnnnnnnnnnnnnnnnnnnnnnnnnnagagatgccgttgtcggggccctgatgccagctgccatgattgccccggtggagtgcccctcgttctcctccgcggccccttccgacgcatctgccatggctagtcccatgaatggagaagaatgcatgctggcggttgatatggaagacaggctgagtccaaatccgtggcaagaaaagagagagnnnnnnnnnnnnnnnnnnnnnnnnnnnnnnnnnnnnnnnnnnnnnnnnnnnnnnnnnnnnnnnnnnnnnnnnnnnnnnnnnnnnnnnnnnnnnnnnnnnnnnnnnnnnnnnnnnnnnnnnnnnnnnnnnnnnnnnnnnnnnnnnnnnnnnnnnnnnnnnnnnnnnnnnnnnnnnnnnnnnnnnnnnnnnnnnnnnnnnnnnnnnnnnnnnnnnnnnnnnnnnnnnnnnnnnnnnnnnnnnnnnnnnnnnnnnnnnnnnnnnnnnnnnnnnnnnnnnnnnnnnnnnnnnnnnnnnnnnnnnnnnnnnnnnnnnnnnnnnnnnnnnnnnnnnnnnnnnnnnnnnnnnnnnnnnnnnnnnnnnnnnnnnnnnnnnnnnnnnnnnnnnnnnnnnnnnnnnnnnnnnnnnnnnnnnnnnnnnnnnnnnnnnnnnnnnnnnnnnnnnnnnnnnnnnnnnnnnnnnnnnnnnnnnnnnnnnnnnnnnnnnnnnnnnnnnnnnnnnnnnnnnnnnnnnnnnnnnnnnnnnnnnnnnnnnnnnnnnnnnnnnnnnnnnnnnnnnnnnnnnnnnnnnnnnnnnnnnnnnnnnnnnnnnnnnnnnaggccgagagtggtccgactggtccagtgagctgcgcatcccgggggatgagttaaagtggaagttcatcagcgatgggtctgtgaatggctggggctggcgcttcaccgtctatcccatcatgccagctgctgnnnnnnnnnnnnnnnnnnnnnnnnnnnnnnnnnnnnnnnnnnnnnnnnnnnnnnnnnnnnnnnnnnnnnnnnnnnnnnnnnnnnnnnnnnnnnnnnnnnnnnnnnnnnnnnnnnnnnnnnnnnnnnnnnnnnnnnnnnnnnnnnnnnnnnnnnnnnnnnnnnnnnnnnnnnnnnnnnnnnnnnnnnnnnnnnnnnnnnnnnnnnnnnnnnnnnnnnnnnnnnnnnnnnnnnnnnnnnnnnnnnnnnnnnnnnnnnnnnnnnnnnnnnnnnnnnnnnnnnnnnnnnnnnnnnnnnnnnnnnnnnnnnnnnnnnnnnnnnnnnnnnnnnnnnnnnnnnnnnnnnnnnnnnnnnnnnnnnnnnnnnnnnnnnnnnnnnnnnnnnnnnnnnnnnnnnnnnnnnnnnnnnnnnnnnnnnnnnnnnnnnnnnnnnnnnnnnnnnnnnnnnnnnnnnnnnnnnnnnnnnnnnnnnnnnnnnnnnnnnnnnnnnnnnnnnnnnnnnnnnnnnnnnnnnnnnnnnnnnnnnnnnnnnnnnnnnnnnnnnnnnnnnnnnnnnnnnnnnnnnnnnnnnnnnnnnnnnnnnnnnnnnnnnnnnnnnnnnnnnnnnnnnnnnnnnnnnnnnnnnnnnnnnnnnnnnnnnnnnnnnnnnnnnnnnnnnnnnnnnnnnnnnnnnnnnnnnnnnnnnnnnnnnnnnnnnnnnnnnnnnnnnnnnnnnnnnnnnnnnnnnnnnnnnnnnnnnnnnnnnnnnnnnnnnnnnnnnnnnnnnnnnnnnnnnnnnnnnnnnnnnnnnnnnnnnnnnnnnnnnnnnnnnnnnnnnnnnnnnnnnnnnnnnnnnnnnnnnnnnnnnnnnnnnnnnnnnnnnnnnnnnnnnnnnnnnnnnnnnnnnnnnnnnnnnnnnnnnnnnnnnnnnnnnnnnnnnnnnnnnnnnnnnnnnnnnnnnnnnnnnnnnnnnnnnnnnnnnnnnnnnnnnnnnnnnnnnnnnnnnnnnnnnnnnnnnnnnnnnnnnnnnnnnnnnnnnnnnnnnnnnnnnnnnnnnnnnnnnnnnnnnnnnnnnnnnnnnnnnnnnnnnnnnnnnnnnnnnnnnnnnnnnnnnnnnnnnnnnnnnnnnnnnnnnnnnnnnnnnnnnnnnnnnnnnnnnnnnnnnnnnnnnnnnnnnnnnnnnnnnnnnnnnnnnnnnnnnnnnnnnnnnnnnnnnnnnnnnnnnnnnnnnnnnnnnnnnnnnnnnnnnnnnnnnnnnnnnnnnnnnnnnnnnnnnnnnnnnnnnnnnnnnggtggaggcgctgcagggccaccgtgtggtagacatcgcctgtggcagcggagacgcccagaccctctgcctcacggacgacgacactgtctggtcctggggggacggggactacggcaagcttggccgaggaggcagcgatggctgtaaagtgccaatgaannnnnnnnnnnnnnnnnnnnnnnnnnnnnnnnnnnnnnnnnnnnnnnnnnnnnnnnnnnnnnnnnnnnnnnnnnnnnnnnnnnnnnnnnnnnnnnnnnnnnnnnnnnnnnnnnnnnnnnnnnnnnnnnnnnnnnnnnnnnnnnnnnnnnnnnnnnnnnnnnnnnnnnnnnnnnnnnnnnnnnnnnnnnnnnnnnnnnnnnnnnnnnnnnnnnnnnnnnnnnnnnnnnnnnnnnnnnnnnnnnnnnnnnnnnnnnnnnnnnnnnnnnnnnnnnnnnnnnnnnnnnnnnnnnnnnnnnnnnnnnnnnnnnnnnnnnnnnnnnnnnnnnnnnnnnnnnnnnnnnnnnnnnnnnnnnnnnnnnnnnnnnnnnnnnnnnnnnnnnnnnnnnnnnnnnnnnnnnnnnnnnnnnnnnnnnnnnnnnnnnnnnnnnnnnnnnnnnnnnnnnnnnnnnnnnnnnnnnnnnnnnnnnnnnnnnnnnnnnnnnnnnnnnnnnnnnnnnnnnnnnnnnnnnnnnnnnnnnnnnnnnnnnnnnnnnnnnnnnnnnnnnnnnnnnnnnnnnnnnnnnnnnnnnnnnnnnnnnnnnnnnnnnnnnnnnnnnnnnnnnnnnnnnnnnnnnnnaggaggcagctttccgaaaagtagtgcaagcaaccatggtgcgcgatcgtcagcacggtcccgttgtggagctgaaccgcatccagg

SEQ ID NO: 29043 - DNA, 6947 bp, Macaca Mulatta
  misc_feature (1)...(6947): n = A,T,C or G
gtacgtcacagagtttgtggacctgggcaatgtctcggcattgagaacattcagagttctccgagcattgaagacaatntcagtcattccagnnnnnnnnnnnnnnnnnnnnnnnnnnnnnnnnnnnnnnnnnnnnnnnnnnnnnnnnnnnnnnnnnnnnnnnnnnnnnnnnnnnnnnnnnnnnnnnnnnnnnnnnnnnnnnnnnnnnnnnnnnnnnnnnnnnnnnnnnnnnnnnnnnnnnnnnnnnnnnnnnnnnnnnnnnnnnnnnnnnnnnnnnnnnnnnnnnnnnnnnnnnnnnnnnnnnnnnnnnnnnnnnnnnnnnnnnnnnnnnnnnnnnnnnnnnnnnnnnnnnnnnnnnnnnnnnnnnnnnnnnnnnnnnnnnnnnnnnnnnnnnnnnnnnnnnnnnnnnnnnnnnnnnnnnnnnccagtgtccagagggatatgtgtgtgtgaaagctggtagaaatcccaattatggctacacaagctttgataccttcagttgggcttttttgtccttgtttcgactaatgactcaggacttctgggaaaatctttatcaactggacattacgtgctgctgggaaaacatacatgatattttttgtgttggtcattttcttgggctcattctacctaataaatttgatcctggctgtggtggccatggcctatgaggaacagaatcaggccaccttggaagaagcagaacagaaagaggccgaatttcagcagatgatcgaacagcttaaaaagcaacaggaggcagctcannnnnnnnnnnnnnnnnnnnnnnnnnnnnnnnnnnnnnnnnnnnnnnnnnnnnnnnnnnnnnnnnnnnnnnnnnnnnnnnnnnnnnnnnnnnnnnnnnnnnnnnnnnnnnnnnnnnnnnnnnnnnnnnnnnnnnnnnnnnnnnnnnnnnnnnnnnnnnnnnnnnnnnnnnnnnnnnnnnnnnnnnnnnnnnnnnnnnnnnnnnnnnnnnnnnnnnnnnnnnnnnnnnnnnnnnnnnnnnnnnnnnnnnnnnnnnnnnnnnnnnnnnnnnnnnnnnnnnnnnnnnnnnnnnnnnnnnnnnnnnnnnnnnnnnnnnnnnnnnnnnnnnnnnnnnnnnnnnnnnnnnnnnnnnnnnnnnnnnnnnnnnnnnnnnnnnnnnnnnnnnnnnnnnnnnnnnnnnnnnnnnnnnnnnnnnnnnnnnnnnnnnnnnnnnnnnnnnnnnnnnnnnnnnnnnnnnnnnnnnnnnnnnnnnnnnnnnnnnnnnnnnnnnnnnnnnnnnnnnnnnnnnnnnnnnnnnnnnnnnnnnnnnnnnnnnnnnnnnnnnnnnnnnnnnnnnnnnnnnnnnnnnnnnnnnnnnnnnnnnnnnnnnnnnnnnnnnnnnnnnnnnnnnnnnnnnnnnnnnnnnnnnnnnnnnnnnnnnnnnnnnnnnnnnnnnnnnnnnnnnnnnnnnnnnnnnnnnnnnnnnnnnnnnnnnnnnnnnnnnnnnnnnnnnnnnnnnnnnnnnnnnnnnnnnnnnnnnnnnnnnnnnnnnnnnnnnnnnnnnnnngaacttgaagaatccaggcagaaatgcccaccctgttggtataaattttccaacatattcttaatctgggactgttctccatattggttaaaagtgaaacatgttgtcaacctggtcgtgatggacccatttgttgacctggccatcaccatctgtattgtcttaaatacccttttcatggccatggagcactatccaatgacggaccatttcaataatgtgcttacagtaggaaatttggtnnnnnnnnnnnnnnnnnnnnnnnnnnnnnnnnnnnnnnnnnnnnnnnnnnnnnnnnnnnnnnnnnnnnnnnnnnnnnnnnnnnnnnnnnnnnnnnnnnnnnnnnnnnnnnnnnnnnnnnnnnnnnnnnnnnnnnnnnnnnnnnnnnnnnnnnnnnnnnnnnnnnnnnnnnnnctgcgagttttcaagttggcaaaatcttggccaacgttaaatatgctaataaagattattggcaattccgtgggggctctgggaaatttaacccttgtgttggccatcatcgtcttcatttttgccgtggttggcatgcagctctttggtaaaagctacaaagattgtgtctgcaagatcgccagtgattgtcaactcccacgctggcacatgaatgacttcttccactccttcctgattgtgttccgcgtgctgtgtggggagtggatagagaccatgtgggactgtatggaggttgctggtcaagccatgtgccttactgtcttcatgatggtcatggtgattggaaacctagtggtnnnnnnnnnnnnnnnnnnnnnnnnnnnnnnnnnnnnnnnnnnnnnnnnnnnnnnnnnnnnnnnnnnnnnnnnnnnnnnnnnnnnnnnnnnnnnnnnnnnnnnnnnnnnnnnnnnnnnnnnnnnnnnnnnnnnnnnnnnnnnnnnnnnnnnnnnnnnnnnnnnnnnnnnnnnnnnnnnnnnnnnnnnnnnnnnnnnnnnnnnnnnnnnnnnnnnnnnnnnnnnnnnnnnnnnnnnnnnnnnnnnnnnnnnnnnnnnnnnnnnnnnnnnnnnnnnnnnnnnnnnnnnnnnnnnnnnnnnnnnnnnnnnnnnnnnnnnnnnnnnnnnnnnnnnnnnnnnnnnnnnnnnnnnnnnnnnnnnnnnnnnnnnnnnnnnnnnnnnnnnnnnnnnnnnnnnnnnnnnnnnnnnnnnnnnnnnnnnnnnnnnnnnnnnnnnnnnnnnnnnnnnnnnnnnnnnnnnnnnnnnnnnnnnnnnnnnnnnnnnnnnnnnnnnnnnnnnnnnnnnnnnnnnnnnnnnnnnnnnnnnnnnnnnnnnnnnnnnnnnnnnnnnnnnnnnnnnnnnnnnnnnnnnnnnnnnnnnnnnnnnnnnnnnnnnnnnnnnnnnnnnnnnnnnnnnnnnnnnnnnnnnnnnnnnnnnnnnnnnnnnnnnnnnnnnnnnnnnnnnnnnnnnnnnnnnnnnnnnnnnnnnnnnnnnnnnnnnnnnnnnnnnnnnnnnnnnnnnnnnnnnnnnnnnnnnnnnnnnnnnnnnnnnnnnnnnnnnnnnnnnnnnnnnnnnnnnnnnnnnnnnnnnnnnnnnnnnnnnnnnnnnnnnnnnnnnnnnnnnnnnnnnnnnnnnnnnnnnnnnnnnnnnnnnnnnnnnnnnnnnnnnnnnnnnnnnnnnnnnnnnnnnnnnnnnnnnnnnnnnnnnnnnnnnnnnnnnnnnnnnnnnnnnnnnnnnnnnnnnnnnnnnnnnnnnnnnnnnnnnnnnnnnnnnnnnnnnnnnnnnnnnnnnnnnnnnnnnnnnnnnnnnnnnnnnnnnnnnnnnnnnnnnnnnnnnnnnnnnnnnnnnnnnnnnnnnnnnnnnnnngaatgcccttttaggagcaattccatccatcatgaatgtgcttctggtttgtcttatattctggctaattttcagcatcatgggcgtaaatttgtttgctggcaaattctaccactgtattaacaccacaactggtgacaggtttgacatcgaagacgtgaataatcatactgattgcctaaaactaatagaaagaaatgagactgctcgatggaaaaatgtgaaagtaaactttgataatgtaggatttgggtatctctctttgcttcaagttggccacatttaaaggatggatggatataatgtatgcagcagttgattccagaaatgnnnnnnnnnnnnnnnnnnnnnnnnnnnnnnnnnnnnnnnnnnnnnnnnnnnnnnnnnnnnnnnnnnnnnnnnnnnnnnnnnnnnnnnnnnnnnnnnnnnnnnnnnnnnnnnnnnnnnnnnnnnnnnnnnnnnnnnnnnnnnnnnnnnnnnnnnnnnnnnnnnnnnnnnnnnnnnnnnnnnnnnnnnnnnnnnnnnnnnnnnnnnnnnnnnnnnnnnnnnnnnnnnnnnnnnnnnnnnnnnnnnnnnnnnnnnnnnnnnnnnnnnnnnnnnnnnnnnnnnnnnnnnnnnnnnnnnnnnnnnnnnnnnnnnnnnnnnnnnnnnnnnnnnnnnnnnnnnnnnnnnnnnnnnnnnnnnnnnnnnnnnnnnnnnnnnnnnnnnnnnnnnnnnnnnnnnnnnnnnnnnnnnnnnnnnnnnnnnnnnnnnnnnnnnnnnnnnnnnnnnnnnnnnnnnnnnnnnnnnnnnnnnnnnnnnnnnnnnnnnnnnnnnnnnnnnnnnnnnnnnnnnnnnnnnnnnnnnnnnnnnnnnnnnnnnnnnnnnnnnnnnnnnnnnnnnnnnnnnnnnnnnnnnnnnnnnnnnnnnnnnnnnnnnnnnnnnnnnnnnnnnnnnnnnnnnnnnnnnnnnnnnnnnnnnnnnnnnnnnnnnnnnnnnnnnnnnnnnnnnnnnnnnnnnnnnnnnnnnnnnnnnnnnnnnnnnnnnnnnnnnnnnnnnnnnnnnnnnnnnnnnnnnnnnnnnnnnnnnnnnnnnnnnnnnnnnnnnnnnnnnnnnnnnnnnnnnnnnnnnnnnnnnnnnnnnnnnnnnnnnnnnnnnnnnnnnnnnnnnnnnnnnnnnnnnnnnnnnnnnnnnnnnnnnnnnnnnnnnnnnnnnnnnnnnnnnnnnnnnnnnnnnnnnnnnnnnnnnnnnnnnnnnnnnnnnnnnnnnnnnnnnnnnnnnnnnnnnnnnnnnnnnnnnnnnnnnnnnnnnnnnnnnnnnnnnnnnnnnnnnnnnnnnnnnnnnnnnnnnnnnnnnnnnnnnnnnnnnnnnnnnnnnnnnnnnnnnnnnnnnnnnnnnnnnnnnnnnnnnnnnnnnnnnnnnnnnnnnnnnnnnnnnnnnnnnnnnnnnnnnnnnnnnnnnnnnnnnnnnnnnnnnnnnnnnnnnnnnnnnnnnnnnnnnnnnnnnnnnnnnnnnnnnnnnnnnnnnnnnnnnnnnnnnnnnnnnnnnnnngctcattgctatggatttgcccatggtgagtggtgaccggatccactgtcttgatatcttatttgcttttacaaagcgggttctaggagagagtggagagatggatgctctacgaatacagatggaagagcgattcatggcttccaatccttccaaggtctcctatcagccaatcactactactttaaaacgaaagcaagaggaagtatctgctgttattattcagcgtgcttacagacgccaccttttaaagcgaactgtaaaacaagcttcctttacatacaataaaaacaaaatcaaaggtggggctaatcttataaaagaagacatgataattgacagaataaatgaaaactctattacagaaaaaactgatctgaccatgtccactgcagcttgtccaccttcctatgaccgggtgacaaagccaattgtggaaaaannnnnnnnnnnnnnnnnnnnnnnnnnnnnnnnnnnnnnnnnnnnnnnnnnnnnnnnnnnnnnnnnnnnnnnnnnnnnnnnnnnnnnnnnnnnnnnnnnnnnnnnnnnnnnnnnnnnnnnnnnnnnnnnnnnnnnnnnnnnnnnnnnnnnnnnnnnnnnnnnnnnnnnnnnnnnnnnnnnnnnnnnnnnnnnnnnnnnnnnnnnnnnnnnnnnnnnnnnnnnnnnnnnnnnnnnnnnnnnnnnnnnnnnnnnnnnnnnnnnnnnnnnnnnnnnnnnnnnnnnnnnnnnnnnnnnnnnnnnnnnnnnnnnnnnnnnnnnnnnnnnnnnnnnnnnnnnnnnnnnnnnnnnnnnnnnnnnnnnnnnnnnnnnnnnnnnnnnnnnnnnnnnnnnnnnnnnnnnnnnnnnnnnnnnnnnnnnnnnnnnnnnnnnnnnnnnnnnnnnnnnnnnnnnnnnnnnnnnnnnnnnnnnnnnnnnnnnnnnnnnnnnnnnnnnnnnnnnnnnnnnnnnnnnnnnnnnnnnnnnnnnnnnnnnnnnnnnnnnnnnnnnnnnnnnnnnnnnnnnnnnnnnnnnnnnnnnnnnnnnnnnnnnnnnnnnnnnnnnnnnnnnnnnnnnnnnnnnnnnnnnnnnnnnnnnnnnnnnnnnnnnnnnnnnnnnnnnnnnnnnnnnnnnnnnnnnnnnnnnnnnnnnnnnnnnnnnnnnnnnnnnnnnnnnnnnnnnnnnnnnnnnnnnnnnnnnnnnnnnnnnnnnnnnnnnnnnnnnnnnnnnnnnnnnnnnnnnnnnnnnnnnnnnnnnnnnnnnnnnnnnnnnnnnnnnnnnnnnnnnnnnnnnnnnnnnnnnnnnnnnnnnnnnnnnnnnnnnnnnnnnnnnnnnnnnnnnnnnnnnnnnnnnnnnnnnnnnnnnnnnnnnnnnnnnnnnnnnnnnnnnnnnnnnnnnnnnnnnnnnncctgcactttgtttagccatctttggctctcagcaaggttgacactgtatatgttaaggaaatgctatttattatgtaaatagtcattttgccctgtggtgcacgtttgagcaaaaaaataatgacctaagcacagtatttattgcatcaaatatgtaccacaagaaatgtagagtgcaagctttacacaggtaataaaatgtattctgtaccatttatagatagtttggatgctatcaatgcatgtttatattaccgtgctgctgtatctggtttctctccctgctcagaatcttatttatgagaaaccatatgtcagtggtaaagtcaaggaaattgttcaacagatctcatttatttaagtcattaagcaatagtttgcagcactttaacagctttttggttatttttacattttaagtggataacatatggtatatagccagactgtacagacatgtttaaaaaaccacactgcttaacctgttaaaaatgtgtttagaattttacaagcaaatataaatactgtaaaaagtcattttatttttcagcattatgtacataaatatgaagaggaaattatcttcaggttgatatcacaatcacttttcttactttctgtccatagtactttttcacgaaagaaatttgctaaataaga

SEQ ID NO: 29044 - DNA, 701 bp, Macaca Mulatta
aaaaagctctcgcactggtattgatcttgaacctctatacttctccactttttagagcggcgtcttagtttaagcgcttaacatcttccaccgcaacagcttgcctctagagggggagttttcatccatttgtcctccagttttatagaaacaagagactattaaagcctattgctttatctgttctctgtagggttcaggtacactggctaaggcagaaccccaaattccaaggctctttctatcaatattggacctctgggagttagtactcctctttgctcaccaccatgtgctcagttgatcagatgtggtgagtgagtaggggactcgacttgcgggatgcagttttgccattgcagcaaagttcattgaggaaaattgtaccatgaaaaagcgttttgattatttcatttctgggggatgaccttgagggaagctttttaatattagtttcaagctttccttatcctacaactttaaacaaaagctttaattttgtttgcactcctgttttgagcttgtaactggaaaagcatgtcttgcactgttcaacctcctaagtggtcactttaacaacctccaaattgtgcacagtggttattttccccagttgtatatttttgagacattcaattatcactgtcttagttgtattttaatttacttaaattatgtagctgtttgacaagttcttttaa

SEQ ID NO: 29045 - DNA, 532 bp, Macaca Mulatta
aaaattcacacagaaaaattccgtttggtagactccttccaatgaaatctcaggaataattaaactctatggggactttcttaaaaataactagagggacttattttcctcttttttatgttttagactgtagataatttattaaaattctttaataataggaaaaggggaaagtatttattgtacattattttcatagattaaataaatgtctttataatatgaaaacgagtgtttgtgttgggacttaacctctttccccgcggccccaaggccggtccttacacctccagcacctgtgcgaagttgattcggttcagcggcccatgtggcagcaaagcctcctgggccggcgaagtccgggtggtacaaaggtgacccgattgatggccgcttcgcccacggctccggcaagagtcgggagtttgcaggaagctcggtcacctccctgcccctcagcagagggcctctggtcctgagcgggtggtcctggggcctctgcttagaaataaaggtgggcaggtggagggag

SEQ ID NO: 29046 - DNA, 3230 bp, Macaca Mulatta
  misc_feature (1)...(3230): n = A,T,C or G
gtactgatgcttatagatgccagctttgggttcgaaatggaaacatttgaatttctaaacatctgtcaagtacatggctttcctaaaattatgggagttctcacccacctcgactccttcaagcataataagcaactggaagataacaaagaagcgattaaaacacaggttctggacagaagtttacccggnnggtgccaagctgttctacctttctggaatggtgcatggagaatatcaaaaccaagaaatccacaatctgggccgttttattacagttatgaagtttaggcctctcacatggcaaacttctcacccttatgtcctggcagacaggnnnnnnnnnnnnnnnnnnnnnnnnnnnnnnnnnnnnnnnnnnnnnnnnnnnnnnnnnnnnnnnnnnnnnnnnnnnnnnnnnnnnnnnnnnnnnnnnnnnnnnnnnnnnnnnnnnnnnnnnnnnnnnnnnnnnnnnnnnnnnnnnnnnnnnnnnnnnnnnnnnnnnnnnnnnnnnnnnnnnnnnnnnnnnnnnnnnnnnnnnnnnnnnnnnnnnnnnnnnnnnnnnnnnnnnnnnnnnnnnnnnnnnnnnnnnnnnnnnnnnnnnnnnnnnnnnnnnnnnnnnnnnnnnnnnnnnnnnnnnnnnnnnncaggacgaggtggggcccacccatgagctggtccagagtctcatctccaccatctccaccattgatgccaagatggcttcaagtcgagtgacactgttttctgattccaagccacttgggtcagaggatatagataatcaaggnnnnnnnnnnnnnnnnnnnnnnnnnnnnnnnnnnnnnnnnnnnnnnnnnnnnnnnnnnnnnnnnnnnnnnnnnnnnnnnnnnnnnnnnnnnnnnnnnnnnnnnnnnnnnnnnnnnnnnnnnnnnnnnnnnnnnnnnnnnnnnnnnnnnnnnnnnnnnnnnnnnnnnnnnnnnnnnnnnnnnnnnnnnnnnnnnnnnnnnnnnnnnnnnnnnnnnnnnnnnnnnnnnnnnnnnnnnnnnnngaagaagacagtgaaatggatttgccagcatttgctgacagtgatgatgaccttgagaggagctcagcggaagaaggggaagcagaggaagctgatgaaagcagtgaagaagaggactgcactgcaggagaggggggcatttcaggatcaaaggctgttggagaaggtagtaaagcagggctgtcgccagctaatcgccagagtgaccatgtgaatctggagaagtctttgctgatgaagaaagcagctctccccacttccgattctgggcattgcacagctgaagaggcgtttgcatctgaagatgaatctgaagaaagctcctcactcgttgcagaggaagaggactcagaaaatgaagaggctattagaaaaaagctttcaaagccttctcaagtgagcagtggtcagaaactggggccaaggaacttaattgatgagaccagtgatatagaagatttactcaaagaggaagaagattacaaggaagaaaataatgattccaaagaaacctcagntcaggtgccctcaagtggaaggaagacctttccagaagggcagctgaggcctttctgaggcagcagcaagcagctcccaacctccgaaagcttgtttacgggacagnnnnnnnnnnnnnnnnnnnnnnnnnnnnnnnnnnnnnnnnnnnnnnnnnnnnnnnnnnnnnnnnnnaccagcctgacagagagtggaagcacaaggctgactctttggaccactccagatttcttgtggaggccccccatgactgggatttagaggnnnnnnnnnnnnnnnnnnnnnnnnnnnnnnnnnnnnnnnnnnnnnnnnnnnnnnnnnnnnnnnnnnnnnnnnnnnnnnnnnnnnnnnnnnnnnnnnnnnnnnnnnnnnnnnnnnnnnnnnnnnnnnnnnnnnnnnnnnnnnnnnnnnnnnnnnnnnnnnnnnnnnnnnnnnnnnnnnnnnnnnnnnnnnnnnnnnnnnnnnnnnnnnnnnnnnnnnnnnnnnnnnnnnnnnnnnnnnnnnnnnnnnnnnnnnnnnnnnnnnnnnnnnnnnnnnnnnnnnnnnnnnnnnnnnnnnnnnnnnnnnnnnnnnnnnnnnnnnnnnnnnnnnnnnnnagctgaatcgcgcagaatttgaagatcaagatgatgaagccagagttcagtatgagggttttcgacctgggatgtacgtccgcgttgagattgaaaatgttccctgtgaatttgtgcagaactttgacccccattactccattatcctgggtggcttgggcaacagtgagggaaatgttggatacgtgcannnnnnnnnnnnnnnnnnnnnnnnnnnnnnnnnnnnnnnnnnnnnnnnnnnnnnnnnnnnnnnnnnnnnnnnnnnnnnnnnnnnnnnnnnnnnnnnnnnnnnnnnnnnnnnnnnnnnnnnnnnnnnnnnnnnnnnnnnnnnnnnnnnnnnnnnnnnnnnnnnnnnnnnnnnnnnnnnnnnnnnnnnnnnnnnnnnnnnnnnnnnnnnnnnnnnnnnnnnnnnnnnnnnnnnnnnnnnnnnnnnnnnnnnnnnnnnnnnnnnnnnnnnnnnnnnnnnnnnnnnnnnnnnnnnnnnnnnnnnnnnnnnnnnnnnnnnnnnnnnnnnnnnnnnnnnnnnnnnnnnnnnnnnnnnnnnnnnnnnnnnnnnnnnnnnnnnnnnnnnnnnnnnnnnnnnnnnnnnnnnnnnnnnnnnnnnnnnnnnnnnnnnnnnnnnnnnnnnnnnnnnnnnnnnnnnnnnnnnnnnnnnnnnnnnnnnnnnnnnnnnnnnnnnnnnnnnnnnnnnnnnnnnnnnnnnnnnnnnnnnnnnnnnnnnnnnnnnnnnnnnnnnnnnnnnnnnnnnnnnnnnnnnnnnnnnnnnnnnnnnnnnnnnnnnnnnnnnnnnnnnnnnnnnnnnnnnnnnnnnnnnnnnnnnnnnnnnnnnnnnnnnnnnnnnnnnnnnnnnnnnnnnnnnnnnnnnnnnnnnnnnnnnnnnnnnnnnnnnnnnnnnnnnnnnnnnnattcactgcagattccaaaagcctcgcagaaggccctgccatttaagaacaagcccaagacccaagcaaaggcaggcaaggtgccgaagaacaggtggagaccggccgtcatacgcgagcctcatgaaaganagatcctcgcactgctggatgctctgagtacggtgcacagtcagaagatgaaga

SEQ ID NO: 29047 - DNA, 840 bp, Macaca Mulatta
ggggcttctgcaacaggcgtgggtcacgctctcgctcgctctctttctgccgccatcttggttctgcgttccctgaacaaaatgcccggagaagccacagaaaccgtccctgctacagagcaggagttgccgcagccccaggctgagacagggtctggaacagaatctgatagtgatgaatcagtaccagagcttgaagaacaggattccacccaggcaaccacacaacaagcccagctggcggcagcagctgaaattgatgaagaaccagtcagtaaagcaaaacagagtcggagtgaaaagaaggcacggaaggctatgtccaatgtggtgtcttcgacaggttacaggagttactagagtcactatccggaaatcaaagaatatcctctttgtcatcacaaaaccagatgtcatataaatcccctgcttcagatacttaaatagttttttggggaagcccaaatcgaagatttatcccagcaagcacaactagcatcttcttgaaaaatttaaagttcaaagtgaagctgtttccaacatttcaaaaaaacacacagacttccaactttaaaaaaaggagaattaaaaaagaaaaaagttcgaataacacaaggtgtacaaattttaaagaacattaaaaattggatcatggtcacaaagcaaaaagtggttctaaagctaaaaggaaattctttagcctattaaaaaaccaaacaacaaatgaaaattgataaaaatagcaaataatgtgaaatatataacaatggttaaccaatcttataaacacaaacttttatattgggggctcttccaaaggcattaaaccactcaatctcg

SEQ ID NO: 29048 - DNA, 454 bp, Macaca Mulatta
  misc_feature (1)...(454): n = A,T,C or G
gacttttagaggaggggagtttggaaattgtaaaatgttatagattgttgcctatttcctgctgaaagtaaatgtttttaaaaattatcatataaagctgaatacaagttagttttgggggagatcctttcctacccaaagtcgtaaatatattctttactgccttatagaaatttatacttttgcctttcacatttgtctttactctgtcctgaactgatttttgtgaaaattatgagttagaaattcaatttaacatttttcatatttcaaagtggttgtctctgcactatttactgaaaagttcatcctttccccagtgatttgtaacactgcctctttcataaattaaattattgtgtacnnnnnnnnnnnnnnnnnnnnnnnnnnnnnnnnnnnnnnnnnnnnnnnnnnnnnnnnnnnnnnnnnnnnnnnnnnnnnnnnnnnnnnnnna

SEQ ID NO: 29049 - DNA, 712 bp, Macaca Mulatta
  misc_feature (1)...(712): n = A,T,C or G
tatcatgtgctggtgtggcagccccagctaagttaatccccactgctttncagtggtagaaagaatccctgagtgggccaggctggtgtcctcctcccacccttgcttttctgagtgagctgcctggagccctcatcccctctctcaggctgggctggccctgggcggggcccctgtgtgcttgtccactgtgacctgacccgaccttgtgcagccccctgccctggtgtcccgggtttttgtgatgatctttgctctgtttccagtggggtttgaagcatagttcagggaaccctgcccaaggccctcctgttgagacattcctatgttgaataaagtatgtttgactcccnnnnnnnnnnnnnnnnnnnnnnnnnnnnnnnnnnnnnnnnnnnnnnnnnnnnnnnnnnnnnnnnnnnnnnnnnnnnnnnnnnnnnnnnnnnnnnnnnnnnnnnnnnnnnnnnnnnnnnnnnnnnnnnnnnnnnnnnnnnnnnnnnnnnnnnnnnnnnnnnnnnnnnnnnnnnnnnnnnnnnnnnnnnnnnnnnnnnnnnnnnnnnnnnnnnnnnnnnnnnnnnnnnnnnnnnnnnnnnnnnnnnnnnnnnnnnnnnnnnnnnnnnnnnnnnnnnnnnnnnnnnnnnnnnnnnnnnnnnnnnnnnnnnnnnnnnnnnnnnnnnnnnnnnnnnnnnnnnnnnnnnnnnnnnnnnnnnnnnnn

SEQ ID NO: 29050 - DNA, 3073 bp, Macaca Mulatta
  misc_feature (1)...(3073): n = A,T,C or G
cagctttcatgttacagacccagcaccttgttctacctctggagtcacagctggattaactaaattaactacaagaaaggacaactataatgcagagagagagtttttacagggtgctactataacagaggcttgcgatggcagtgatgatatttttgggttgagtactgatagtctgtctcgtttacgaagcccatctgttttggaagttagagaaaagggctatgaacgattaaaagaagaactcgcaaaagctcagaggnnnnnnnnnnnnnnnnnnnnnnnnnnnnnnnnnnnnnnnnnnnnnnnnnnnnnnnnnnnnnnnnnnnnnnnnnnnnnnnnnnnnnnnnnnnnnnnnnnnnnnnnnnnnnnnnnnnnnnnnnnnnnnnnnnnnnnnnnnnnnnnnnnnnnnnnnnnnnnnnnnnnnnnnnnnnnnnnnnnnnnnnnnnnnnnnnnnnnnnnnnnnnnnnnnnnnnnnnnnnnnnnnnnnnnnnnnnnnnnnnnnnnnnnnnnnnnnnnnnnnnnnnnnnnnnnnnnnnnnnnnnnnnnnnnnnnnnnnnnnnnnnnnnnnnnnnnnnnnnnnnnnnnnnnnnnnnnnnnnnnnnnnnnnnnnnnnnnnnnnnnnnnnnnnnnnnnnnnnnnnnnnnnnnnnnnnnnnnnnnnnnnnnnnnnnnnnnnnnnnnnnnnnnnnnnnnnnnnnnnnnnnnnnnnnnnnnnnnnnnnnnnnnnnnnnnnnnnnnnnnnnnnnnnnnnnnnnnnnnnnnnnnnnnnnnnnnnnnnnnnnnnnnnnnnnnnnnnnnnnnnnnnnnnnnnnnnnnnnnnnnnnnnnnnnnnnnnnnnnnnnnnnnnnnnnnnnnnnnnnnnnnnnnnnnnnnnnnnnnnnnnnnnnnnnnnnnnnnnnnnnnnnnnnnnnnnnnnnnnnnnnnnnnnnnnnnnnnnnnnnnnnnnnnnnnnnnnnnnnnnnnnnnnnnnnnnnnnnnnnnnnnnnnnnnnnnnnnnnnnnnnnnnnnnnnnnnnnnnnnnnnnnnnnnnnnnnnnnnnnnnnnnnnnnnnnnnnnnnnnnnnnnnnnnnnnnnnnnnnnnnnnnnnnnnnnnnnnnnnnnnnnnnnnnnnnnnnnnnnnnnnnnnnnnnnnnnnnnnnnnnnnnnnnnnnnnnnnnnnnnnnnnnnnnnnnnnnnnnnnnnnnnnnnnnnnnnnnnnnnnnnnnnnnnnnnnnnnnnnnnnnnnnnnnnnnnnnnnnnnnnnnnnnnnnnnnnnnnnnnnnnnnnnnnnnnnnnnnnnnnnnnnnnnnnnnnnnnnnnnnnnnnnnnnnnnnnnnnnnnnnnnnnnnnnnnnnnnnnnnnnnnnnnnnnnnnnnnnnnnnnnnnnnnnnnnnnnnnnnnnnnnnnnnnnnnnnnnnnnnnnnnnnnnnnnnnnnnnnnnnnnnnnnnnnnnnnnnnnnnnnnnnnnnnnnnnnnnnnnnnnnnnnnnnnnnnnnnnnnnnnnnnnnnnnnnnnnnnnnnnnnnnnnnnnnnnnnnnnnnnnnnnnnnnnnnnnnnnnnnnnnnnnnnnnnnnnnnnnnnnnnnnnnnnnnnnnnnnnnnnnnnnnnnnnnnnnnnnnnnnnnnnnnnnnnnnnnnnnnnnnnnnnnnnnnnnnnnnnnnnnnnnnnnnnnnnnnnnnnnnnnnnnnnnnnnnnnnnnnnnnnnnnnnnnnnnnnnnnnnnnnnnnnnnnnnnnnnnnnnnnnnnnnnnnnnnnnnnnnnnnnnnnnnnnnnnnnnnnnnnnnnnnnnnnnnnnnnnnnnnnnnnnnnnnnnnnnnnnnnnnnnnnnnnnnnnnnnnnnnnnnnnnnnnnnnnnnnnnnnnnnnnnnnnnnnnnnnnnnnnnnnnnnnnnnnnnnnnnnnnnnnnnnnnnnnnnnnnnnnnnnnnnnnnnnnnnnnnnnnnnnnnnnnnnnnnnnnnnnnnnnnnnnnnnnnnnnnnnnnnnnnnnnnnnnnnnnnnnnnnnnnnnnnnnnnnnnnnnnnnnnnnnnnnnnnnnnnnnnnnnnnnnnnnnnnnnnnnnnnnnnnnnnnnnnnnnnnnnnnnnnnnnnnnnnnnnnnnnnnnnnnnnnnnnnnnnnnnnnnnnnnnnnnnnnnnnnnnnnnnnnnnnnnnnnnnnnnnnnnnnnnnnnnnnnnnnnnnnnnnnnnnnnnnnnnnnnnnnnnnnnnnnnnnnnnnnnnnnnnnnnnnnnnnnnnnnnnnnnnnnnnnnnnnnnnnnnnnnnnnnnnnnnnnnnnnnnnnnnnnnnnnnnnnnnnnnnnnnnnnnnnnnnnnnnnnnnnnnnnnnnnnnnnnnnnnnnnnnnnnnnnnnnnnnnnnnnnnnnnnnnnnnnnnnnnnnnnnnnnnnnnnnnnnnnnnnnnnnnnnnnnnnnnnnnnnnnnnnnnnnnnnnnnnnnnnnnnnnnnnnnnnnnnnnnnnnnnnnnnnnnnnnnnnnnnnnnnnnnnnnnnnnnnnnnnnnnnnnnnnnnnnnnnnnnnnnnnnnnnnnnnnnnnnnnnnnnnnnnnnnnnnnnnnnnnnnnnnnnnnnnnnnnnnnnnnnnnnnnnnnnnnnnnnnnnnnnnnnnnnnnnnnnnnnnnnnnnnnnnnnnnnnnnnnnnnnnnnnnnnnnnnnnnnnnnnnnnnnnnnnnnnnnnnnnnnnnnnnnnnnnnnnnnnnnnnnnnnnnnnnnnnnnnnnnnnnnnnnnnnnnnnnnnnnnnnnnnnnnnnnnnnnnnnnnnnnnnnnnnnnnnnnnnnnnnnnnnnnnnnnnnnnnnnnnnnnnnnnnnnnnnnnnnnnnnnnnnnnnnnnnnnnnnnnnnnnnnnnnnnnnnnnnnnnnnnnnnnnnnnnnnnnnnnnnnnnnnnnnatgactgaaaaaggataaataaaaagtacgattaaagaaaatcattatacccattaataataaatctttactattctataaggggaagaatgcttttcaaccttatgcactagaaacatgctctttaaaattaatacaacaggatgatgacttgatgtagaaaatatatgtggaattatagattaaaatgtaattgaaatatatttagaaaa

SEQ ID NO: 29051 - DNA, 746 bp, Macaca Mulatta
  misc_feature (1)...(746): n = A,T,C or G
ggatttcaaagttcaaaaaaacagaggctgcaaaattcattttataatggctattttgtgatgataagacgtagttcacgtttttctgtagcactgggcccaaatattctttgtaaagaaaatcactgcagcaaaaattgttactgtgtttattatgtttgtagaagtattagaaaaatattctatttcttattcagtgctacataatgacccatggtagccaacctgacaaaagacaggttttcacaaattgaggtggaggtgggcagttcggtatctgccattggactggattataaactgtatttgaatatcagtggtgttatcttttaagttgtcagcaagttaccaagtattcgttaaagaaattgtgatatcaaattactgtttattcataacaattgatttgatgctaataataattttctttaaacgctaccattcattatgtggtaactgtattggacttactttatttggattttattttaatgtgactagatgtcaccacttgaaaaaatcaatttgttcttagaacctggttgaaaacaccaggagactgttacagatgtcaaantnnnnnntnnntnttnnnnttgagacggagtctctnnnnnnnnnnnnnnnnnnnatgcaatggcgcnnnnnnnnnnnnnnnnnnactctgactcctgggttcacgccattctgccacctcagctnnnnnnnnnnnnnnnnnngcaagtgtctgccaccatgcctggcta

SEQ ID NO: 29052 - DNA, 182 bp, Macaca Mulatta
gcttctgatgagcagaactcacagtcctcgatggaacatttgatgaacagctcagagaaagtagatcggcagccgtctggagactcgggtctggccgcagagtcgtctgcaatctctcaggtacctcgctcgaggtctcagaggggcagccagatcggccgggagcccattgggttgttggg

SEQ ID NO: 29053 - DNA, 1136 bp, Macaca Mulatta
  misc_feature (1)...(1136): n = A,T,C or G
aggccatggaggcacagatacagaactttggacagacgccatctcagttgcttattgagccacatccgcctcggagctctgccatgcacctgnnnnnnnnnnnnnnnnnnnnnnnnnnnnnnnnnnnnnnnnnnnnnnnnnnnnnnnnnnnnnnnnnnnnnnnnnnnnnnnnnnnnnnnnnnnnnnnnnnnnnnnnnnnnnnnnnnnnnnnnnnnnnnnnnnnnnnnnnnnnnnnnnnnnnnnnnnnnnnnnnnnnnnnnnnnnnnnnnnnnnnnnnnnnnnnnnnnnnnnnnnnnnnnnnnnnnnnnnnnnnnnnnnnnnnnnnnnnnnnnnnnnnnnnnnnnnnnnnnnnnnnnnnnnnnnnnnnnnnnnnnnnnnnnnnnnnnnnnnnnnnnnnnnnnnnnnnnnnnnnnnnnnnnnnnnnnnnnnnnnnnnnnnnnnnnnnnnnnnnnnnnnnnnnnnnnnnnnnnnnnnnnnnnnnnnnnnnnnnnnnnnnnnnnnnnnnnnnnnnnnnnnnnnnnnnnnnnnnnnnnnnnnnnnnnnnnnnnnnnnnnnnnnnnnnnnnnnnnnnnnnnnnnnnnnnnnnnnnnnnnnnnnnnnnnnnnnnnnnnnnnnnnnnnnnnnnnnnnnnnnnnnnnnnnnnnnnnnnnnnnnnnnnnnnnnnnnnnnnnnnnnnnnnnnnnnnnnnnnnnnnnnnnnnnnnnnnnnnnnnnnnnnnnnnnnnnnnnnnnnnnnnnnnnnnnnnnnnnnnnnnnnnnnnnnnnnnnnnnnnnnnnnnnnnnnnnnnnnnnnnnnnnnnnnnnnnnnnnnnnnnnnnnnnnnnnnnnnnnnnnnnnnnnnnnnnnnnnnnnnnnnnnnnnnnnnnnnnnnnnnnnnnnnnnnnnnnnnnnnnnnnnnnnnnnnnnnnnnnnnnnnnnnnnnnnnnnnnnnnnnnnnnnnnnnnnnnnnnnnnnnnnnnnnnnnnnnnnnnnnnnnnnnnnnnggccattctcctgagcagtgatggccagaacctggtcaccggaggggacaatggggtagtagaggtctggcaggcctgtgacttcaagcaactgtacatttaccctggatgtgatgctggcattagagcaatggacttgtcccatgaccagagg

SEQ ID NO: 29054 - DNA, 2238 bp, Macaca Mulatta
  misc_feature (1)...(2238): n = A,T,C or G
ggtaatagatgcatattatttcttttatttaaaagaaatgaatgtgactagtattgcattaagagctgaaacctggcttttagctacatggcatgttaaagtacctccgatgtggctggaagcttgtattaactggattcaagaagaaaataataatgttaacttgagtcaggcccaaannnnnnnnnnnnnnnnnnnnnnnnnnnnnnnnnnnnnnnnnnnnnnnnnnnnnnnnnnnnnnnnnnnnnnnnnnnnnnnnnnnnnnnnnnnnnnnnnnnnnnnnnnnnnnnnnnnnnnnnnnnnnnnnnnnnnnnnnnnnnnnnnnnnnnnnnnnnnnnnnnnnnnnnnnnnnnnnnnnnnnnnnnnnnnnnnnnnnnnnnnnnnnnnnnnnnnnnnnnnnnnnnnnnnnnnnnnnnnnnnnnnnnnnnnnnnnnnnnnnnnnnnnnnnnnnnnnnnnnnnnnnnnnnnnnnnnnnnnnnnnnnnnnnnnnnnnnnnnnnnnnnnnnnnnnnnnnnnnnnnnnnnnnnnnnnnnnnnnnnnnnnnnnnnnnnnnnnnnnnnnnnnnnnnnnnnnnnnnnnnnnnnnnnnnnnnnnnnnnnnnnnnnnnnnnnnnnnnnnnnnnnnnnnnnnnnnnnnnnnnnnnnnnnnnnnnnnnnnnnnnnnnnnnnnnnnnnnnnnnnnnnnnnnnnnnnnnnnnnnnnnnnnnnnnnnnnnnnnnnnnnnnnnnnnnnnnnnnnnnnnnnnnnnnnnnnnnnnnnnnnnnnnnnnnnnnnnnnnnnnnnnnnnnnnnnnnnnnnnnnnnnnnnnnnnnnnnnnnnnnnnnnnnnnnnnnnnnnnnnnnnnnnnnnnnnnnnnnnnnnnnnnnnnnnnnnnnnnnnnnnnnnnnnnnnnnnnnnnnnnnnnnnnnnnnnnnnnnnnnnnnnnnnnnnnnnnnnnnnnnnnnnnnnnnnnnnnnnnnnnnnnnnnnnnnnnnnnnnnnnnnnnnnnnnnnnnnnnnnnnnnnnnnnnnnnnnnnnnnnnnnnnnnnnnnnnnnnnnnnnnnnnnnnnnnnnnnnnnnnnnnnnnnnnnnnnnnnnnnnnnnnnnnnnnnnnnnnnnnnnnnnnnnnnnnnnnnnnnnnnnnnnnnnnnnnnnnnnnnnnnnnnnnnnnnnnnnnnnnnnnnnnnnnnnnnnnnnnnnnnnnnnnnnnnnnnnnnnnnnnnnnnnnnnnnnnnnnnnnnnnnnnnnnnnnnnnnnnnnnnnnnnnnnnnnnnnnnnnnnnnnnnnnnnnnnnnnnnnnnnnnnnnnnnnnnnnnnnnnnnnnnnnnnnnnnnnnnnnnnnnnnnnnnnnnnnnnnnnnnnnnnnnnnnnnnnnnnnnnnatattagatagagaggtggtcaattatgtacagaaaaggagttcacaaatttctaatgaaaatgatcgtcatttacagacttgttctttaagattaccagagaatagcattaatttttctattgccatggatttgtattctccaccctttatctatttgtctgttctactggccagcaaaccaaaggaagttacaacagtgaaagtgaaagcatttattgtaaccttaactggaaatctctcaagttccggtggcatttggagtataactgcaaaggtgtctgatggtactgcgtatctagatgtagacttcgtggatgaaatactgactagcctgatagggttctctgtaccagaaatgaaacagttaaaaaaggatcctcttcaataccaaaagttcctggaaggtttgcagaaatgtcagagagatctaatagatttgtgctgtataatgactatttcatttaatccttccttgtctaaagcaatggtactggcattacaaaatgttaatacggaacaccttgagaatctaaagaagcggttaaataaataagttaactaaaatagtattaggaacaattaaaaacaacaaggaaatatttagaatttgttcacaattttacttgtgagactttgtgtaaaaaggaaagatgaaattacataacttagtttaattttaaagtgtttaatcatgtttgttatatgtggagctttttaacataagttaatnnnnnnnnnnnnnnnnnnnnnncagggtcttgctttgttgcccaggctggagtgcagtggcatgatcatagttattgcactgacctcctgagctcaagcaatcctcctgccttagcctcttgagttgctgggactctaggcatatacc

SEQ ID NO: 29055 - DNA, 241 bp, Macaca Mulatta
ctttcaaaaccatcgagctacagatgaagaagaaggggttcaaaatggaagtgggacaatacatttttgtcaagtgccccaaggtgtccaagctggagtggcaccctttcacactgacatctgcccctgaggaagacttctttagtatccatatccgcatcgttggggactggacagaggggctgttcaatgcttgtggctgtgataagcaggagtttcaagatgcgtggaaactacctaa

SEQ ID NO: 29056 - DNA, 889 bp, Macaca Mulatta
  misc_feature (1)...(889): n = A,T,C or G
tgccaggtctgagtcggcggctgcacggcggatgagaccggtgctactcatgaaggtgttcgtcacccgcaggataccccccgagggcagggccgcgctcgcccgggcggcagannnnnnnnnnnnnnnnnnnnnnnnnnnnnnnnnnnnnnnnnnnnnnnnnnnnnnnnnnnnnnnnnnnnnnnnnnnnnnnnnnnnnnnnnnnnnnnnnnnnnnnnnnnnnnnnnnnnnnnnnnnnnnnnnnnnnnnnnnnnnnnnnnnnnnnnnnnnnnnnnnnnnnnnnnnnnnnnnnnnnnnnnnnnnnnnnnnnnnnnnnnnnnnnnnnnnnnnnnnnnnnnnnnnnnnnnnnnnnnnnnnnnnnnnnnnnnnnnnnnnnnnnnnnnnnnnnnnnnnnnnnnnnnnnnnnnnnnnnnnnnnnnnnnnnnnnnnnnnnnnnnnnnnnnnnnnnnnnnnnnnnnnnnnnnnnnnnnnnnnnnnnnnnnnnnnnnnnnnnnnnnnnnnnnnnnnnnnnnnnnnnnnnnnnnnnnnnnnnnnnnnnnnnnnnnnnnnnnnnnnnnnnnnnnnnnnnnnnnnnnnnnnnnnnnnnnnnnnnnnnnnnnnnnnnnnnnnnnnnnnnnnnnnnnnnnnnnnnnnnnnnnnnnnnnnnnnnnnnnnnnnnnnnnnnnnnnnnnnnnnnnnnnnnnnnnnnnnnnnnnnnnnnnnnnnnnnnnnnnnnnnnnnnnnnnnnnnnnnnnnnnnnnnnnnnnnnnnnnnnnncaggggcgacgttgtaaaccaggacgacctgtaccaggccttggccagtggtcagatcgcagctgctggactggatgtgacgaccccagaaccactgcctacaaaccaccctcttctgaccctgaagaactgt

SEQ ID NO: 29057 - DNA, 301 bp, Macaca Mulatta
taatggccatttgaactgagacaagaaagcatgactttgcattgcagctggctgctgttgataaaaatccctcatccctttgaacgttaaatttaaagactaagaaagcatttccaagtggagtgcttcatgtctgtctctcaggattcccacagctggtcccgggcatgcctgtctgatggtctcattcgaggaaaactgcctttcaccattgctgcagacagaaaaatataaatgagccccttgtttggtttaagacacagagacatttgaatatgtacagaggatccacttggtgctt

SEQ ID NO: 29058 - DNA, 888 bp, Macaca Mulatta
ggcccttgtgttttccctctctcctactggttattcttgaattaagcacagactcgtcagctcggctgctttatcatgaataatgtgtgtgaccttgcagttcttccacagttcagcaaacaagtgctagcttcactgaccaaaaattaaggaaggaaaacacagttttttaaaacgatccatcttttaacagccgaaaccgatgtgtctatggtgctgcatcttgctgttgtacttctgaaatcagacctgtgggaaccatcatttctgacttaaccgtgagatgctcacgagtacccttcctgttgttttgttagcattgaaatcaagactatttatttggaatacatacaacagtgtttttccactgtatttcatttgcaaaagttgagaactgccttctctaccttttgcaaaataattgatattccatattggattctcaaagacttcgatatggtgaacctattaaacctaaaaattgtattcatcctttcatgactgtgggccttgattccccagccccctctcctccctttttttttagatgagattttagccacactctccagttattttaaacattgcaacattttcttggaataatgttaatgttgaaaggcccttttggaaccttattaccctgatttccgtaaacccagttttccatgcctggtggtccttttcacaaccttccctaactttaatacctggccaatgggggaaaaaaggcgggcagggaaaaaaaatggaattcccatgggttggtcctcggggggaacccttactccccctcttgcgacaagttttctttaaagaaccccctggaatccccgagaaacactattccttgaaggcttttgccgtctctcggctttttaaagcaaa

SEQ ID NO: 29059 - DNA, 718 bp, Macaca Mulatta
  misc_feature (1)...(718): n = A,T,C or G
aagcgacacaaggcagacaatgcagttaacaaaaagaaaaccatagnnnnnnnnnnnnnnnnnnnnnnnnnnnnnnnnnnnnnnnnnnnnnnnnnnnnnnnnnnnnnnnnnnnnnnnnnnnnnnnnnnnnnnnnnnnnnnnnnnnnnnnnnnnnnnnnnnnnnnnnnnnnnnnnnnnnnnnagggtttgagtcacactgctgacatgcaaacacgtgaagttctgatgaagttatctggaactatagagtgtgaagggcccaatcgccacctctagacttcactgnnnnnnnnnnnnnnnnnnnnnnnnnnnnnnnnnnnnnnnnnnnnnnnnnnnnnnnnnnnnnnnnnnnnnnnnnnnnnnnnnnnnnnnnnnnnnnnnnnnnnnnnnnnnnnnnnnnnnnnnnnnnnnnnnnnnnnnnnnnnnnnnnnnnnnnnnnnnnnnnnnnnnnnnnnnnnnnnnnnnnnnnnnnnnnnnnnnnnnnnnnnnnnnnnnnnnnnnnnnnnnnnnnnnnnnnnnnnnnnnnnnnnnnnnnnnnnnnnnnnnnnnnnnnnnnnnnnnnnnnnnnnnnnnnnnnnnnnnnnnnngacaccacctcagataattttggatacaacctgctgacgttcatcattttatacaacaatcttattcccatcagtctgttggtgactcttgaggttgtgaaagtatactcaagcccttttcatcaactggg

SEQ ID NO: 29060 - DNA, 522 bp, Macaca Mulatta
  misc_feature (1)...(522): n = A,T,C or G
aacagccgggttctgggccagaacgtcatgatgggccctaattcggtcatgtcaacctatggcagccaggcatctcataacaaaatgatgaatcccagctcccatacccacnctggacacgctcagcagacatctgcagttaacgggcgtgccctgtcccacacggtaagcaccatgccccacacctcgggaatgaaccgcctgacccaagtgaagacacctgtacaagtgcctctgccccaccccatgcagatgagtgccctggcgggctactcctccgtgagcagctgcaatggctatggcagaatgggccttctccaccaggagaagctcccaagtgacttggatggcatgttcattgagcgcttagactgtgacatggaatccatcattcggaatgacctcatggatggagatacattggattttaactttgacaatgtgttgcccaaccaaagcttcccacacagtgtcaagacgacgacacatagctgggtgtcaggctgaggattagtgagcagg

SEQ ID NO: 29061 - DNA, 714 bp, Macaca Mulatta
  misc_feature (1)...(714): n = A,T,C or G
ggggcaaagcctttcgctgtagttcataccttactaaacataagcgaannnnnnnnnnnnnnnnnnnnnntaaatgtaaagaatgtggaaaagcttttaaccgtagttcatgccttactcaacatcagacaactcatacgggagaaaaactttacaaatgtaaagtatgtagcaaatcttatgctcgttcttcaaatcttattatgcatcagagagttcatactggagagaagccttataaatgtaaagaatgtggcaaagtctttagccgtagttcttgccttactcaacatcggaaaattcatactggagagaatctttacaaatgtaaggtttgtgccaaaccttttacttgtttctcaaatcttattgtgcatgagagaannnnnnnnnnnnnnnnnnnctataaatgtaaagaatgcggcaaagcctttccttatagttcacaccttattcgacatcatcgaattcatactggagaaaaaccatataaatgtaaagcatgtagcaaatcttttagtgactcctcaggtcttactgtgcatcggcgaacnnnnnnnnnnnnnnnnnnctatacatgtaaagaatgtggcaaagcctttagttatagttcagatgttattcagcatcagagaaattcatactggcccagagacccctacaaaatgttgaaagaatgtgggcaaaaacccttccaacctattagggttcatt

SEQ ID NO: 29062 - DNA, 388 bp, Macaca Mulatta
gtgtaagatttaagcctgccattttaccagcattattgtagtttaatgattgaatgtagacagggatatgcgtatagttttcagtattagttctagataacactaaattaactactgttaggttgagtatggtggggtcagtgacctaaaatggagtgaggccaaagcactgtcctgtaagtcttacttcctgcttagggcacagtgaagtaggaaacaatattttgaaaataagttttaaatttaaaatgattaaaaagcaatatagttgcataaaagcactgtaaaatatttaaaaggttaaaactgtggaaattatattggtaagtttacagatcaataaaagcacctgttctccatctgaactagacaatggaaataatgctgc

SEQ ID NO: 29063 - DNA, 284 bp, Macaca Mulatta
attaagttccctgcggacatgtaactttgccatcagttttgatgtggaaacactgtgatatataaaatgttgttggacaacagtagttttaagagtaaaatatgaaacgtttaaaaagttccaaaaaaagctagctctgtcctttacttattgagacactttaactttttcctttgtatttccattgtattagatgaataaatgtgaatgtaaaattgtataaattactgtacttgaatacttctgtttccccagtgttacttgctggacattttagtgccttg

SEQ ID NO: 29064 - DNA, 1224 bp, Macaca Mulatta
  misc_feature (1)...(1224): n = A,T,C or G
ttctttaactcgaactcatccgtcctataattttcttatattttcctaaagaaggaagagaagcgcatagagaagaagggacataatttgttgggatccttccttacggctatgaggaatttgtggctcagttgaaaagcctaaactacgtctcgggagtttgggcgcggagaactactttcagtggcgcacggagacggcgtctacgtaagaagtgataagtaacgcaacacacgttgtataaatttgcgctccgccaaacgggagcattcaggggcggccggctttgttgggtgggcttggtttggtgtccctgcggctgaccgtgattggtgattcgcagcatcttcgtaaccgctaacaggtcaaaatgcagatcttcgtgaagaccctgaccggcaagaccatcacccttgaggtggagcccagtgacaccatcgaaaatgtgaaggccaaaatccaggataaggaaggcattccccccgaccagcagaggctcgtctttgcaggcaagcagctggaagaatgtgcgcactctttctgactacaacatccagaaagagtcgacccctgcaccttgtcctggcgccctgaggaggggttatgccgaatctttcgggaaaaacccctgaaccgggcaagaacgctccccccttggaaagttggaaacccccagtgggacccccctccccaaaaattggtggaaaaggccaaaagaattcccggaaataaaaagaaaggggttttccccttccccgcaacccagaacccaaaaaggcccctccttccttttttgccaagggcactagaacgcgaccttgtgaaaataaaatatgggacccgacccccacccttcctttttcacgaaaacataacggaagaatttcctcagaagaaaggaaaattctcgaaaccccttgggaaacacattagtccccctggcggccccctggtaaaaagaagaggggaatatacgnnnnnnnnnnnnnntcnnnnnnnnnnnnnnnnnnggaaacgnnnnnnnnnnnnnnnnnnnnccacttttgagagggggaggaaccccaagtgagcccccattccaaaaaatggggaaagggccccccaaacccccttagaataaaaaggggttcccccacccagagataaataaagggtgtcattttaacgggannnnnnnnnnnnnnnnnnggcgcagtttttttgagaaaaacaatcctaaaaagg

SEQ ID NO: 29065 - DNA, 221 bp, Macaca Mulatta
aggtgagatttcaatggaaaaagtgaaggtaaagcgttatgtgtccggaaagaggccagactatgcccctatggagtcctcagatgaggaagatgaagaatttcagttcattaagaaagccaaagaacaagaagcagagcctgaggaacaggaggaggattcatctagtgacccccggctacggcgtttacagaaccgtattagtgaagatgtggaagaga

SEQ ID NO: 29066 - DNA, 135 bp, Macaca Mulatta
cagggatcgtggtccatcaggagtctgtgtgtgccacctatggcagtggcttaagcagcacgtgtattgtagacgttggggaccagaagacaagcgtatgctgtgtggaggatggggtgtctcatcggaatactc

SEQ ID NO: 29067 - DNA, 282 bp, Macaca Mulatta
  misc_feature (1)...(282): n = A,T,C or G
aagatattaccgtgaagtcttgcctggagaaattgtggaaatatccagacataatgtccgaactcttgatattatatcaaggtctgaaggaaacccaatggctttttgtatctttgaatatgtttattttgcaagaccagacagnnnnnnnnnagaccaaatggtttatacagtaagataccgttgtggccagcagctagcgattgaagcacctgtggatgcagatttggtcagcactgttccagaatctgctacacctgctgctcttgcttatgcaggaaa

SEQ ID NO: 29068 - DNA, 466 bp, Macaca Mulatta
ttaagccaattctgcttatagaccacctccagccagtgacgttctgagttgaggatgctcaacaacatgggtaggtcgcggtgtacccagtgaagaagtcaggggacagaggaatttctctttctaggagatcttcattttgtgtgactcccatggagaggagcagactggcaggaagcacaccggggttaactctggttgacttgactagtatcactcgattttaaaaaatacttttccatgttttctgagtgctctatggtgaatcagctgcctctgtgataatacagtccacatgtggacataaccagggatcaaataaaggaggtattgctgcagtccagccaggttgaaagggaaggggggccccagaggtccattggatggcaggtgtctacagaggtgtgcctttgggtggaactctttgacctacctgaggtttactttgctatttcaggaaggttga

SEQ ID NO: 29069 - DNA, 97 bp, Macaca Mulatta
caggtgttccaccaggtgtggtcaatattgtgtttggaactgggcccagggtgggtgaggcccctggtgtcccatccagaggtgcccctgatctcct

SEQ ID NO: 29070 - DNA, 976 bp, Macaca Mulatta
  misc_feature (1)...(976): n = A,T,C or G
atgttcccctcgcggaggaaagcggcgcagctgccctgggaggtcggcaggnnnnnnnnnnnnnnnnnnnnnnnnnnnnnnnnnnnnnnnnnnnnnnnnnnnnnnnnnnnnnnnnnnnnnnnnnnnnnnnnnnnnnnnnnnnnnnnnnnnnnnnnnnnnnnnnnnnnnnnnnnnnnnnnnnnnnnnnnnnnnnnnnnnnnnnnnnnnnnnnnnnnnnnnnnnnnnnnnnnnnnnnnnnnnnnnnnnnnnnnnnnnnnnnnnnnnnnnnnnnnnnnnnnnnnnnnnnnnnnnnnnnnnnnnnnnnnnnnnnnnnnnnnnnnnnnnnnnnnnnnnnnnnnnnnnnnnnnnnnnnnnnnnnnnnnnnnnnnnnnnnnnnnnnnnnnnnnnnnnnnnnnnnnnnnnnnnnnnnnnnnnnnnnnnnnnnnnnnnnnnnnnnnnnnnnnnnnnnnnnnnnnnnnnnnnnnnnnnnnnnnnnnnnnnnnnnnnnnnnnnnnnnnnnnnnnnnnnnnnnnnnnnnnnnnnnnnnnnnnnnnnnnnnnnnnnnnnnnnnnnnnnnnnnnnnnnnnnnnnnnnnnnnnnnnnnnnnnnnnnnnnnnnnnnnnnnnnnnnnnnnnnnnnnnnnnnnnnnnnnnnnnnnnnnnnnnnnnnnnnnnnnnnnnnnnnnnnnnnnnnnnnnnnnnnnnnnnnnnnnnnnnnnnnnnnnnnnnnnnnnnnnnnnnnnnnnnnnnnnnnnnnnnnnnnnnnnnnnnnnnnnnnnnnnnnnnnnnnnnnnnnnnnnnnnnnnnnnnnnnnnnnnnnnnnnnnnnnnnnnnnnnnnnnnnnnnaggagcagttcaaggtggacagggagggaggcctgaacactgtgaagtaccatgtggattcccgcactgccctgtccgtgggcggggccccctgtactgtcctcaacatcatgttagactgtgacaagaccgccacgccctggtggacattc

SEQ ID NO: 29071 - DNA, 436 bp, Macaca Mulatta
  misc_feature (1)...(436): n = A,T,C or G
ggatagccccagtgagataagtccatacaagttttcccagaggctgataccacagtaaaggccaggccaggaggggtagaagactccggagatctaactcctgataaatgtgctacatcccctaatctgagcccttctttccgtgtcccccgacaacctcatgcttacgtgattttatccaaaataaaatttttcattgctacggaagtctgattctcatgtgcaagaagtaactacctttacattntgacttactnttccttaaacatttttgacattttcttttccctatttaatgcctttgcatgtgttctctcncaagcaataagaaccttaggaaagttctagaagtttgcagaactatcttagggatntgagacaaagatggtgcaggaaagcttgttccagagtaatgtcattagaaacataccctggg

SEQ ID NO: 29072 - DNA, 543 bp, Macaca Mulatta
taaatctccagggagtttctgaaaatagtatcttctcttcacacctaggatgaagctggaggcagattcgtcgctttctctggagaaggacagtcattgcgtaagaagggaagaaagccctaagtgaggactgttggctgactggaaaataataaaagaataaattgcaacatcttggcttttagttactggcactgacagggatgagcctcatcagaatactctgttacttaagatttgcttagagttacctaagaattatcaagttttacttgaagtggagcagcaggactttgtagttgtatgcttgatttggggatagacgaagagctgtccctgagggcctgtaggcagctgccgcctcacctcttcatgctttcagcttgaggggggctcccactgcctcagcaggagcaattctgtatccctaattctgtcaaaaccaatggaggtgactaaattgtctaacatgaagtgttctttctttttcatttatcctttcttttcctaggtcagttgcataggtgtcagtctttggcctaa

SEQ ID NO: 29073 - DNA, 526 bp, Macaca Mulatta
  misc_feature (1)...(526): n = A,T,C or G
atgaggaacttgaggcgcatcactagcccctgatcatttcacctaaaagaacaaggacgagagttcctgacctccaggccagtccctgatccctgacctaatgtnnnnnnnnnnnnnnnnnnnnnnntctacggnggcctggggctgggcgggctcctgctgctggctgtggtccttctgtccacctgcctgtatcggctgcatcgnnnnnnnnnnnnnnnnnnnnnnnnnnnnnnnnnnnnntcctcagagcaggagatccactatgcatctctgcagaggctgccagtgtccagcagtgaaggacctgacctcagggacagagacaagagaggcaccaaggaggatcccagagctgactatgcctgcattgctgagaacaaacccacctgagcaccccagacaccttcctcaacccaggcgagtggacagggtccccctgtggtccacccagtaaagaccatggtccccccacttctgtgtctcagtcctctcaatccatctcgagcctccattcaaaatgatc

SEQ ID NO: 29074 - DNA, 1218 bp, Macaca Mulatta
  misc_feature (1)...(1218): n = A,T,C or G
gactaagagcctctggaaaggactcagccccaacaatggtgtcagggatcctagggggttctgtgactctccccctaaacatctcagtagacacagcgattgagcatgtcatctggattggtcccaaaaaggctcttgcttttgcacgtcccaaagaaaatgtaacctttatggccaaaagctactggggccaactaaacatcgccagggggagttactccctgtccatcagcaatctgactctgaatgatgcaggatcctacaaagcccagataaaccaaaggaattttgaagtcaccactgaggaggaattcaccctgttcatctatnnnnnnnnnnnnnnnnnnnnnnnnnnnnnnnnnnnnnnnnnnnnnnnnnnnnnnnnnnnnnnnnnnnnnnnnnnnnnnnnnnnnnnnnnnnnnnnnnnnnnnnnnnnnnnnnnnnnnnnnnnnnnnnnnnnnnnnnnnnnnnnnnnnnnnnnnnnnnnnnnnnnnnnnnnnnnnnnnnnnnnnnnnnnnnnnnnnnnnnnnnnnnnnnnnnnnnnnnnnnnnnnnnnnnnnnnnnnnnnnnnnnnnnnnnnnnnnnnnnnnnnnnnnnnnnnnnnnnnnnnnnnnnnnnnnnnnnnnnnnnnnnnnnnnnnnnnnnnnnnnnnnnnnnnnnnnnnnnnnnnnnnnnnnnnnnnnnnnnnnnnnnnnnnnnnnnnnnnnnnnnnnnnnnnnnnnnnnnnnnnnnnnnnnnnnnnnnnnnnnnnnnnnnnnnnnnnnnnnnnnnnnnnnnnnnnnnnnnnnnnnnnnnnnnnnnnnnnnnnnnnnnnnnnnnnnnnnnnnnnnnnnnnnnnnnnnnnnnnnnnnnnnnnnnnnnnnnnnnnnnnnnnnnnnnnnnnnnnnnnnnnnnnnnnnnnnnnnnnnnnnnnnnnnnnnnnnnnnnnnnnnnnnnnnnnnnnnnnnnnnnnnnnnnngaagcccaaaatcacgtggcgcctccggcacagcaaggatggcatctgcagggtcagcctcacctgctccgtgaaggatgggggaaatgccgtcatgtacacatggaccctgctgcagaagggagctgttgtgtcccaaggggaatcacacctcaacgtctcatggagaagtggtaaaaatcaccccaacctcacatgcacagccagcaaccctgtcagcaacagctcccaccagtttctttctgagaacatctgttcag

SEQ ID NO: 29075 - DNA, 1745 bp, Macaca Mulatta
  misc_feature (1)...(1745): n = A,T,C or G
agtttccacctggatgtttgaggttgtgtagatgtggccggcacccttgagagtggaactggggggtgcagactgaacactgaacggaaggagccttggacagggctgggccagtctcccnnnnnnnnnnnnnnnnnnnnnnnnnnnnnnnnnnnnnnnnnnnnnnnnnnnnnnnnnnnnnnnnnnnnnnnnnnnnnnnnnnnnnnnnnnnnnnnnnnnnnnnnnnnnnnnnnnnnnnnnnnnnnnnnnnnnnnnnnnnnnnnnnnnnnnnnnnnnnnnnnnnnnnnnnnnnnnnnnnnnnnnnnnnnnnnnnnnnnnnnnnnnnnnnnnnnnnnnnnnnnnnnnnnnnnnnnnnnnnnnnnnnnnnnnnnnnnnnnnnnnnnnnnnnnnnnnnnnnnnnnnnnnnnnnnnnnnnnnnnnnnnnnnnnnnnnnnnnnnnnnnnnnnnnnnnnnnnnnnnnnnnnnnnnnnnnnnnnnnnnnnnnnnnnnnnnnnnnnnnnnnnnnnnnnnnnnnnnnnnnnnnnnnnnnnnnnnnnnnnnnnnnnnnnnnnnnnnnnnnnnnnnnnnnnnnnnnnnnnnnnnnnnnnnnnnnnnnnnnnnnnnnnnnnnnnnnnnnnnnnnnnnnnnnnnnnnnnnnnnnnnnnnnnnnnnnnnnnnnnnnnnnnnnnnnnnnnnnnnnnnnnnnnnnnnnnnnnnnnnnnnnnnnnnnnnnnnnnnnnnnnnnnnnnnnnnnnnnnnnnnnnnnnnnnnnnnnnnnnnnnnnnnnnnnnnnnnnnnnnnnnnnnnnnnnnnnnnnnnnnnnnnnnnnnnnnnnnnnnnnnnnnnnnnnnnnnnnnnnnnnnnnnnnnnnnnnnnnnnnnnnnnnnnnnnnnnnnnnnnnnnnnnnnnnnnnnnnnnnnnnnnnnnnnnnnnnnnnnnnnnnnnnnnnnnnnnnnnnnnnnnnnnnnnnnnnnnnnnnnnnnnnnnnnnnnnnnnnnnnnnnnnnnnnnnnnnnnnnnnnnnnnnnnnnnnnnnnnnnnnnnnnnnnnnnnnnnnnnnnnnnnnnnnnnnnnnnnnnnnnnnnnnnnnnnnnnnnnnnnnnnnnnnnnnnnnnnnnnnnnnnnnnnnnnnnnnnnnnnnnnnnnnnnnnnnnnnnnnnnnnnnnnnnnnnnnnnnnnnnnnnnnnnnnnnnnnnnnnnnnnnnnnnnnnnnnnnnnnnnnnnnnnnnnnnnnnnnnnnnnnnnnnnnnnnnnnnnnnnnnnnnnnnnnnnnnnnnnnnnnnnnnnnnnnnnnnnnnnngggctacagaacgggctacacgtaccgccacccctttgttcaagagaaaaccaaacacaaaagtgaggtggagattccagccacggtcacagccttcgtgtttgaggaggatggtgccccagtgcccgccctgcgacagcatgcccagaagcagcagaaggagaagacccgctggctcaacacgcccaacacctacctgcgggtcaatgtggctgatgaggtccagaggagcatgggcagcccccaagccaagaccacnnnnnnnnnnnnnnnnnnnnnnnnnnnnnnnnnnnnnnnnnnnnnnnnnnnnnnnnnnnnnnnnnnnnnnnnnnnnnnnnnnnnnnnnnnnnnnnnnnnnnnnnnnnnnnnnnnnnnnagattcgagaacaaaaccgacaagatgtgaagtctgcgggacctcagtcccagctcctggcgagtgtcattgccgagaagagccgaagccc

SEQ ID NO: 29076 - DNA, 705 bp, Macaca Mulatta
ggggggagacagaaaaattcaccgcaagcagagcaccttctagattgctcctggagtgtggggacaacagtctctcctgttcaagttactgaatccagaaaaaagatgaacttatgaacatgggaaaagaaatccagctaaagcctaaggcaaatgtctcttcttacatccactttttgctgaattacagaaacaaattcaaggagcagcagccaaatacctacgttggctttaaagagttctctagaaagtgttcggaaaaatggagatccatctcaaagcatgaaaaggccaaatatgaagccctggccaaactcgacaaagcccgataccaggaagaaatgatgaattacgttggcaagaggaagaaacggagaaagcgggatccccaggcacccagacggcctccatcatccttcctactcttctgccaagaccactatgctcagctgaagagggagaacccgagctggtcggtggtgcaagtggccaagggcacagggaagatgtggtcagcaacgacagacctggaagagcacccttatgagcagagagcggctcttctgagagctaatacttcgaggaatttgactctaccgtaaacacgggaacaatgtattgccgaaaaaattccgaatgcaccaaatagcgggacaaggaaatatcggccacctatgtcccatcctacttttttctctctcataa

SEQ ID NO: 29077 - DNA, 1057 bp, Macaca Mulatta
  misc_feature (1)...(1057): n = A,T,C or G
gggctttctctctcctcccgccgcccaagatgccgaaaggaaagaaggccaagggaaagaaggtggctccggcccctgctgtcatgaaaaagcaggaggccaagaaagtggtgaatcccctgtttgagaaaagacataagaattttggcataggacaggacatccagccaaaaagagacctcacacgctttgtaaaatggccacgctatatcaagttgcagcggcagagagccatcctctataagcggctgaaaatgcctcctgctattaaccaattcacccaggccctggaccgccaaacagctactctgctgcttaagctgacccacaagttcaggaccagagacaacactaatagaagaaccacaagcttgttggccccaggcagtagataaaaacctgcctggccaaagggggaaagtcacccacctaaaaggaccaacctggtcccttctttgccaagaatattaaacaacattcatccctccttttggtgggaataactaacataaagctccaagcctgggaggggtggatttgccccatttaaaccgcttatattaccactttcgtaagcctagttttgacccttctcgtagcccatggcccctgagtgcccactaaaaaatgagggggagtcccctttccatggcactctaatatcacagggaagaaaggcgcccttaaaagagagtactcacaacctaagtctcacacggaggaatatgaatacctaccgctcacacattgttctttatccgattcacaccttgggtatttatacctctcggggagaaataagagtaccgccttctcttattcggcgccaatatacgcgggatcgcaataaatctctatntaacggtgagcaaagacgttcagtatcacgtgatcgacgcgaaatattgcgaatcgccgacaaaatgcgtgtacccggtcaccctctcagagtagtagcgtggcagcataaataaccacctctcgtggtgatagaccccaaatgtattcacaatgtgaaggaccgcatccctaatgatcatttacgtgacatatgcgg

SEQ ID NO: 29078 - DNA, 311 bp, Macaca Mulatta
  misc_feature (1)...(311): n = A,T,C or G
agatactcacaagtggttcacaccccgagtgtcagggacagttcctggggcccgggatggacattcggcctgtgtcctaggcaagatcatgtacattttcgggggctacgagcagcaggncaggcggactgcttttccaatgacattcacaagctagataccagcaccatgacatggactcttatctgtacaaaggnagggcaaccctgcacgctggagggacttccactcagccacaatgctgggaagtcacatgtacgtctttgggggccgtgccgaccgctttgggccattccattccaacaatgaga

SEQ ID NO: 29079 - DNA, 832 bp, Macaca Mulatta
  misc_feature (1)...(832): n = A,T,C or G
ttattttaacaccccccttcccgtttacctggggaaggagggccccagaatgcctggagaccaccactgttcaaaagtccaannnnnnnnnnnnnnnnnnnnnnnnnnnnnnnnttaaaaggcctttccttttttgggttacaccggaagaaaggttttggcccccgaatttgttcagccattcccagcccgtatttggttcattcccaccactttaagcctgggcgttcccgaccagatcccccgaagctttttgcaccagcagcccagcggttggatgtgcctggtaaagtgataccccaccaacatgggcagataaaactttcggacaggagtcttcaaagcccagttatacctttcccaagaggtcccatgtttttcatccaggggctgcccagaaggcctggaagtggcaggtctccagcaggtccccaaggtacaaaatctgtcggattggcctttcttcttgatgtgcctggtcgatcatgcacttgcatagggtgaaatctgtgtgcggcaggttggtgagggccttcagcaggatctgggcggtgaccgtggtctgaaagaaggctgggttgaactggtacagcttcaggacagccaggttggcttccagatcataggcattttccttggcctgcgtctccacatagcgctccagggtggccaggttctcaggattgtacctgtcgatacccttgagcaacttgcccacgttagctctcatctgttcaaacatcgccatgacttctgtcgctttccacaaccagggctggagactaataccggcccggcacggcgtccgcgaggacgggaaaaggaagagccc

SEQ ID NO: 29080 - DNA, 662 bp, Macaca Mulatta
cagccaagatttaaattctggaaccccaagcatgattttaggcagcccctcctcttcccatcctgatacgccagactgcactgtttctgtgccggctgcagtgtgctgggatgagcatctttcttcccgtcctctcccttcccctctcccagggccagcccagtgtcagaacaggactgtgtccccccacagaacccaggacggggcccaggctcagggactcaacaatcacatattgtggatgagacagacacattttcttctctctccttgaccctgaactcaccaaatacagctgaccacatgggctcctacggacccgccttctaccagtcttacggtgcctcgggccagttcacccatgaatttgatggggaacagctgttctctgtggacctgaagaaaagcgaggctgtgtggcgtctgcctgagtttggcgactttgcccgctttgacccacagggtgggctggccggcatcgccgcgatcaaagcccatctggatgtcctggtggagcgctccaaccgcaccagagccatcaacggtaccagccctccctctgcccacccagtcaggcgggaaggtcagagaaactagctcccagttcctaggcctccatcactctggggcgcactctcagtgcccgtgcctgtcatgccctg

SEQ ID NO: 29081 - DNA, 606 bp, Macaca Mulatta
  misc_feature (1)...(606): n = A,T,C or G
aagagcatggtctcaggaaaaccgntccccannnnnnnnnnnnnnnnnnnnnnnnnnnnnnnnnnnntcctggtagtttcttatagggaaaaaaacaaaaaccccaacttttagcacgtgatactacatatggcccggctaaagaatttctctgnnnnnnnnnnnnnnnnnnnnnnnnnnnnnnngcttaaagctggagttggacattctgctttcagatgctgtctttttattagtgagtgatgatggttggctaataatcagtaggtaataaattttttgtaatcccatcaagtggctccatatgtttctgctttcttgttcactgtgttaatgtttaactgttgtaccttaaagccgaaatcagtaactatgcatactgtaaccaaggtattgggcttacagagttgttggtggtataaagaaaattttaaatgttgttgcaaactaccgagttacaccattttaaactttctttcctcccccccttttttggcccacaaatggtattataatgcttgcttagtcaaagaagagagactaaaccagggtaaaaattttaacagtacagaatttgccatcatttcattgccttgattctaactg

SEQ ID NO: 29082 - DNA, 1189 bp, Macaca Mulatta
  misc_feature (1)...(1189): n = A,T,C or G
ggnnnnnnnnnnnnnnnnnnattgtttgagctgtcccatctccactgttatccctttgtggttttttaatataaattattagtttatgtcatttttgtatctacatcttttttcacaaatttgtcttgccttattaaagttctgtaaaatatacttaaatggaaaaaatgatgttcatttagattgaaaatttttctcagatggattgataattgcattcatcttgtgttttatatgagaaggtgcctcaagaattccctgttggatttgtttaaaagaatttttatcttctgtgataaactttgctgtgtaccaggaactataaaaacaaaaacttgttactaagaaatatctgaatggaatctatgcgatctgatataatannnnnnnnnnnnnnnnnnnnnnnnnnnnnnnnnnnnnnnnnnnnnnnnnnnnnnnnnnnnnnnnnnnnnnnnnnnnnnnnnnnnnnnnnnnnnnnnnnnnnnnnnnnnnnnnnnnnnnnnnnnnnnnnnnnnnnnnnnnnnnnnnnnnnnnnnnnnnnnnnnnnnnnnnnnnnnnnnnnnnnnnnnnnnnnnnnnnnnnnnnnnnnnnnnnnnnnnnnnnnnnnnnnnnnnnnnnnnnnnnnnnnnnnnnnnnnnnnnnnnnnnnnnnnnnnnnnnnnnnnnnnnnnnnnnnnnnnnnnnnnnnnnnnnnnnnnnnnnnnnnnnnnnnnnnntttaagtttttcttttttgtggggaaaaattaaacaaaaaaaagaggtcccaaattgtcttggggcgctttcccttgggggggttttttttttcacagaaagaaaatatttgtttgtgggagaagacaccccccaaaaaaaggttttgggttaattttggtnnnnnnnnnnnnnnnnnnnnnnnnnnnnnnnnnnnnnnnnnggctttttttttataagggggggaaaaaaatatttgtgcccnnnnnnnnnnnnnnnnnnnngtgggaaaactccccaccttttttaccaccttgggtaccaaaaaatgggaataaacccctttgtggaaaaaaactgtggagaaaaaaatattcctttatgtgggtccccacggcgttttgggaaaccttcctatgttgtgtgaccacctccccaaatttttttccgccttgagaagaggaacaccccttttggggccaaaaaacgattttt

SEQ ID NO: 29083 - DNA, 1458 bp, Macaca Mulatta
  misc_feature (1)...(1458): n = A,T,C or G
gatactgaacttaccagtgctgtttctagtattaatggagaaaacctgccaactataatcttgtcttctcctactaaatcacctgctaaaaatgcagaattagttaaatgcctgtcttcagaagaaactgtaggtgctgttgtatatgctgaagtaggggattcagcctcaatggaacagagtcttttagcattcaaatctgaagactctgcagtaaacagcactcagaatgaagatggcattgctttttcagctaatgttacaccgtgtgtttccaaggatggaggatatatacagttgatgccggccacaagcacaacttttggcaattcaaataacattctgatagctacctgtgtgactgatccaacagccttaggaacatctgtgagtcagtctaatgtagtggtgttgcctggaaattctgcacctatgactgcccaacctctgccacctcagttacagacaccaccaaggtcaaacagtgtatttgctgtcaaccaagcnnnnnnnnnnnnnnnnnnnnnnnnnnnnnnnnnnnnnnnnnnnnnnnnnnnnnnnnnnnnnnnnnnnnnnnnnnnnnnnnnnnnnnnnnnnnnnnnnnnnnnnnnnnnnnnnnnnnnnnnnnnnnnnnnnnnnnnnnnnnnnnnnnnnnnnnnnnnnnnnnnnnnnnnnnnnnnnnnnnnnnnnnnnnnnnnnnnnnnnnnnnnnnnnnnnnnnnnnnnnnnnnnnnnnnnnnnnnnnnnnnnnnnnnnnnnnnnnnnnnnnnnnnnnnnnnnnnnnnnnnnnnnnnnnnnnnnnnnnnnnnnnnnnnnactgaagtttctgacaagactattgccacagatcttgggaagaaatcagaagaaaccacagttcccttcccagaagagagtatagttccagctgctaaaccatgccacagacgtgtgctctgttttgacagtactgctgctcccgtggcaaatacacaggggccaaatcataagatggtgtcccaaaacaaagaaaggaatgcagtctcttttcctaatcttgactcacccaatgtatcctccaccttaaaacccccttctaataatgctatcaaaagagagaaagagaagcctcctctgcctaagattttatctaagtcggaaagtgccattagccggcataccaccataagagaaactcaatcagaaaagaaggtgtcaccaacagaaattgtgcttgaatctttccataaagcaacagctaataaggagaatgaattatgcagcgatgtagaaaggcagaaaaatccagaaaattcgaaactatctattgggcagcaaaatgggggtttgcgaagtgagaaatctatagcttcactgcaagaaatgaccaaaaaacaaggcgcatcttcaaacaataaaaatgtcctttcagtaggtacagctgtgaaggatctaaaacaagaacaaactaaatccacca

SEQ ID NO: 29084 - DNA, 652 bp, Macaca Mulatta
tggatgtggttgccgagcaactaaaacacatgtgaccatggccatcagctggataacgattgtcgtgcccctgctcacttttgaggtcctgctggttcacagattggatgggcacaatacattctcctacatctccatatttgttcccctttggctttccttactaactttaatggccacaacatttaggcgaaaggggggcaatcattggtggtttggcattcgcagagacttctgtcagtttctgcttgaaattttcccatttttaagagaatatgggaacatttcatatgatctccatcacgaagatagtgaagatgctgaagaaacatcagttccagaagctccgaaaattgctccaatatttggaaagaaggccagagtagttataacccagagccctgggaagtacgttcccccgcctcccaagttaaatattgatatgccagattaaactcctagagaggacccagccacacacggactccaccttgcctttacctcttgttcattcatcccaaacctggaaatggaaacaggcttcaaacactgtcgtctcacgccctgtttgagatcaccgcctcatcagtatgcatcatagatggaggtggtttaagtatgtgggtgtgtgtggtgtgtcctgggtaagaga

SEQ ID NO: 29085 - DNA, 223 bp, Macaca Mulatta
cgggccgatggactactcctacctcaattcgtacgactcgtgcgtggcggccatggaggcgtccgcctacggcgactttggcgcctgcagccagcccggcggcttccaatacagccccttgcggcccgccttccctgcggcagggccgccctgccccgcgctcggctcctccaactgcgcgcttggcgccctacgcgaccaccagcccgcgccctactcggca

SEQ ID NO: 29086 - DNA, 420 bp, Macaca Mulatta
  misc_feature (1)...(420): n = A,T,C or G
ttctcagaatgtgaaaaggccaaatgtagcggttgtctaaggccagaattagcaacatattattggagcatagagggcttaatttccagtctgtaaggagagtggggaaactctgatctcaaccaagagggtaccccgtcttttaacacgagaccatgaattaggaaaccaaaactaactgcaacttatgaggcaaaaattaaccttccatntttggaaaagatgcttggattagttacatccttaaaaatgacccattgggacagaaggggagctaagacccaaactctcctcccagtcttgcccacatctggcttatggaaacaggtttccaaatcttctgcaggaaaatcgcttactgcctcttgaatgaaacttcgtcctgcatggtagattagagatggtgcaacacaagtgaaa

SEQ ID NO: 29087 - DNA, 759 bp, Macaca Mulatta
  misc_feature (1)...(759): n = A,T,C or G
gggtcaaaactttatgttcactttgctgttgtagatagccagtcagccagcagtgtcagtgctgttttcaaagatttaagctctgtaaaattgggaaattatctaagatcgttttccctaagcattgacacatagcttcagccaaggtgagatatggcagctgtttgtatctgcactgtgtctgtctacaaaaagtgaaaaatacggtgtttacttgaaattttaactttgtaactgcaagaattccaattcagctgggcgaggattaatattactattactatttttaactctccataggattttcagtactaccaaattgttttggattttttaatttcctcttcacataccagggttatgaaaagtgtgctttctttttaacattgtattacagttacaaagtaaaattccccactgctatttaattgttccagcccagtaccataaagaacatttcaccataaagacccctccggagctggggaaacctaccccaagatctaaagtttttggctgtcgaataaacctccaactaaggggcttttatttcttggggtaaaaaagaagtgcccttccctggcctaaatccccttcctggtgggtatccaccattaatttaaaggtccttctaaattcgannnnnnnnnnnnnnnnnntaatgtcctgtaaaacattggnnnnnnnnnnnnnnnnnnnnnnnnnnnnnnnnncccctaccggtgagccaattggccgnnnnnnnnnnnnnnnnnnntt

SEQ ID NO: 29088 - DNA, 3380 bp, Macaca Mulatta
  misc_feature (1)...(3380): n = A,T,C or G
ttcttgcaaataatgtggtctcaggcaaggacacagcatcttggctgtctgctaaaaaaaaaaaatgcctagactctcagtggaaattgagtgtcaagctgcaaaatctcaaatggcagactatcatcatttaangagcgcctggacaccggaaaaggcgattccctgagcgcctggagttggagacaatttctggttcagatttaaacatctttctaggtnnnnnnnnnnnnnnnnnnnnnnnnnnnnnnnnnnnnnnnnnnnnnnnnnnnnnnnnnnnnnnnnnnnnnnnnnnnnnnnnnnnnnnnnnnnnnnnnnnnnnnnnnnnnnnnnnnnnnnnnnnnnnnnnnnnnnnnnnnnnnnnnnnnnnnnnnnnnnnnnnnnnnnnnnnnnnnnnnnnnnnnnnnnnnnnnnnnnnnnnnnnnnnnnnnnnnnnnnnnnnnnnnnnnnnnnnnnnnnnnnnnnnnnnnnnnnnnnnnnnnnnnnnnnnnnnnnnnnnnnnnnnnnnnnnnnnnnnnnnnnnnnnnnnnnnnnnnnnnnnnnnnnnnnnnnnnnnnnnnnnnnnnnnnnnnnnnnnnnnnnnnnnnnnnnnnnnnnnnnnnnnnnnnnnnnnnnnnnnnnnnnnnnnnnnnnnnnnnnnnnnnnnnnnnnnnnnnnnnnnnnnnnnnnnnnnnnnnnnnnnnnnnnnnnnnnnnnnnnnnnnnnnnnnnnnnnnnnnnnnnnnnnnnnnnnnnnnnnnnnnnnnnnnnnnnnnnnnnnnnnnnnnnnnnnnnnnnnnnnnnnnnnnnnnnnnnnnnnnnnnnnnnnnnnnnnnnnnnnnnnnnnnnnnnnnnnnnnnnnnnnnnnnnnnnnnnnnnnnnnnaggcgagagctgcgctggcgacaagagcccgccggggcaggcttcgtccaagcgcgcgcgcacggtctacacgagtgcgcnnnnnnnnnnnnnnnnnnnnnnnnnnnnnnnnnnnnnnnnnnnnnnnnnnnnnnnnnnnnnnnnnnnnnnnnnnnnnnnnnnnnnnnnnnnnnnnnnnnnnnnnnnnnnnnnnnnnnnnnnnnnnnnnnnnnnnnnnnnnnnnnnnnnnnnnnnnnnnnnnnnnnnnnnnnnnnnnnnnnnnnnnnnnnnnnnnnnnnnnnnnnnnnnnnnnnnnnnnnnnnnnnnnnnnnnnnnnnnnnnnnnnnnnnnnnnnnnnnnnnnnnnnnnnnnnnnnnnnnnnnnnnnnnnnnnnnnnnnnnnnnnnnnnnnnnnnnnnnnnnnnnnnnnnnnnnnnnnnnnnnnnnnnnnnnnnnnnnnnnnnnnnnnnnnnnnnnnnnnnnnnnnnnnnnnnnnnnnnnnnnnnnnnnnnnnnnnnnnnnnnnnnnnnnnnnnnnnnnnnnnnngggcaacggcagctatgcggaccccacacatacagggaagccccgtcttcgtggggggcagctacgtggagcccatgagcaactctgggccagccctctttggtctaactcacctcccccacgctgcctcgggcgccatggactatgggggcgccgggccgctgggcagcggccaccaccacgggcccgggcctggggagccacaccccacctacacggaccttactgcccaccatccttctcagggaagaattcaggaagcacccaagctcacccacctgtgatggtgggctggtgctatgcgccaggagagtctccccccacccaccttttttctttggttgcnnnnnnnnnnnnnnnnnnnnnnnnnnnnnnnnnnnnnnnnnnnnnnnnnnnnnnnnnnnnnnnncccgcactcctttcccggtttcccccctcgttgggaaggcgtttttatagtttatgtgacgtagcaatcttggttgctggaatggctgtatcagtagcgatatttatctcttcgtgctcctcgataggccactggccctgcaccctttaccttctccactctttgatcagaaacagggtatatgaacaaattttctagtcgagttttcaatgtgaatttgttcgtacattatggctcccgaggggannnnnnnnnnnnnnnnnnnnnnnnnnnnnnnnnnnnnnnnnnnnnnnnnnnnnnnnnnnnnnnnnnnnnnnnnnnnnnnnnnnnnnnnnnnnnnnnnnnnnnnnnnnnnnnnnnnnnnnnnnnnnnnnnnnnnnnnnnnnnnnnnnnnnnnnnnnnnnnnnnnnnnnnnnnnnnnnnnnnnnnnnnnnnnnnnnnnnnnnnnnnnnnnnnnnnnnnnnnnnnnnnnnnnnnnnnnnnnnnnnnnnnnnnnnnnnnnnnnnnnnnnnnnnnnnnnnnnnnnnnnnnnnnnnnnnnnnnnnnnnnnnnnnnnnnnnnnnnnnnnnnnnnnnnnnnnnnnnnnnnnnnnnnnnnnnnnnnnnnnnnnnnnnnnnnnnnnnnnnnnnnnnnnnnnnnnnnnnnnnnnnnnnnnnnnnnnnnnnnnnnnnnnnnnntctgtaaacgcgaaaaatactagatttgttttgagaattctacattccttgctgctcacattctgagaaacaaaaagaaataaagtttttattctgaataatatacgtgttaagaaggggttccttggccgaagacgtgggtctgcgtggaattcaggccgaggcgagccggcagagcaggccgggctcagcagcccttcggctccagcatggggcctggccaggctattcgcctggaagctcggcgaattctcaggatggcggctggggctccaggcggctgcggcagctctggtaacgccgtgcggccggcccgctgggctgcccggttcccagctgctgcggaggtaggccgagggcgcaggggctgccgagtgctgtgctctaaagaaacaaaggcagcccggcccaaggcgcagcgggagcgcacaggtgccccgcggccgagccgggggataacgcagggcggtcttctgctccacgctcttgctcgggtcaaatcggaccaactaacgtctaaacctcgggattagccagccgcgcagaggatgccgagcactttccgggagcaatcggactcctggtctcctctgggatgctttgcagtctattacagtgtcagaaggaaagaatggttcctaaaatctgcacgcggagcaaaacagtttgaaagggactgaggctcacccgggtctccagcaaacggaggaccgagctggggagagtcacctgagccagtccttccctggactgcctgaatcccagcatcagcttccttctgaatgtagtatttggcattctctgaatttatttcctctccatccctcccagctttctttttatggccccagggggagggggagagagcaaggagatccgtatctttgtaataaaaatgcaattttata

SEQ ID NO: 29089 - DNA, 610 bp, Macaca Mulatta
ggatgaaggaggctgtgcgtccgggttgcacgaagagtccaagtcatttctcagaaggttttgataggtgggccttagaggagacgccgccgagcaccgcaagaactggaaagcacgcccctctctgtctgctgggagagccattgagattggcacttctctaagtgaagctgaggagaaggctgtaaatcagccaaaagagccttgaagcattcttttggcatgaggaattgatggctgctggagggaagtgaacaccacgaggagagatggcatctggcctggacccggcctagcagcagctccacctcctgagcccggcccagcgggatgcaccactagaccaccatggacggagcccacagcgcagccctgcagctgcagcagctgcctcccacaagtagcgccagcgccctgagcgagacttccttctcctacaaggaaaacctgattggcgccctcttggcgatctttgggcaccttgtggtcagcattgcacttaacctccagaagtactgccacatccgcctggcaggctgcaaggatccccgggcctatttcaagaccaagacatggtggctgggcctgttcctgatgcttctgggtgagc

SEQ ID NO: 29090 - DNA, 756 bp, Macaca Mulatta
cccttaaaggtaggcagagcccccggctcccaatatgtgttccatggtacactagattagcacgtacaaagagatggaatccaaaaataagaagcttgggagaaaggggggcactgttttctagagaaaagtgtgtttcagaacggtggtctttggcggggggtattgatttttatttgggcttctcacagtggttacagctactctgccttcagaacaatcacagcagagaaaatgtgtcagcatcttcaaggtggcccaaaacatctgaccagctgaatcttattgctaacatacaacaacgacaaatgccattggtgatgacgtgcctctaccaagaatgtgtcagcaccaaaccctggacaaagccccccttcccattcacctggaaaatcagactcaagtaaatctccctggcccctaactcttccctcaattccctagttccatctctgtgagcagctagagagatgtcccgcctaccatagcgggagcctgactgtgacttgggaatcaagcccagctctgcactcttcattttcatcttctttgcctttggggtaggacgctgcagtgaatcccacagccaacaccagctccccactatgactatgaccagggaaagaaactagagagggtcaggattcacccatttggtcaattaactgaggaagtattcattttcataaaacttgcttgccattgaaacacttcaagtgagttatttgggactcttttaaaaaggtagaaggaaag

SEQ ID NO: 29091 - DNA, 163 bp, Macaca Mulatta
ggcatgatcctgcagatctcgggcagcctgcccagcctcagtggcatggagatggcctgtgactatgggaaaaacatccacactgtggctcgggtcccaggccctgcctttggtcaccagatcgcctactgcaacctcctgccgagggaccggtttccaccct

SEQ ID NO: 29092 - DNA, 218 bp, Macaca Mulatta
atgcaggacctgggggtgatctccagcatctcgctgtcctggttcctgaccctcttcctcagtgtcatgcccttcgagagcgctgtggtcatcgtcgactgctttttctatgagggcatcaaggtgatcctgcaggtggccctggccgtcctggacgccaacatggagcagctgctgggctgcagcgacgagggcgaggccatgaccatgctgggcag

SEQ ID NO: 29093 - DNA, 730 bp, Macaca Mulatta
  misc_feature (1)...(730): n = A,T,C or G
agaatgtggaaagggaccaaagagaatctttgccccacctgcacaaaaatcttacagcctgttaccttgtagtcctaactcccccaaggaggagaccctggggatcagttccccagagacagaggccagcataagcctgccaaaggccagtttaaagaaggaagaggaaaaagcaaccacaaagaatggtccaagcagggnnnnnnnnnnnnnnnnnnnnnnnnnnnnnnnnnnnnnnnnnnnnnnnnnnnnnnnnnnnnnnnnnnnnnnnnnnnnnnnnnnnnnnnnnnnnnnnnnnnnnnnnnnnnnnnnnnnnnnnnnnnnnnnnnnnnnnnnnnnnnnnnnnnnnnnnnnnnnnnnnnnnnnnnnnnnnnnnnnnnnnnnnnnnnnnnnnnnnnnnnnnnnnnnnnnnnnnnnnnnnnnnnnnnnnnnnnnnnnnnnnnnnnnnnnnnnnnnnnnnnnnnnnnnnnnnnnnnnnnnnnnnnnnnnnnnnnnnnnnnnnnnnnnnnnnnnnnnnnnnnnnnnnnnnnnnnnnnnnnnnnnnnnnnnnnnnnnnnnnnnnnnnnnnnnnnnnnnnnnnnnnnnnnnnnnnnnnnnnnnnnnnnaagatgagaaggtggagaaaactcaaagtggacatgagcacagacaggaagaccaactaaaggagacagttcaggatcattctcagatcacggacctgcaaaaaggagagagaagtggttttggt

SEQ ID NO: 29094 - DNA, 3123 bp, Macaca Mulatta
  misc_feature (1)...(3123): n = A,T,C or G
gttcagaaatgtccagaaatgacaaagaaccgttttttgtgaagtttttaaagtcttcagacaattccaaatgnnnnnnnnnnnnnnnnnnnnnnnnnnnnnnnnnnnnnnnnnnnnnnnnnnnnnnnnnnnnnnnnnnnnnnnnnnnnnnnnnnnnnnnnnnnnnnnnnnnnnnnnnnnnnnnnnnnnnnnnnnnnnnnnnnnnnnnnnnnnnnnnnnnnnnnnnnnnnnnnnnnnnnnnnnnnnnnnnnnnnnnnnnnnnnnnnnnnnnnnnnnnnnnnnnnnnnnnnnnnnnnnnnnnnnnnnnnnnnnnnnnnnnnnnnnnnnnnnnnnnnnnnnnnnnnnnnnnnnnnnnnnnnnnnnnnnnnnngaagaagttcataaatatgtacaaatgatgggcggacgggtatacagagaccttaacgtatcagtgactcaccttattgcgggggaagttggtagcaaaaatatttagttgctgcaaacctgaannnnnnnnnnnnnnnnnnnnnnnnnnnnnnnnnnnnnnnnnnnnnnnnnnnnnnnnnnnnnnnnnnnnnnnnnnnnnnnnnnnnnnnnnnnnnnnnnnnnnnnnnnnnnnnnnnnnnnnnnnnnnnnnnnnnnnnnnnnnnnnnnnnnnnnnnnnnnnnnnnnnnnnnnnnnnnnnnnnnnnnnnnnnnnnnnnnnnnnnnnnnnnnnnnnnnnnnnnnnnnnnnnnnnnnnnnnnnnnnnnnnnnnnnnnnggtcagaagtatgagtgtgccaagagatggaatgtacactgtgtgaccacgcagtggttttttgacagtatcgagaaaggtttttgtcaggatgaatccatgtacaagacagaacctagaccagaagcaaagactatgcccaattcttcaactcctactggccagatcaacacaattgatagtnnnnnnnnnnnnnnnnnnnnnnnnnnnnnnnnnnnnnnnnnnnnnnnnnnnnnnnnnnnnnnnnnnnnnnnnnnnnnnnnnnnnnnnnnnnnnnnnnnnnnnnnnnnnnnnnnnnnnnnnnnnnnnnnnnnnnnnnnnnnnnnnnnnnnnnnnnnnnnnnnnnnnnnnnnnnnnnnnnnnnnnnnnnnnnnnnnnnnnnnnnnnnnnnnnnnnnnnnnnnnnnnnnnnnnnnnnnnnnnnnnnnnnnnnnnnnnnnnnnnnnnnnnnnnnnnnnnnnnnnnnnnnnnnnnnnnnnnnnnnnnnnnnnnnnnnnnnnnnnnnnnnnnnnnnnnnnnnnnnnnnnnnnnnnnnnnnnnnnnnnnnnnnnnnnnnnnnnnnnnnnnnnnnnnnnnnnnnnnnnnnnnnnnnnnnnnnnnnnnnnnnnnnnnnnnnnnnnnnnnnnnnnnnnnnnnnnnnnnnnnnnnnnnnnnnnnnnnnnnnnnnnnnnnnnnnnnnnnnnnnnnnnnnnnnnnnnnnnnnnnnnnnnnnnnnnnnnnnnnnnnnnnnnnnnnnnnnnnnnnnnnnnnnnnnnnnnnnnnnnnnnnnnnnnnnnnnnnnnnnnnnnnnnnnnnnnnnnnnnnnnnnnnnnnnnnnnnnnnnnnnnnnnnnnnnnnnnnnnnnnnnnnnnnnnnnnnnnnnnnnnnnnnnnnnnnnnnnnnnnnnnnnnnnnnnnnnnnnnnnnnnnnnnnnnnnnnnnnnnnnnnnnnnnnnnnnnnnnnnnnnnnnnnnnnnnnnnnnnnnnnnnnnnnnnnnnnnnnnnnnnnnnnnnnnnnnnnnnnnnnnnnnnnnnnnnnnnnnnnnnnnnnnnnnnnnnnnnnnnnnnnnnnnnnnnnnnnnnnnnnnnnnnnnnnnnnnnnnnnnnnnnnnnnnnnnnnnnnnnnnnnnggttacttgcatagactttcagactttgtttgatccaaagtcgaatcctctcttcacaccagtcccagtaatgacaggaatgactcctttagaggattgtgttatttcatttagccagtgtgctggagcagaaaaagagtctttaacattcctagcaaacctccttggagcaannnnnnnnnnnnnnnnnnnnnnnnnnnnnnnnnnnnnnnnnnnnnnnnnnnnnnnnnnnnnnnnnnnnnnnnnnnnnnnnnnnnnnnnnnnnnnnnnnnnnnnnnnnnnnnnnnnnnnnnnnnnnnnnnnnnnnnnnnnnnnnnnnnnnnnnnnnnnnnnnnnnnnnnnnnnnnnnnnnnnnnnnnnnnnnnnnnnnnnnnnnnnnnnnnnnnnnnnnnnnnnnnnnnnnnnnnnnnnnnnnnnnnnnnnnnnnnnnnnnnnnnnnnnnnnnnnnnnnnnnnnnnnnnnnnnnnnnnnnnnnnnnnnnnnnnnnnnnnnnnnnnnnnnnnnnnnnnnnnnnnnnnnnnnnnnnnnnnnnnnnnnnnnnnnnnnnnnnnnnnnnnnnnnnnnnnnnnnnnnnnnnnnnnnnnnnnnnnnnnnnnnnnnnnnnnnnnnnnnnnnnnnnnnnnnnnnnnnnnnnnnnnnnnnnnnnnnnnnnnnnnnnnnnnnnnnnnnnnnnnnnnnnnnnnnnnnnnnnnnnnnnnnnnnnnnnnnnnnnnnnnnnnnnnnnnnnnnnnnnnnnnnnnnnnnnnnnnnnnnnnnnnnnnnnnnnnnnnnnnnnnnnnnnnnnnnnnnnnnnnnnnnnnnnnnnnnnnnnnnnnnnnnnnnnnnnnnnnnnnnnnnnnnnnnnnnnnnnnnnnnnnnnnnnnnnnnnnnnnnnnnnnnnnnnnnnnnnnnnnnnnnnnnnnnnnnnnnnnnnnnnnnnnnnnnnnnnnnnnnnnnnnnnnnnnnnnnnnnnnnnnnnnnnnnnnnnnnnnnnnnnnnnnnnnnnnnnnnnnnnnnnnnnnnnnnnnnnnnnnnnnnnnnnnnnnnnnnnnnnnnnnnnnnnnnnnnnnnnnnnnnnnnnnnnnnnnnnnnnnnnnnnnngtgcccaagagtataaacatcttcctgaatctctttatccacatacttacaatcccaaaatgagcttggatatcagtgcagtgcaagacggccgactctgtaatagtcgactactctcagctgtgtctgcaacaaaggatgannagccagatcctttgattttagaagaaaatgatgtagactatatggc

SEQ ID NO: 29095 - DNA, 229 bp, Macaca Mulatta
agataatgaaaatgtagtaaatgagtactcctcagacctggaaaagcaccaattatatatagatgagactgtgaatagtaatatcccaactaatcttcgtgtgcttcgttcaatcctggaaaacctgagaagcaaaatacaaaagttagaatctgatgtctcagctcaaatggaatattgtcgcaccccatgcactgtcagttgtaatattcctgtggtgtctggcaaa

SEQ ID NO: 29096 - DNA, 2484 bp, Macaca Mulatta
  misc_feature (1)...(2484): n = A,T,C or G
ggggcggggtgcgccctccctccgcggccagggcgctctggagccgggacccgagcctgcagccgagcgccgctcccagccccggacacccggctcagccaagcatccttcctgggggccgagaaagtggggccactctgccgttccgaggacctgagaggagcccttggtcccccgggccccggtgccctggggcgcacacgtccagcccagcctgagcctgcatttcctgagccgggatttggggcgagatggccgcaggcggcggtgcgcccgagccccgcgtcctcgtctgcctcggggcgctcctggccggctgggtcgccttaggtaaggggccgnnnnnnnnnnnnnnnnnnnnnnnnnnnnnnnnnnnnnnnnnnnnnnnnnnnnnnnnnnnnnnnnnnnnnnnnnnnnnnnnnnnnnnnnnnnnnnnnnnnnnnnnnnnnnnnnnnnnnnnnnnnnnnnnnnnnnnnnnnnnnnnnnnnnnnnnnnnnnnnnnnnnnnnnnnnnnnnnnnnnnnnnnnnnnnnnnnnnnnnnnnnnnnnnnnnnnnnnnnnnnnnnnnnnnnnnnnnnnnnnnnnnnnnnnnnnnnnnnnnnnnnnnnnnnnnnnnnnnnnnnnnnnnnnnnnnnnnnnnnnnnnnnnnnnnnnnnnnnnnnnnnnnnnnnnnnnnnnnnnnnnnnnnnnnnnnnnnnnnnnnnnnnnnnnnnnnnnnnnnnnnnnnnnnnnnnnnnnnnnnnnnnnnnnnnnnnnnnnnnnnnnnnnnnnnnnnnnnnnnnnnnnnnnnnnnnnnnnnnnnnnnnnnnnnnnnnnnnnnnnnnnnnnnnnnnnnnnnnnnnnnnnnnnnnnnnnnnnnnnnnnnnnnnnnnnnnnnnnnnnnnnnnnnnnnnnnnnnnnnnnnnnnnnnnnnnnnnnnnnnnnnnnnnnnnnnnnnnnnnnnnnnnnnnnnnnnnnnnnnnnnnnnnnnnnnnnnnnnnnnnnnnnnnnnnnnnnnnnnnnnnnnnnnnnnnnnnnnnnnnnnnnnnnnnnnnnnnnnnnnnnnnnnnnnnnnnnnnnnnnnnnnnnnnnnnnnnnnnnnnnnnnnnnnnnnnnnnnnnnnnnnnnnnnnnnnnnnnnnnnnnnnnnnnnnnnnnnnnnnnnnnnnnnnnnnnnnnnnnnnnnnnnnnnnnnnnnnnnnnnnnnnnnnnnnnnnnnnnnnnnnnnnnnnnnnnnnnnnnnnnnnnnnnnnnnnnnnnnnnnnnnnnnnnnnnnnnnnnnnnnnnnnnnnnnnnnnnnnnnnnnnnnnnnnnnnnnnnnnnnnnnnnnnnnnnnnnnnnnnnnnnnnnnnnnnnnnnnnnnnnnnnnnnnnnnnnnnnnnnnnnnnnnnnnnnnnnnnnnnnnnnnnnnnnnnnnnnnnnnnnnnnnnnnnnnnnnnnnnnnnnnnnnnnnnnnnnnnnnnnnnnnnnnnnnnnnnnnnnnnnnnnnnnnnnnnnnnnnnnnnnnnnnnnnnnnnnnnnnnnnnnnnnnnnnnnnnnnnnnnnnnnnnnnnnnnnnnnnnnnnnnnnnnnnnnnnnnnnnnnnnnnnnnnnnnnnnnnnnnnnnnnnnnnnnnnnnnnnnnnnnnnnnnnnnnnnnnnnnnnnnnnnnnnnnnnnnnnnnnnnnnnnnnnnnnnnnnnnnnnnnnnnnnnnnnnnnnnnnnnnnnnnnnnnnnnnnnnnnnnnnnnnnnnnnnnnnnnnnnnnnnnnnnnnnnnnnnnnnnnnnnnnnnnnnnnnnnnnnnnnnnnnnnnnnnnnnnnnnnnnnnnnnnnnnnnnnnnnnnnnnnnnnnnnnnnnnnnnnnnnnnnnnnnnnnnnnnnnnnnnnnnnnnnnnnnnnnnnnnnnnnnnnnnnnnnnnnnnnnnnnnnnnnnnnnnnnnnnnnnnnnngaaagcttggaaagctacattgaagatgagctcttcattcagctttgactcgacctgtacccctggtgggtgcttgcactagcaacatttgggtctcagnnnnnnnnnnnccaagcacacacatctttccttccatttattgaaaaacannnnnnnnnnnnnnnnnnnnnnnnnnnnnnnnnnnnnnnnnnnnnnnnnnnnnnnnnnnnnnnnnnnnnnnnnnnnnnnnnnnnnnnnnnnnnnnnnnnnnnnnnnnnnnnnnnnnnnnnnnnnnnnnnnnnnnnnnnnnnnnnnnnnnnnnnnnnnnnnnnnnggaaaacacaagatggaaaattgcaataacccatgcactgagacttagaaaatcatccttactaggtaaaatgtattatgatgcaataagggccaactgatatttctcacgttgggactggccaggaactgctgcaaagaaaaaaaaacagctccttctccattatttacattttaagatgtggtggggggagattgggagaaattaattctgaggttatcatatgcatttttaaaaagataatggaataaagctatttttaagta

SEQ ID NO: 29097 - DNA, 1921 bp, Macaca Mulatta
  misc_feature (1)...(1921): n = A,T,C or G
ggaatacgtcgcctacagccacacaggccgcatcatccctgccatctggttccgctacgacctcagccccatcacggtcaagtacacagagagacggcagccgctctacagattcatcaccacgnnnnnnnnnnnnnnnnnnnnnnnnnnnnnnnnnnnnnnnnnnnnnnnnnnnnnnnnnnnnnnnnnnnnnnnnnnnnnnnnnnnnnnnnnnnnnnnnnnnnnncattgacgccgcacccagcctaacagccgaggactctgggcatcgccagccttgcctccaacgccctgtctcctttggccctcaatctggcctcaaatctggctgtgtcccaaagtgtgtgtgggaggtggggggaaagtagaggatggctcgatgtttcgcagctacctcgtttccccgtgtttcattttagacaaattacactgcccgaagttgcagttcccctttccctggggagccccaagagtagagtcaggcaaggggtggggagtccagggatcttggggacccctcctaggagagctgcagtctcttccctcttaggggaatatcccagaacgcatatcgatcagctcgcagccaggcttcgacaatctcgtggcccccactgtgtggacacactaatgatttggtttcttccctgggcagccaacctgccccagaggcgccagacctgggctgtcagctttgggaccnnnnnnnnnnnnnnnnnnnnnnnnnnnnnnnnnnnnnnnnnnnnnnnnnnnnnnnnnnnnnnnnnnnnnnnnnnnnnnnnnnnnnnnnnnnnnnnnnnnnnnnnnnnnnnnnnnnnnnnnnnnnnnnnnnnnnnnnnnnnnnnnnnnnnnnnnnnnnnnnnnnnnnnnnnnnnnnnnnnnnnnnnnnnnnnnnnnnnnnnnnnnnnnnnnnnnnnnnnnnnnnnnnnnnnnnnnnnnnnnnnnnnnnnnnnnnnnnnnnnnnnnnnnnnnnnnnnnnnnnnnnnnnnnnnnnnnnnnnnnnnnnnnnnnnnnnnnnnnnnnnnnnnnnnnnnnnnnnnnnnnnnnnnnnnnnnnnnnnnnnnnnnnnnnnnnnnnnnnnnnnnnnnnnnnnnnnnnnnnnnnnnnnnnnnnnnnnnnnnnnnnnnnnnnnnnnnnnnnnnnnnnnnnnnnnnnnnnnnnnnnnnnnnnnnnnnnnnnnnnnnnnnnnnnnnnnnnnnnnnnnnnnnnnnnnnnnnnnnnnnnnnnnnnnnnnnnnnnnnnnnnnnnnnnnnnnnnnnnnnnnnnnnnnnnnnnnnnnnnnnnnnnnnnnnnnnnnnnnnnnnnnnnnnnnnnnnnnnnnnnnnnnnnnnnnnnntggcccacttgccactgtgctcccccatcagctggtcacatgccaacacatttccagcccctggggcagctccagggtgccccacctgctcctgaggtgggtccctaccctgctgctcctcttcatcctttcccttttgtcctgaaagggaggggcaatggtccaggcattaattccacccagggaattttagctatgccctcatatcccagggagagagccacacgcctgttttccatttatagcaagattgtttgcatacttttgtaatgaaggggagtgtccagtggaaggatttttaaaattatcttatggatagctcaagtctctgccatttgtaatttttggctctaagctccaattggagaagcttctccttgtgcatatgagttgactgatgttgtgagtgtaaatgcatttggctatttctggtatctgtggccacttggatggatttctttttttacattctgttcctcagttacagaaaggagtccctttggtgtgtgaatatgtgtgcctgtagagggtggggcagggtggggtggggatggaaatgtgtggcatgcacatgagttgaaattc

SEQ ID NO: 29098 - DNA, 645 bp, Macaca Mulatta
taaacatattattatttttaaaagaaatccagtaacaataaaggttgttctattctctgccttcccatttagataggctttaaaccagcaggaggcatccgcagtgcaaaggattcccttgcttggctctctcttgtaaaggaggagcttggagatgagtggctgaagccagaactctttcgtataggtgccagtactctgctctcggacatcgagaggcaggtgagtaataatctctgtctttggaataaattgacacgtgtttttgagaaaggaattgaaaagtccaattgagaactggagataaaaactcatctgatggacctcatcctacccaatcctctaccttttcttccaagcaaacctccatcacaagtgagtagggtggagattctgctgaagcgcatactagtgaggctttaaaatgaaatgttcgttaaaactattcattattatttgatagtataactattaactgatgtgtataattatagaatgattgttaattaaactctgcttttcctcacagatataccatcatgtgactggaagatacgcagcttatcatgatcttccaatgtcttaaattagtcaccacttccagaaaagttctttaggacaacgcttaaaaattatttttctaca

SEQ ID NO: 29099 - DNA, 706 bp, Macaca Mulatta
  misc_feature (1)...(706): n = A,T,C or G
taagtatattcagtaataatttattaaactgttgtttgataaagaaacatntaagtaataggctgaaagatatataaagaactttttatagaatattaaataattttccttctttgtcaggaactttttttaagtttatgcagctggtagtatttcttgaaaaaattaagttatttttctgccttaataatgtagactattcatttaaccacttgagattcacaacaatttagatttaagcttccttttccaataatagaaacacttcaaaaatcttttcaccgatatcttactaatttatttgagcgtcctgtagacagtattctttaacatttgttctaattacctcactgtattctattttaacagatttcagatcagaaccacagctacccaagaaaacccatctccaaattgtgtatggattcatgtgtcagtcatttatgaccagctgtgtagtgtgccttcatatagtatttgtgagaagaagttttcaatgtaaggggaagggtgaaggaggaaagagaaatatgtgagctagtaaggtggacagaaaaaggaacagagaagagtaacagctgaggtcaaaataaatgcagaaaatgtttagtgagcttggcaaactgtaatcttaaccaagaaattgaagggagaggctgtgatttctgtatttgtccacctacaggtaggccagtgttattgttct

SEQ ID NO: 29100 - DNA, 95 bp, Macaca Mulatta
catcttgcatcagcctgtggatgtatgcctaccaccaggctccttcaccagcaaagggaaaaagaagcgtttcacaacaaattcttctttctggg

SEQ ID NO: 29101 - DNA, 375 bp, Macaca Mulatta
  misc_feature (1)...(375): n = A,T,C or G
aaaaattgtgcaaatgaagctgtggttcaaaagattttggacagggtgctgtcgagatacgatgtccgcctgagaccgaattttggagnnaggctgggaccttgatgacaacagtgtcaagagtggctgccttgccgttgaggagcaactcaagtgtgatactaacagtacctggggccttaatgaggatgagctcatggcccatggccatgagaaggacaatagctcagagtctgaggatagttgccccccaagccctgggtgctccttcactgaagggttctcctttgatctctttaaccctgactacgtccctaaggttgacaagtggtcccggttcctcttccctctggcctttgggttattcaacattgt

SEQ ID NO: 29102 - DNA, 2124 bp, Macaca Mulatta
  misc_feature (1)...(2124): n = A,T,C or G
tccattataaagaagagtttaaaaagtccaaggataagtgtacatttgtgactgacactcctatgctaaaccatgtnnnnnnnnnnnnnnnnnnnnnnnnnnaggcaaaatataaaggcaccattaaagcagatctttctaattctctttataagcggatgccagccacaattgacagtgtttttgcaagagaagttacacagctccagagtgaggtgnnnnnnnnnnnnnnnnnnnnnnnnnnnnnnnnnnnnnnnnnnnnnnnnnnnnnnnnnnnnnnnnnnnnnnnnnnnnnnnnnnnnnnnnnnnnnnnnnnnnnnnnnnnnnnnnnnnnnnnnnnnnnnnnnnnnnnnnnnnnnnnnnnnnnnnnnnnnnnnnnnnnnnnnnnnnnnnnnnnnnnnnnnnnnnnnnnnnnnnnnnnnnnnnnnnnnnnnnnnnnnnnnnnnnnnnnnnnnnnnnnnnnnnnnnnnnnnnnnnnnnnnnnnnnnnnnnnnnnnnnnnnnnnnnnnnnnnnnnnnnnnnnnnnnnnnnnnnnnnnnnnnnnnnnnnnnnnnnnnnnnnnnnnnnnnnnnnnnnnnnnnnnnnnnnnnnnnnnnnnnnnnnnnnnnnnnnnnnnnnnnnnnnnnnnnnnnnnnnnnnnnnnnnnnnnnnnnnnnnnnnnnnnnnnnnnnnnnnnnnnnnnnnnnnnnnnnnnnnnnnnnnnnnnnnnnnnnnnnnnnnnnnnnnnnnnnnnnnnnnnnnnnnnnnnnnnnnnnnnnnnnnnnnnnnnnnnnnnnnnnnnnnnnnnnnnnnnnnnnnnnnnnnnnnnnnnnnnnnnnnnnnnnnnnnnnnnnnnnnnnnnnnnnnnnnnnnnnnnnnnnnnnnnnnnnnnnnnnnnnnnnnnnnnnnnnnnnnnnnnnnnnnnnnnnnnnnnnnnnnnnnnnnnnnnnnnnnnnnnnnnnnnnnnnnnnnnnnnnnnnnnnnnnnnnnnnnnnnnnnnnnnnnnnnnnnnnnnnnnnnnnnnnnnnnnnnnnnnnnnnnnnnnnnnnnnnnnnnnnnnnnnnnnnnnnnnnnnnnnnnnnnnnnnnnnnnnnnnnnnnnnnnnnnnnnnnnnnnnnnnnnnnnnnnnnnnnnnnnnnnnnnnnnnnnnnnnnnnnnnnnnnnnnnnnnnnnnnnnnnnnnnnnnnnnnnnnnnnnnnnnnnnnnnnnnnnnnnnnnnnnnnnnnnnnnnnnagaaagaatacaagaaagatctggagtcaataattaaagggaaaggaatgcaagctggctctgacacccttgaaatgcagcacgctaagaaggctgcagagatcgcgagtgannnnnnnnnnnnnnnnnnnnnnnnnnnnnnnnnnnnnnnnnnnnnnnnnnnnnnnnnnnnnnnnnnnnnnnnnnnnnnnnnnnnnnnnnnnnnnnnnnnnnnnnnnnnnnnnnnnnnnnnnnnnnnnnnnnnnnnnnnnnnnnnnnnnnnnnnnnnnnnnnnnnnnnnnnnnnnnnnnnnnnnnnnnnnnnnnnnnnnnnnnnnnnnnnnnnnnnnnnnnnnnnnnnnnnnnnnnnnnnnnnnnnnnnnnnnnnnnnnnnnnnnnnnnnnnnnnnnnnnnnnnnnnnnnnnnnnnnnnnnnnnnnnnnnnnnnnnnnnnnnnnnnnnnnnnnnnnnnnnnnnnnnnnnnnnnnnnnnnnnnnnnnnnnnnnnnnnnnnnnnnnnnnnnnnnnnnnnnnnnnnnnnnnnnnnnnnnnnnnnnnnnnnnnnnnnnnnnnnnnnnnnnnnnnnnnnnnnnnnnnnnnnnnnnnnnnnnnnnnnnnnnnnnnnnnnnnnnnnnnnnnnnnnnnnnnnnctccagtataaagagcaaaactacaaagccactccggtaagcatgaccccggagatggagagagtgaggcgaaaccaggagcagctgagtgcggcaagnnnnnnnnnnnnnnnnnnnnnnnnnnnnnnnnnnnnnnnnnnnnnnnnnnnnnnnnnnnnnnnnnnnnnnnnnnnnnnnnnnnnnnnnnnntttattacaaaggtcatctgggaagagctactgctttaagtgtaactcctgaaatggaaagagtgaagaagaatcaagaaaatattagctcggcaag

SEQ ID NO: 29103 - DNA, 855 bp, Macaca Mulatta
  misc_feature (1)...(855): n = A,T,C or G
ggtcagatctgattaagaaaaaggctggcaaaaatataaccggccaggccctggaatgtatttcaagaaaagcagcaccaagaaggctttatcctaaggagactctcacaaacatctctgcattggaaaactgtggaagccctgcaatgaaaagagcgaatggagatgtcagtgaagtatcagaaaacagtgtcagcaacacagaggaagtgccagggtctctgtgtctcagaaagnnnnnnnnnnnnnnnnnnnnnnnnnnnnnnnnnnnnnnnnnnnnnnnnnnnnnnnnnnnnnnnnnnnnnnnnnnnnnnnnnnnnnnnnnnnnnnnnnnnnnnnnnnnnnnnnnnnnnnnnnnnnnnnnnttaatggaagtgatgccaaatatttctgtattatctgacatagaacagtatcctccactgccaagacagcctgagtttggagtggaataaggtggaagacaaatgtctctgttctttggccctttaagagttagctttttacctgtacaaatggactaaaaaatctggcacaaaacatagttatgtaatgtcttatgatgtgtgcctctccctcccccaaacctgtttacagtcaattataacctgacaaacgagacttttgtaacatcttattgttaagtctttctgaaaccttcaaacctaaggaaatgttaactggcaagcaattgtagtttagactttgtgagaaattcataaaggtggcggagtagattagcatgctttagaactgtgaatagagttctaactganaccagaatgaatttggctcttgtagcttagtaatgagtcatagctacccacaataacctaataaaactcaagttcatcc

SEQ ID NO: 29104 - DNA, 1631 bp, Macaca Mulatta
  misc_feature (1)...(1631): n = A,T,C or G
tctgatgaccgggattccaagcgggattcccttgaggagggggagctgagagatcaccgcatggagatcacaataaggaactccccatatagaagagaagactccatggaagacagncagaggagaggaagatgattctttggccatcaaaccaccccagcaaatgtctcggaaagaaaaagctcatcannnnnnnnnnnnnnnnnnnnnnnnnnnnnnnnnnnnnnnnnnnnnnnnnnnnnnnnnnnnnnnnnnnnnnnnnnnnnnnnnnnnnnnnnnnnnnnnnnnnnnnnnnnnnnnnnnnnnnnnnnnnnnnnnnnnnnnnnnnnnnnnnnnnnnnnnnnnnnnnnnnnnnnnnnnnnnnnnnnnnnnnnnnnnnnnnnnnnnnnnnnnnnnnnnnnnnnnnnnnnnnnnnnnnnnnnnnnnnnnnnnnnnnnnnnnnnnnnnnnnnnnnnnnnnnnnnnnnnnnnnnnnnnnnnnnnnnnnnnnnnnnnnnnnnnnnnnnnnnnnnnnnnnagtgtccgcacatcaccgaacgatgagagaggactacggcgacaaagtgaaagccagccactggagtcgaagcccgccgcggccaccacgggagcggttcgagttgggagacagccggaagccaggtgaggccaggccggcgcctgcgcagaaggcagcacagtntaaaagaagagaaaatggaagaaagagacctgctgtccgacttacaggacatcagcgacagcgagaggaagaccagctcagccgagtcctcatcagnnnnnnnnnnnnnnnnnnnnnnnnnnnnnnnnnnnnnnnnnnnnnnnnnnnnnnnnnnnnnnnnnnnnnnnnnnnnnnnnnnnnnnnnnnnnnnnnnnnnnnnnnnnnnnnnnnnnnnnnnnnnnnnnnnnnnnnnnnnnnnnnnnnnnnnnnnnnnnnnnnnnnnnnnnnnnnnnnnnnnnnnnnnnnnnnnnnnnnnnnnnnnnnnnnnnnnnnnnnnnnnnnnnnnnnnnnnnnnnnnnnnnnnnnnnnnnnnnnnnnnnnnnnnnnnnnnnnnnnnnnnnnnnnnnnnnnnnnnnnnnnnnnnnnnnnnnnnnnnnnnnnnnnnnnnnnnnnnnnnnnnnnnnnnnnnnnnnnnnnnnnnnnnnnnnnnnnnnnnnnnnnnnnnnnnnnnnnnncagggctgccggagcgtcgaggagttccagtgcctgaacaggatcgaggagggcacctatggagtggtctacagagcaaaagataagaaaacagnnnnnnnnnnnnnnnnnnnnnnnnnnnnnnnnnnnnnnnnnnnnnnnnnnnnnnnnnnnnnnnnnnnnnnnnnnnnnnnnnnnnnnnnnnnnnnnnnnnnnnnnnnnnnnnnnnnnnnnnnnnnnnnnnnnaggtgggtgacttcgggttggcgcgggagtacggatctcctctgaaggcctacaccccggtcgtggtgaccctgtggtaccgcgccccagagctgctgcttggtgccaaggnaggaatactccacagccgtcgacatgtggtcggtgggctgcatcttcggggagctgctgactcagaagcctctgttcccagggaagtcggacatcgatcagatcaacaaaggttcaagg

SEQ ID NO: 29105 - DNA, 1090 bp, Macaca Mulatta
  misc_feature (1)...(1090): n = A,T,C or G
tctggaatgattataaattgcgctgggatccaatggaatatgatggcattgagactcttcgagttcccgcggataagatttggaagcccgacattgttctctataacaantgctgttggtgacttccaagtccaaggcaagacaaaagctcttcttaaatacaatnnnnnnnnnnnnnnnnnnnnnnnnnnnnnnnnnnnnnnnnnnnnnnnnnnnnnnnnnnnnnnnnnnnnnnnnnnnnnnnnnnnnnnnnnnnnaaatttggttcctggacgtatgacaaagctgaaattgatcttctaattattggatcaaaagtggatatgaatgatttttgggaaaacagtgaatgggaaattattgatgcctctggctacaaacatgatatcaaatacaactgttgtgaagagatatacacagatataacctattctttctacattagaagattgccgatgttttacacaattaatctgatcatcccctgtctctttatttcatttctaaccgtgttggtcttttaccttccttcagactgtggtgaaaaagtgacgctttgtatttcagtcctgctttctctgactgtgtttttgctggtcatcacagagaccatcccgtccacatctctggtggtcccactggtgggtgagtacctgctgtttaccatgatctttgtcacactgtccatcgtggtgactgtgtttgtgttgaacatacactaccgcaccccagccacacacaccatgcccaggtgggtgaagacagttttcctgaagctgctgccccgagtcctgctgatgaggtggcctctggacaagacagggggcacaggctctgatacagtgcccagaggccttgccaggaggcctgccaaaggcaagtttgcaagccttggggaacccagacatcttaaagaatgcttccactatcacaaatcaaatgaacttgccaccagcaagaggagattgaatcatcagccgttacagtggatggtagaaaattgggagcactcgcctgaagttgaagatgtgattaacagtgttcaattcatagcggaaaacatgaagagccacaatgaaaccaaggaggt

SEQ ID NO: 29106 - DNA, 247 bp, Macaca Mulatta
  misc_feature (1)...(247): n = A,T,C or G
agaagagtaattattcctgagaaataatcaagaacatatctaattcaaactaatgatgtgaacgatttagttttcatgtcaggtatgtgattctgctctttcttgagtaaaatttaagtgtttaaatttgaggtcaaggagaagaaagtggaccaaaatttaatatagataatatttttctaatggaaataaaatagacatgcagatttcnnnnnnnnnnnnnnnnnnnnnnnnnnnnnnnnnnnnn

SEQ ID NO: 29107 - DNA, 200 bp, Macaca Mulatta
  misc_feature (1)...(200): n = A,T,C or G
ncagccgcctcgcatatttagtcttgccgggagtggtgtgattcccgaccaagatggcggcagtagggagagtcggctccttcggttcttctccgccgggattatctgcgacttacacaggcggccccttgagcaacgagatagcgtcgggcaacggtggcgccgcggcaggcgacgacgaggacgggcagaacctttgg

SEQ ID NO: 29108 - DNA, 729 bp, Macaca Mulatta
tcaacgagttcatactgggagaaaggcatgagtgtgggcagtgtgggaaatcctttagccgaagatctagccttattatacatctgagagttcacactggagaaaggccttatgagtgcagtgaatgtaagaaatcctttgctgaaaactccagccttattaaacacttgagagttcacactggagaaaggccatatgaatgcattgattgtggaaaatcatttcgccacagttcttcgttccgtcgccatcagagagttcatactggaatgaggctttgtaagtgaagcaaattttgggaattctcttgcccaggctttttgctccttcaaggcgagagagttcacactggatcaaggtgttatgagtgtggcaaatggggaatgttctttagctggaatgctagcttctttacataaaagagtgctaccactgaagaagtgccttttgagtgcaatgaatgtgagaaagccttcatcatctctcattggttaccagaatatttacatgaggaaaataccacagatgtggaggcaatattatttcttcttcagtttaacactggaggagaccccttatgaggatgccatctgcctaaattgaatgtgccatacatcaaatagctgcatacattccaggtatgtgggaaccacatagtatttttcaacctgcccaggtctcttgctagacttctatgactgacagttctcttctaaaaagcatttcacc

SEQ ID NO: 29109 - DNA, 85 bp, Macaca Mulatta
ctcattcccttggtgctgttcgtgagtgtggcggcgggtggagcctcgtcttttgctgtgtattctctttggaaaaccgatgtga

SEQ ID NO: 29110 - DNA, 727 bp, Macaca Mulatta
caatgaatttcccctgtgcatagttattaatagtgtgggtattattaaaaactaatttgtaagataggcattttaagcaagttgaggtgcttaggaaacattgtaagaataagtttgaggaaatgttagctgacacagctgagagatcagattttcatgttctaccactgtaatggaacctcatttgggtattcttctagacctttgctagctgtgtggtctgaggaccagtaagtaggattggcattatctggtatcttgttaaaaatgcagaatttcagtgccactctaggtctactaaattagaatttgcattcttaacaaggttcccaagtgattgttatgagaagaaagtatcagagtgcaaacagattacttgtctgatatgtagaactaccagtagtctcacagctctagatcaaatgtgtcagacactaggtcattataatcttcattggttttgacagctaattaattagtttaataatattgacatatggcttcttaagtatttgaattctaaattgctaatgatccttatttttgcaataaaaaatgtaacagtttatatttttcttgttaactataaatggaatcagagctgcaaatacctgaagttttaagtatgaaaaggggtgccacccttttatatactgcacaacaaatatgcatttgtatattcttttaaaaaaatctctgaaggcttactcagtgaaatggttctgat

SEQ ID NO: 29111 - DNA, 4016 bp, Macaca Mulatta
  misc_feature (1)...(4016): n = A,T,C or G
cacaccacagcagcctccatccgaaccaagaaagcctccaaagccaggaagataattgctaaggttataaatactgacactgagcatatacaggctgcaaatgtcactgagacagctaccaggcagattgaggcctcagtaatagctatcaggcccaaaaaatccaagggcaagaaggctgccagtaggggcccaaattctgtctctgagatttctgaggccctacttgccactcaaatggtcacaaaccaggccctggcagccaccctgcgggtcaagagagggtctagggctcggaaggcttccactaaggctcgggcaactgaaagccagactccaaatgctgaccaaggggcccaggccaagatggcctctgctcagaccaacgtaagtgcccttgagactcaggttgatgctgctgtccaggccctggcagatgactatctggctcagttgagtctggagcccacaaccaggacccggggcaagagaaaccgaaannnnnnnnnnnnnnnnnnnnnnnnnnnnnnnnnnnnnnnnnnnnnnnnnnnnnnnnnnnnnnnnnnnnnnnnnnnnnnnnnnnnnnnnnnnnnnnnnnnnnnnnnnnnnnnnnnnnnnnnnnnnnnnnnnnnnnnnnnnnnnnnnnnnnnnnnnnnnnnnnnnnnnnnnnnnnnnnnnnnnnnnnnnnnnnnnnnnnnnnnnnnnnnnnnnnnnnnnnnnnnnnnnnnnnnnnnnnnnnnnnnnnnnnnnnnnnnnnnnnnnnnnnnnnnnnnnnnnnnnnnnnnnnnnnnnnnnnnnnnnnnnnnnnnnnnnnnnnnnnnnnnnnnnnnnnnnnnnnnnnnnnnnnnnnnnnnnnnnnnnnnnnnnnnnnnnnnnnnnnnnnnnnnnnnnnnnnnnnnnnnnnnnnnnnnnnnnnnnnnnnnnnnnnnnnnnnnnnnnnnnnnnnnnnnnnnnnnnnnnnnnnnnnnnnnnnnnnnnnnnnnnnnnnnnnnnnnnnnnnnnnnnnnnnnnnnnnnnnnnnnnnnnnnnnnnnnnnnnnnnnnnnnnnnnnnnnnnnnnnnnnnnnnnnnnnnnnnnnnnnnnnnnnnnnnnnnnnnnnnnnnnnnnnnnnnnnnnnnnnnnnnnnnnnnnnnnnnnnnnnnnnnnnnnnnnnnnnnnnnnnnnnnnnnnnnnnnnnnnnnnnnnnnnnnnnnnnnnnnnnnnnnnnnnnnnnnnnnnnnnnnnnnnnnnnnnnnnnnnnnnnnnnnnnnnnnnnnnnnnnnnnnnnnnnnnnnnnnnnnnnnnnnnnnnnnnnnnnnnnnnnnnnnnnnnnnnnnnnnnnnnnnnnnnnnnnnnnnnnnnnnnnnnnnnnnnnnnnnnnnnnnnnnnnnnnnnnnnnnnnnnnnnnnnnnnnnnnnnnnnnnnnnnnnnnnnnnnnnnnnnnnnnnnnnnnnnnnnnnnnnnnnnnnnnnnnnnnnnnnnnnnnnnnnnnnnnnnnnnnnnnnnnnnnnnnnnnnnnnnnnnnnnnnnnnnnnnnnnnnnnnnnnnnnnnnnnnnnnnnnnnnnnnnnnnnnnnnnnnnnnnnnnnnnnnnnnnnnnnnnnnnnnnnnnnnnnnnnnnnnnnnnnnnnnnnnnnnnnnnnnnnnnnnnnnnnnnnnnnnnnnnnnnnnnnnnnnnnnnnnnnnnnnnnnnnnnnnnnnnnnnnnnnnnnnnnnnnnnnnnnnnnnnnnnnnnnnnnnnnnnnnnnnnnnnnnnnnnnnnnnnnnnnnnnnnnnnnnnnnnnnnnnnnnnnnnnnnnnnnnnnnnnnnnnnnnnnnnnnnnnnnnnnnnnnnnnnnnnnnnnnnnnnnnnnnnnnnnnnnnnnnnnnnnnnnnnnnnnnnnnnnnnnnnnnnnnnnnnnnnnnnnnnnnnnnnnnnnnnnnnnnnnnnnnnnnnnnnnnnnnnnnnnnnnnnnnnnnnnnnnnnnnnnnnnnnnnnnnnnnnnnnnnnnnnnnnnnnnnnnnnnnnnnnnnnnnnnnnnnnnnnnnnnnnnnnnnnnnnnnnnnnnnnnnnnnnnnnnnnnnnnnnnnnnnnnnnnnnnnnnnnnnnnnnnnnnnnnnnnnnnnnnnnnnnnnnnnnnnnnnnnnnnnnnnnnnnnnnnnnnnnnnnnnnnnnnnnnnnnnnnnnnnnnnnnnnncactggtgctggctttggtggtnnnnnnnnnnnnnnnnnnnnnnnnnnnnnnnnnnnnnnnnnnnnnnnnnnnnnnnnnnnnnnnnnnnnnnnnnnnnnnnnnnnnnnnnnnnnnnnnnnnnnnnnnnnnnnnnnnnnnnnnnnnnnnnnnnnnnnnnnnnnnnnnnnnnnnnnnnnnnnnnnnnnnnnnnnnnnnnnnnnnnnnnnnnnnnnnnnnnnnnnnnnnnnnnnnnnnnnnnnnnnnnnnnnnnnnnnnnnnnnnnnnnnnnnnnnnnnnnnnnnnnnnnnnnnnnnnnnnnnnnnnnnnnnnnnnnnnnnnnnnnnnnnnnnnnnnnnnnnnnnnnnnnnnnnnnnnnnncaccagtgctggcttcagtggtgtacccagcaccaaccctggctttggcnnnnnnnnnnnnnnnnnnnnnnnnnnnnnnnnnnnnnnnnnnnnnnnnnnnnnnnnnnnnnnnnnnnnnnnnnnnnnnnnnnnnnnnnnnnnnnnnnnnnnnnnnnnnnnnnnnnnnnnnnnnnnnnnnnnnnnnnnnnnnnnnnnnnnnnnnnnnnnnnnnnnnnnnnnnnnnnnnnnnnnnnnnnnnnnnnnnnnnnnnnnnnnnnnnnnnnnnnnnnnnnnnnnnnnnnnnnnnnnnnnnnnnnnnnnnnnnnnnnnnnnnnnnnnnnnnnnnnnnnnnnnnnnnnnnnnnnnnnnnnnnnnnnnnnnnnnnnnnnnnnnnnnnnnnnnnnnnnnnnnnnnnnnnnnnnnnnnnnnnnnnnnnnnntgtgccatcagcaccagtgccggcttcagtggtgctgttggcaccagtgctggcttcagtggtgtacccagcaccaaccctggctttggcggtgcatttaacaccagtgctggcttcggtggggcacttagtaccactactgacttcggtggtactcccaacaacagcattggctttggtgctgctcccagcaccagtgtcagctttggtggtgctcatagcaccagcctctgttttggtggagctcccagcaccagcctctgctttggcagtgcatctaatacaaacctatgctttggtggccctcctagcaccagtgcctgctttagtggtgccaccagccctagttttggtgatggacccagtaccagtaccggtttcagctttggcaacgggttaagcaccagtgctggatttggtggtggactgaacaccagtgctggctttggtggtggcctaggcaccagtgctggcttcagtggtgatctaagcaccagttctggctttgatggtgggctaggtaccagcgctggcttcagtggaggaccaggcaccagcactggctttggtggtggactgggcaccagcgctggcttcagtggcggactgggcaccggtgctggctttggtggtggactggtcactagtgatggctttggtggtggactgggcaccaatgctagttttggcagcacacttggcaccggtgctggctttagcggtggcctcagcaccagcgatggctttggcagtaggcctaatgccagcttcgacagaggactgagtaccatcattggctttggcagtggttccaacaccagcactggctttattggcgaacccagcaccagcacgggcttccatagtggacccagttctattgttggcttcagtggtggaccaagcactggtgttggcttctgcagtggaccaagcatcagtggcttcagcggtggaccgagcacaggagctggcttcggcggtggaccaaacactggtgctggctttggtggtggaccaagcaccagtgctggcttcggcagtggagccaccaatcttggtgcctgtggcttctcctatggcta

SEQ ID NO: 29112 - DNA, 221 bp, Macaca Mulatta
ctgtctgttctatctgttgactcttctacaaaaagcaggcagagaggggaagagcaggctggccagctgtgccctactgtgtccccatgtgtcccttcatctctgtgcccagagatagggctgggctaattgccactgcctcggggtggcccctttcccacgaccagccccagcaacaggttcctactgcgctgatcgatggtccagcacctggcacctgt

SEQ ID NO: 29113 - DNA, 797 bp, Macaca Mulatta
  misc_feature (1)...(797): n = A,T,C or G
gggggcggcgacgggggaggaggatggaggcggtggtgttcgtcttctctctcctcgattgttgcgcgctcatcttcctttcggtctacttcataattacattgtctgatttagaatgtgattacattaatgctagatcatgttgctcgaaattaaacaagtgggtaattccagaattgattggccataccattgtcactgtattaatgctcatttcattgcactggttcattttccttctcaacttacctgttgccacttggaatatatatcgatacattatggtgccgagtggtaacatgggagtgtttgatccaacagaaatacacaatcgagggcagctgaagtcacacatgaaggaagccatgatcaagcttggattccacttgctctgcttcttcatgtatctttatagtatgatcttagctttgataaacgactgaagctggagaagccgtggttggagtcagcccacactacagtgcacagctgaggagccagaggcttcttaaaccatccttagaaccgtgaccatagcagtatctattttcctctttgaacaaaaaactatttttgctgtatttttaccatataaagtatttgaaaactatgaaaaaagctagccacaaatataaaataatatatattaacccccatttaattcaacgaccctttntaaaaaatataaatatnaaaaaacttgttgggccccgcggcccctatgggcccttaaaaaatcttttttatatttcaaatttatgggtcacttgggcgaccccctttgtgttaagtgaccc

SEQ ID NO: 29114 - DNA, 427 bp, Macaca Mulatta
  misc_feature (1)...(427): n = A,T,C or G
ggaagcttattgtacttttaagaaaaattgccttacatacattcctttttcctttttctgcctcttccctcagtagttgccttttagtgctgtaatagttaaatcctacagcataatcagtaactcgcatatgaagtaaaaaggaatactgtgaaaggggagtactcttgtacagccagttcttgtatgcaaagatctatgcatttttacaatcttatattaaactggtattttcaaacaatagaaannnnnnnnnnnnnnnnnnnnaatttagtgtatctggtttctacatggaagactaaactcatgcttattgctaaatgtggtctttgccaactaaatttaagatgcagcattttagaaatttacatatcaatgtttctacagtattgtttgctaatttttaaataaagtcatgatcagtgtg

SEQ ID NO: 29115 - DNA, 818 bp, Macaca Mulatta
  misc_feature (1)...(818): n = A,T,C or G
tcattttgctgtaccttatataactgtataaacttgcttgttgtatttctagatcaaccccctacgaaaggaggatgagggtgtgtaccagtgccatgcagccaacatggtgggagaggctgagtcccacagcacggtgacggttctagatctgagtaaatacaggagcttccgcttcccagctcccgatgaccgcatgtgatggagaaatgtacatgttctaagtcatttttattattttacacccaagttatgagatatttgaagtggcttataagacctgtaataaaaaggaagaaaaatacataaatggaggaaaccagggagagagcaaaagaagattaggaacatactaagatgagcagtagaatctctggtatattctgcacacagctccctctgagcttcttagcatgcaaaggcaagagcagtgaacatgatgtgtgtccatgagatgaaaagaccagttgtgttttggggctggagggaatatttcctctgtattcttctagaacgagcactgagagaggtagcagacagtgtcattgtgaccgcgtccatgtgaaaatattccgcaaagaagatgcctgagcttcctttgtgtgttcctggagctcttccttgttcaggacgcctgagcttccttcctggggctcaggccttgccttcctgtcctcaacactatatgctgcttcgcaacacatccccttgtgggtggnggcagagagaatctccgcatcccctttgtgtgacccctcctagtcggtagtcacacagctgacagctggggttgcatctgttccctgcctacaggtgaa

SEQ ID NO: 29116 - DNA, 356 bp, Macaca Mulatta
tgtccccgggaggtatcgcatacccattagctgggtgaaaagtcaagcctgggttggaaattcatgttgcgcttatcttcctgcctgaaaggaggtccttttccaggtatttgggaggagccagtcactacctggagcggactctctcctcgccaagcccattgacaagcagcacacagacactgtggtgaacttcctcatccgcgtggcctgtcaggtataggatccgagtgccttgtgttagggctactgcagactggaggctactgactaataccccaggaggttatctgtgaccgtttcgtcaaaaaagatacagacaaaccaaggtctgcgagctggttctgtcattttca

SEQ ID NO: 29117 - DNA, 232 bp, Macaca Mulatta
ccagtggcataccgtttggtgtctgacgtgtgcccagatcgttctgccacttgcactgtgcttgctcctagcaaaagggaaaaggagcgtgcgtgatagaagaaaagcattgagagaactaacaaagaggagagaggtgaaacacacacacattcttaaggcaataaaactagggggtgtatattatcttctggtgcatgttcttttctggaaaatatggtagctcgccaac

SEQ ID NO: 29118 - DNA, 1332 bp, Macaca Mulatta
  misc_feature (1)...(1332): n = A,T,C or G
gatatacaccacaaagtgttatctctgaacttcagtgaatgtcatactaaaattcgtcatgtggatgctcatgcaaccttgagtgatggagtagttgttcaggtcatgggtttgctgtctaacagtggacaaccagaaaggaagtttatgcaaacctttgttctggctcctgaannnnnnnnnnnnnnnnnnnnnnnnnnnnnnnnnnnnnnnnnnnnnnnnnnnnnnnnnnnnnnnnnnnnnnnnnnnnnnnnnnnnnnnnnnnnnnnnnnnnnnnnnnnnnnnnnnnnnnnnnnnnnnnnnnnnnnnnnnnnnnnnnnnnnnnnnnnnnnnnnnnnnnnnnnnnnnnnnnnnnnnnnnnnnnnnnnnnnnnnnnnnnnnnnnnnnnnnnnnnnnnnnnnnnnnnnnnnnnnnnnnnnnnnnnnnnnnnnnnnnnnnnnnnnnnnnnnnnnnnnnnnnnnnnnnnnnnnnnnnnnnnnnnnnnnnnnnnnnnnnnnnnnnnnnnnnnnnnnnnnnnnnnnnnnnnnnnnnnnnnnnnnnnnnnnnggctttctcctgggcttcagtgaccagtaaaaacctgcctcctagtggtactgtttcttcctctggaattccaccccatgttaaagcaccagtctcacagnnnnnnnnnnnnnnnnnnnnnnnnnnnnnnnnnnnnnnnnnnnnnnnnnnnnnnnnnnnnnnnnnnnnnnnnnnnnnnnnnnnnnnnnnnnnnnnnnnnnnnnnnnnnnnnnnnnnnnnnnnnnnnnnnnnnnnnnnnnnnnnnnnnnnnnnnnnnnnnnnnnnnnnnnnnnnnnnnnnnnnnnnnnnnnnnnnnnnnnnnnnnnnnnnnnnnnnnnnnnnnnnnnnnnnnnnnnnnnnnnnnnnnnnnnnnnnnnnnnnnnnnnnnnnnnnnnnnnnnnnnnnnnnnnnnnnnnnnnnnnnnnnnnnnnnnnnnnnnnnnnnnnnnnnnnnnnnnnnnnnnnnnnnnnnnnnnattatgtttcgaggggaagtacgtttaaatgttgaagagaaaaaaacaagagctgcaagagagcgagaaaccagaggtggtggtgatgatcgcagggatattaggcgcaatgatcgaggtcctggtggtccacgtggaattgtgggtggtggaatgatgcgtgatcgtgatggaagaggacctcctccaaggggtggcatggcacagaaacttggctctggaagaggaaccgggcaaatggaaggccgcttcacaggacagcgtcgctgaagctccactgttggcaaagtcttggcagtggtacattattcatcgtgtttgcattctagtta

SEQ ID NO: 29119 - DNA, 677 bp, Macaca Mulatta
actagtgatgcgttttatggcaggccctgcagggagccagaatccgggtcccatgtgcttccacagtagcctccaagccctgtacaccgtcctcttaatagtgctggtcatgatgagcttggtgtttggtaagtttgttcctgtcaattgggaacgccctcaaccacttccagtccccaaatacctgcgctgctaccgatgcctcttggagaccaaggagttagggtgccttctgggatctgacacctgcctcaccccggctggcagcagctgcatcactctccacataaagaacggcagcaattctgacgtcatggtgagtgactgccgaagtaaggagcagatgagtgattgttcacatacccaaacttctccggtgtctggcttctggatgttctctcaatgctgcttcctgggatttctgcaatgaccctcaacacagagggcactatatttcttagtgtgactgcaacaacctttggtgtaaaattctaccagtttccagccaccttcctgacttctttctgggcttggccaggacttctagtccctcataccagccctccttggctccctccagtcagtggaccccagccttggctcttcctcttggttggcaccttcagcacccttactcccactctgcaaccccagccccaccgcccaacaggtttcct

SEQ ID NO: 29120 - DNA, 468 bp, Macaca Mulatta
  misc_feature (1)...(468): n = A,T,C or G
ccccgtctctactaaaaatacaaaagttagctgggtgtggtggcagaggcctgtaatcccagctatttgggaggctgaggcaggagaattgcttgaacccagggccagaggttacagtgagttgagatcgcactgctatacccagcctgggccacagagcaaaagactccatctcnnnnnnnnnnnnnnnnnnnnnnnctgtttaatgcactgctgggaatggattgcttatggccgtaagataggttgatctcgcccttaccncttaccccagggtctggtgtatgctgtgcttttctcagcagtatggctctgacatctcttagatgtcccaacttcaactgttgggagatggtgatgttttcaaccctgcttcctaaacatctgccagggattcctttagtcttgaatgtcttatgctcaattatttggtgttcagcctctcttccacaagagctcctccatgtt

SEQ ID NO: 29121 - DNA, 803 bp, Macaca Mulatta
  misc_feature (1)...(803): n = A,T,C or G
ggcatgcccctgactcaccacatttcaaagttccccagtgtaaacatgtggaatccattaaagcaccgaaatatataggtgcaggaatgccagctgcaattaacagggaaagaaagatctatcaacaagaattaagatacttgatttatttggaaatattttgattttctttatttgtactgcaaagtttatcaaaacataaatctaatggtctaaattttatttttagaaatgagttactcttactgaaaagtttctaaattattaaaaactaagtaatcttataagtaaaaaattatgcaacataattattagtaaagtagaacattcaattaaagattctgaactttatacattttcttaaatgttttgggcctattatatgcacattttatttgggcagagcattttctttcattttattttcaaatcttcaaagaatagtgtaattaaggtcagacagggcctttcaagtaaaagagatgctctatctctttgtgtgctgcattctcatatttataatgtgctttttacatacagaaggggactcttgctagactgtttttctgaaataattgtcttggttatctagtatttaatattgttccgataggatgtggaaaaaaaaaaactattttttaccaaatactcttgtgcaaaatgtatgtaatcccccacccaagggacttctccttccgattttctacacctnnnnnnnnnnnnnnnnnnnnngcatttaaaggaaaaacccagattttaaacttatcataccattcttgaaaaagcccagttgttaaaccagt

SEQ ID NO: 29122 - DNA, 865 bp, Macaca Mulatta
  misc_feature (1)...(865): n = A,T,C or G
gggagtgatggcgatttttagtgtgtatgtggtgaacaaagctggtggcttgatttaccagttggacagctacgcgccacgggctgaggctgagaaaactttcagttacccgctggatctgctgctcaagctacacgatgagcgtgtgttggttgctttcggccagcgggacggcatccgagtgggccatgcagtgctggccatcaatggcatggacgtgaacggcaagtacacggccgacgggaaagaggtgctggagtatctgggtaaccctgctaattacccggtgtccattcgatttggccggccccgcctcacttctaatgagaagctcatgctggcctccatgttccactcgctgtttgccatcggctcccagctgtgtcctgaacagggaagctcaggcattgagatgctggagacagacacattcaaattgcactgctaccagacactgacagggatcaagtttgtggttctagcagatcctaggcaagctggaatagattctcttctccgaaagatttatgagatttactcagactttgcccttaagaatccattctaactccttagaaatgcccatcaggtggtgagctctttgaacagaaccctggaagctagcccctggaggtgggcagaaaaaagctggggaatttttgggacttgggggtcataaggctggaaaccggtggatgggaccccccaaaatttccggaaaagatttccgggcaaaaaggggaataactgggcaatgggggaaaacccccccagccagccccttgggtttagggggcacccgtnnnnnnnnnnnnnnnnnnnnnnnnngggcggggaaacccccgggaaaagaaaaatcgacgaa

SEQ ID NO: 29123 - DNA, 2650 bp, Macaca Mulatta
  misc_feature (1)...(2650): n = A,T,C or G
aggttaatacaaaagctgaaccagcaaacaatattacaagtttcctgtggcaactggcattgcttggctcttgcggctnnnnnnnnnnnnnnnnnnnnnnnnnnnnnnnnnnnnnnnnnnnnnnnnnnnnnnnnnnnnnnnnnnnnnnnnnnnnnnnnnnnnnnnnnnnnnnnnnnnnnnnnnnnnnnnnnnnnnnnnnnnnnnnnnnnnnnnnnnnnnnnnnnnnnnnnnnnnnnnnnnnnnnnnnnnnnnnnnnnnnnnnnnnnnnnnnnnnnnnnnnnnnnnnnnnnnnnnnnnnnnnnnnnnnnnnnnnnnnnnnnnnnnnnnnnnnnnnnnnnnnnnnnnnnnnnnnnnnnnnnnnnnnnnnnnnnnnnnnnnnnnnnnnnnnnnnnnnnnnnnnnnnnnnnnnnnnnnnnnnnnnnnnnnnnnnnnnnnnnnnnnnnnnnnnnnnnnnnnnnnnnnnnnnnnnnnnnnnnnnnnnnnnnnnnnnnnnnnnnnnnnnnnnnnnnnnnnnnnnnnncagacaacataccctagccttcgtgccttcttccggacttatctatgcatttggttgtggagcaagaggtcaattaggaactgggcacacttgtaatgtcaagtgcccatctcctgtcaagggttactgggccgcccacagtggccagctttcagcccgagctnnnnnnnnnnnnnnnnnnnnnnnnnnnnnnnnnnnnnnnnnnnnnnnnnnnnnnnnnnnnnnnnnnnnnnnnnnnnnnnnnnnnnnnnnnnnnnnnnnnnnnnnnnnnnnnnnnnnnnnnnnnnnnnnnnnnnnnnnnnnnnnnnnnnnnnnnnnnnnnnnnnnnnnnnnnnnnnnnnnnnnnnnnnnnnnnnnnnnnnnnnnnnnnnnnnnnnnnnnnnnnnnnnnnnnnnnnnnnnnnnnnnnnnnnnnnnnnnnnnnnnnnnnnnnnnnnnnnnnnnnnnnnnnnnnnnnnnnnnnnnnnnnnnnnnnnnnnnnnnnnnnnnnnnnnnnnnnnnnnnnnnnnnnnnnnnnnnnnnnnnnnnnnnnnnacagattttgaacagttttgaaagttgcctgattccccagttgtcaagctcaccaccagatgttgaagccatgagaatctatttaatactacctgagtttcccctactccaggattccaagtattatataacattccctattcccttggctatggccattctgcggcgggggacaaacaacaacaaagtactannnnnnnnnnnnnnnnnnnnnnnnnnnnnnnnnnnnnnnnnnnnnnnnnnnnnnnnnnnnnnnnnnnnnnnnnnnnnnnnnnnnnnnnnnnnnnnnnnnnnnnnnnnnnnnnnnnnnnnnnnnnnnnnnnnnnnnnnnnnnnnnnnnnnnnnnnnnnnnnnnnnnnnnnnnnnnnnnnnnnnnnnnnnnnnnnnnnnnnnnnnnnnnnnnnnnnnnnnnnnnnnnnnnnnnnnnnnnnnnnnnnnnnnnnnnnnnnnnnnnnnnnnnnnnnnnnnnnnnnnnnnnnnnnnnnnnnnnnnnnnnnnnnnnnnnnnnnnnnnnnnnnnnnnnnnnnnnnnnnnnnnnnnnnnnnnnnnnnnnnnnnnnnnnnnnnnnnnnnnnnnnnnnnnaggtggccgtcaatggagccaacctgcagaatgtcttcatgcttctcaccctggagcctctgctggccagaagccccttcctggtccttcacgttcgcaggaacaaccttgttggagatgccctaagagagctgagcattcattctgatattgatttgaaaaagcctctcaaagtnnnnnnnnnnnnnnnnnnnnnnnnnnnnnnnnnnnnnnnnnnnnnnnnnnnnnnnnnnnnnnnnnnnnnnnnnnnnnnnnnnnnnnnnnnnnnnnnnnnnnnnnnnnnnnnnnnnnnnnnnnnnnnnnnnnnnnnnnnnnnnnnnnnnnnnnnnnnnnnnnnnnnnnnnnnnnnnnnnnnnnnnnnnnnnnnnnnnnnnnnnnnnnnnnnnnnnnnnnnnnnnnnnnnnnnnnnnnnnnnnnnnnnnnnnnnnnnnnnnnnnnnnnnnnnnnnnnnnnnnnnnnnnnnnnnnnnnnnnnnnnnnnnnnnnnnnnnnnnnnnnnnnnnnnnnnnnnnnnnnnnnnnnnnnnnnnnnnnnnnnnnnnnnnnnnnnnnnnnnnnnnnnnnnnnnnnnnnnnnnnnnnnnnnnnnnnnnnnnnnnnnnnnnnnnnnnnnnnnnnnnnnnnnnnnnnnnnnnnnnnnnnnnnnnnnnnnnnnnnnnnnnnnnnnnnnnnnnnnnnnnnnnnnnnnnnnnnnnnnnnnnnnnnnnnnnnnnnnnnnnnnnnnnnnnnnnnnnnnnnnnnnnnnnnnnnnnnnnnnnnnnnnnnnnnnnnnnnnnnnnnnnnnnnnnnnnnnnnnnnnnnnnnnnnnnnnnnnnnnnnnnnnnnnnnnnnnnnnnnnnnnnnnnnnnnnnnnnnnnnnnnnnnnnnnnnnnnnnnnnnnnnnnnnnnnnnnnnnnnnnnnnnnnnnnnnnnnnnnnnnnnnnnntgttcctgacaggcagcgatcggattcccatctacggcatggccagcctgcagattgtcatccagtccacagccagcggggaggagtacttgc

SEQ ID NO: 29124 - DNA, 280 bp, Macaca Mulatta
tgtggttccagaaagctcattagttgaaattgtgtgagtctaggttgaccacagaggcaagcactggtgattctaggacaggtttgacctggagagttgaactactccagaaactaaagagtagtgtttctagaatgcacaaaacattgttgagtctgtgggtttagaaagactaaagtaacagattaggagttcttgatattagataactccaacttctggctgtagagcacccaaccaagagaataagcaatgctttgaaaggatccacggggtgggt

SEQ ID NO: 29125 - DNA, 2553 bp, Macaca Mulatta
  misc_feature (1)...(2553): n = A,T,C or G
aggcaagctagtcattaaagaccacaatgagccaattgttttgcgaacccggcacatcctgattgacaacggaggagagctgcatgctgggagtgccctctgccctttccagggcaatttcaccatcattttgtacggaagnnagggctgatgaaggtattcagccagatccttactatggtctgaagtacattggggtcggtagaggaggcactcttgagttgcatggacagaaaaagctctcctggacatttctgaacaagaccctccacccaggtggcatggcagaaggaggctatttttttgaaaggagctggggccacaatagagttattgttcacgtcatcaaccccaaatcaggcacagtcatccattctgaccggnnnnnnnnnnnnnnnnnnnnnnnnnnnnnnnnnnnnnnnnnnnnnnnnnnnnnnnnnnnnnnnnnnnnnnnnnnnnnnnnnnnnnnnnnnnnnnnnnnnnnnnnnnnnnnnnnnnnnnnnnnnnnnnnnnnnnnnnnnnnnnnnnnnnnnnnnnnnnnnnnnnnnnnnnnnnnnnnnnnnnnnnnnnnnnnnnnnnnnnnnnnnnnnnnnnnnnnnnnnnnnnnnnnnnnnnnnnnnnnnnnnnnnnnnnnnnnnnnnnnnnnnnnnnnnnnnnnnnnnnnnnnnnnnnnnnnnnnnnnnnnnnnnnnnnnnnnnnnnnnnnnnnnnnnnnnnnnnnnnnnnnnnnnnnnnnnnnnnnnnnnnnnnnnnnnnnnnnnnnnnnnnnnnnnnnnnnnnnnnnnnnnnnnnnnnnnnnnnnnnnnnnnnnnnnnnnnnnnnnnnnnnnnnnnnnnnnnnnnnnnnnnnnnnnnnnnnnnnnnnnnnnnnnnnnnnnnnnnnnnnnnnnnnnnnnnnnnnnnnnnnnnnnnnnnnnnnnnnnnnnnnnnnnnnnnnnnnnnnnnnnnnnnnnnnnnnnnnnnnnnnnnnnnnnnnnnnnnnnnnnnnnnnnnnnnnnnnnnnnnnnnnnnnnnnnnnnnnnnnnnnnnnnnnnnnnnnnnnnnnnnnnnnnnnnnnnnnnnnnnnnnnnnnnnnnnnnnnnnnnnnnnnnnnnnnnnnnnnnnnnnnnnnnnnnnnnnnnnnnnnnnnnnnnnnnnnnnnnnnnnnnnnnnnnnnnnnnnnnnnnnnnnnnnnnnnnnnnnnnnnnnnnnnnnnnnnnnnnnnnnnnnnnnnnnnnnnnnnnnnnnnnnnnnnnnnnnnnnnnnnnnnnnnnnnnnnnnnnnnnnnnnnnnnnnnnnnnnnnnnnnnnnnnnnnnnnnnnnnnnnnnnnnnnnnnnnnnnnnnnnnnnnnnnnnnnnnnnnnnnnnnnnngtttgctctgggatttaaggcagcacacctggagggcatggagctgaagcatatgggacagcagctgatgggtcagtacccgattcacttccacctggccggtgatgtagannnnnnnnnnnnnnnnnnnnnnnnnnnnnnnnnnnnnnnnnnnnnnnnnnnnnnnnnnnnnnnnnnnnnnnnnnnnnnnnnnnnnnnnnnnnnnnnnnnnnncaaggacgttgtgggctataactctttgggccactgcttcttcacggaagatgggccagaggaacgcaacacttttgaccactgtcttggcctccttgtcaagtccggaaccctcctcccctcagaccgtgacagcaagatgtgcaagatgatcacagaggactcctatccggggtacatccccaagcccaggcaagactgcannnnnnnnnnnnnnnnnnnnnnnnnnnnnnnnnnnnnnnnnnnnnnnnnnnnnnnnnnnnnnnnnnnnnnnnnnnnnnnnnnnnnnnnnnnnnnnnnnnnnnnnnnnnnnnnnnnnnnnnnnnnnnnnnnnnnnnnnnnnnnnnnnnnnnnnnnnnnnnnnnnnnnnnnnnnnnnnnnnnnnnnnnnnnnnnnnnnnnnnnnnnnnnnnnnnnnnnnnnnnnnnnnnnnnnnnnnnnnnnnnnnnnnnnnnnnnnnnnnnnnnnnnnnnnnnnnnnnnnnnnagatatagccctcaccaggatgctgacccgctgaagcctcgggagccagccatcatcaagcacttcattgcctacaagaaccaggaccatggggcctggctgcgcggtggggatgtgtggctggacagctgccggtnnnnnnnnnnnnnnnnnnnnnnnnnnnnnnnnnnnnnnnnnnnnnnnnnnnnnnnnnnnnnnnnnnnnnnnnnnnnnnnnnnnnnnnnnnnnnnnnnnnnnnnnnnnnnnnnnnnnnnnnnnnnnnnnnnnnnnnnnnnnnnnnnnnnnnnnnnnnnnnnnnnnnnnnnnnnnnnnnnnnnnnnnnnnnngaattttccgattagaggaattcagttctatgatggccccatcaacatccaaaactgcactttccgaaagtttgtggccctggagggccggcacaccagcgccctggccttccgcctgaataatgcctggcagagctgcccccataacaacgtgaccggcattgcctttgaggacgttcc

SEQ ID NO: 29126 - DNA, 422 bp, Macaca Mulatta
cattagccatctagagctgtccttagctctctccctctgtttgggtgttttccaaaccctagtcccatctgcctttcaggccccatgcggtgaatgggcagctgtcagtctctttgttcagctctgtcctccttcaatacagatcatcaggcagattgagcttgaggagaatccaagtcaagcctagaagccaccccaagatcgcaggccacctggcctttcaggcagatttaaggtacctaactggttgtcacatggttgcctggtgtagcccctgtaggtaactgccccagcccagtcagactgttctcagaaaagccattggaacgagccagcgtttggttccttggttggtccctttgatgggtttccaaggctctctactgggtggctttccatctgtgtctcacagacaaaggaga

SEQ ID NO: 29127 - DNA, 818 bp, Macaca Mulatta
  misc_feature (1)...(818): n = A,T,C or G
aggccgagcgtggcagcctcggcgcgggctcgctgtgcaggcggaggccggcgctgggcgcgctgcgtgacgaaggaccccggcggcgcgcacacctggacatcggcctcccgcgcgacttccgccccgtgtcgtccatcatcgatgtggacctggtccccgagacgcaccggcgagtgcggctgcaccggcacggctgcgagaagccgctgggcttctacatccgcgacggcgccagcgtgcgcgtgaccccgcacgggctggagaaggtgcccggcatcttcatctcgcgcatggtccccgggggcctggcggagagcaccgggctgctggctgtgaacgacgaggtcctggaagtgaacggcattgaggtggccgggaagacgctggaccaggtcacggacatgatgatcgccaacagccacaacctcatcgtcaccgtcaagcccgccaaccagcgcaacaacgtggtgcgcggcggccgcgcgctgggcagctcgggacccccctcggacggcaccgcgggcctcctgggtccccccgccccgcgcgtcctgcagaacttccaccccgacgaggcggnnnnnnnnnnnnnnnnnnnnnnnnnnnnnnnnnnnnnnnnnnnnnnnnnnnnnnnnnnnnnnnnnnnnnnnnnnnnnnnnnnnnnnnnnnnnnnnnnnnnnnnnnnnnnnnnnnnnnnnnnnnnnnnnnnngacctgaccctggacggcggcctccagcggctgctcagctccctgcgggccgacccacgtcacagcctggccctgccaccgggcggcgtggaggagcacgggccc

SEQ ID NO: 29128 - DNA, 300 bp, Macaca Mulatta
gattggaggctgggatagagaactggttgagtagccaaagaaggtcagtgtgaaaatcttgctatggcaaatagagcaaaatctctccgctgctttctgtccaccaacatttagtgtcagccccggcacatcttgtcctggtccaagaccttattctgcttgccccaacttccctgcagacactccttttgctaccactcaaggaaggaagtcaccagtggccttagtgcaggagaatcagccctggtggccctgcagaacaatgcatgtaacatgagcgatgcatccccatggagagac

SEQ ID NO: 29129 - DNA, 265 bp, Macaca Mulatta
ccaggctccagaggtcgggtccacttggagccatgtcagctgctatgggggagggcctggacggggtgggctgcaggctgctcttctccctgaccttagcctgtcctcagccactggccctgtgaagagccagcctctcctgctagagtttcaaacccacagagagggctccatctgcgcctgggtcctccatgcctcagctcctgccagacgcgctgaatcctccgggccctctgaggagcgccccccaggccctctcccgcag

SEQ ID NO: 29130 - DNA, 528 bp, Macaca Mulatta
  misc_feature (1)...(528): n = A,T,C or G
ctgatgagaatattgatgtcacctgcaatgaccccgagttcccctcctctccatactcctcttcctccccctgcggcctggacagcatccatgaattctacaactcgcctgctcttcatggccgtcaagtgggccaagaacctacctgtgttctccagcctgcccttccgggatcaggtnnnnnnnnnnnnnnnnnnnnnnnnnnnnnnnnnnnnnnnnnnnnnnnnnnnnnnnnnnnnnnnnnnnnnnnnnnnnnnnnnnnnnnnnnnnnnnnnnnnnnnnnnnnnnnnnnnnnnnnnnnnnnnnnnnnnnnnnnnnnnnnnnnnnnnnnnnnnnnnnnnnnnnnnnnnnnnnnnnnnnnnnnnnnnnnnnnnnnnnnnnnnnnnnnnnnnnnnnnnnnnnnnnnnnnnnnnnnnnnnnnnnnnnnnnnnnnnnnnnnnnnnnnnnnnnnnnnnnnnnnnnnnnnnnnnnnnnnnnnnnnnnnnngccagcacagcaaggcccaccaccccagccagcccgtgaggt

SEQ ID NO: 29131 - DNA, 600 bp, Macaca Mulatta
actttacctccgccaaacctgagtgactctagaggctacatctccttgcaggtactcggaagtaactatactctctctgtagaaaaccccctcccttgccaaatgatccattttgaatttggaatgaagctgttttcaaggggcttattaatgaaagcttttaacattcttctgtttagcattaccaacaagatggtttcccagagactgaacttcgtacatttatatcagagtgcaaagatctacccaactccggaaaatacagattagaagatgaccctccagtatctttattctgctgttgtaaaaagtagctatcaggtttatctgtactttagaggaaaacataatgtgtagcagagttggaagactatatggatattctgagatcagatgtagtatgtttgaagactgttattttgagctaattgagatctataatttaccaataactgtttatatttttaaaaagcaatatttaatgtctttgcagttttatgctgggcttgtttttaaaaataacttcaatgaggaaagctattggattattattatttcttgtttattttgccatggctttagaatgtattctctgtgcct

SEQ ID NO: 29132 - DNA, 631 bp, Macaca Mulatta
  misc_feature (1)...(631): n = A,T,C or G
tgaaaaattctgacttttctttcntcataaatggatttccattcacaggaggaccaatccaatgtcacctctccaaattccgcaagatccagcacgagctgagggaggccgaggaacgggctgacattgctgagtcncaggtcaacaagctccgggtgaagagccgggaggttcacacaaaaatcataagtgaagagtaatttatccagctgctgaaaggtgaccaaagaaatgcacaaaatgtgaaaatctttgtcactccattttgtacttatgacttttggagataaaaaatttatctgccaaaatcttgtgagtctctttttcccctctatggcaatttgtctttagaagtactgagaaaagaaaaacatctcaacagtttggttacattttacagaaaagtgcttagtcaccaatattaagacatgatagagagcagctaggctgaccctggtaagtaccactatatgcgtccctatgggaagtaggtgaacctaaaggtataccacaggcacacaaaacatagaatatttggtaaaccttacttgacaaaacatagctagtttctgtcaatgaaattattgattttcttcataaaatgatatgaaatccttcatcctaaggctga

SEQ ID NO: 29133 - DNA, 746 bp, Macaca Mulatta
  misc_feature (1)...(746): n = A,T,C or G
atcatataaaaccagtttgcctgggctggtgactggtttaagaaagtcagcgatgatttcgtggtgttggggagcggtgcccacaaatttttagagccttttacaaagactgaagagttttaagtagagttcagactatggacaggttggtacagaactgtgaaacaggtgaaacatgatacctctgcttcctntcagcatctatattggaaagcgactgagcacaccctctgccagcacctactgagggaaaggaaaagcccctggaaatgcgtgtgacctgtgaagtggtgtattgtcacagtagcttatttgaacttgagaccattgtaagcatgacccaacctaccaccctgtttttacatatccaattccagtaactctcaaatccagtattttattcaaactctgttgaggcattttactaaccttataccctttttggcctgtaagacattttagaatttcctaacagagtttactgttgtttagaaatttgcaagggcttcttttccgcaaatgccaccagcagattataattttgtcaacaaggctattatccctaattagtaccaccagagtagacctgtatcattcatggtataaattttactcttgcaacataactaccatctctctcttaaaacgagatcaggttagcaaatgatgtaaaagaagcttattgtctagttgtttttttcccccaagacaaaggcaagctttcctaagtttgagttgatagttat

SEQ ID NO: 29134 - DNA, 1216 bp, Macaca Mulatta
  misc_feature (1)...(1216): n = A,T,C or G
tctggggcggctcagttctgcggtaccagggcagtggaacagagcctagccccatcccaaacacagatgggaccatgaactccagaagcagcttcagccagaccccctcggcctccttccacggcaccggagatggctggggccggcccaggagcttccccagggctcccaccgtccacggcggtgcagggggaacccgcatctccctgtccttcaccacgcggagctgcccacccgctggagggtcttggggttctggaagaagcagccccctcctaggcggaaatgggaaggccaccctgcagaatctcaacgaccgcctggcctcctacctggagaaggttcgcgccctggaggaggccaacatgaagctggaaagccgcatcctgaagtggcaccagcaaagagatcctggcagtaagaaagattattcccagtatgaggaaagcatcacacacctgcaggagcagnnnnnnnnnnnnnnnnnnnnnnnnnnnnnnnnnnnnnnnnnnnnnnnnnnnnnnnnnnnnnnnnnnnnnnnnnnnnnnnnnnnnnnnnnnnnnnnnnnnnnnnnnnnnnnnnnnnnnnnnnnnnnnnnnnnnnnnnnnnnnnnnnnnnnnnnnnnnnnnnnnnnnnnnnnnnnnnnnnnnnnnnnnnnnnnnnnnnnnnnnnnnnnnnnnnnnnnnnnnnnnnnnnnnnnnnnnnnnnnnnnnnnnnnnnnnnnnnnnnnnnnnnnnnnnnnnnnnnnnnnnnnnnnnnnnnnnnnnnnnnnnnnnnnnnnnnnnnnnnnnnnnnnnnnnnnnnnnnnnnnnnnnnnnnnnnnnnnnnnnnnnnnnnnnnnnnnnnnnnnnnnnnnnnnnnnnnnnnnnnnnnnnnnnnnnnnnnnnnnnnnnnnnnnnnnnnnnnnnnnnnnnnnnnnnnnnnnnnnnnnnnnnnnnnnnnnnnnnnnnnnnnnnnnnnnnnnnnnnnnnnnnnnnnnnnnnnnnnnnnnnnnaaatctgctttggaaaacctgttatctgagacccagtctcggtactcctgcaagctccaggacatgcaagagatcatctcccactacgaggaggaactgatgcagctacgccacgacctggagcggcagaacaacgaataccaagtgctgctgggcatcaaaacccacctggagaaggaaatcaccacgtaccgacggctcctggagggagagagcgaaggg

SEQ ID NO: 29135 - DNA, 493 bp, Macaca Mulatta
tcaaacaggtggagtttgtcccagatttgccaaaaaccatcactggcaagatttaacggaaagaacttcagaaaaaagagaagggtcagatgtaatcagcagtgaactcataacccactgtgcacctaaggcaaatccctggccactctagtctccccgctatggtgaagatgagggtggggcattgagagtgttgatttgggaaagtatcaggagtgccataattccaatgtttttgttcttttaagttaaattcatttactctgcttcctccaagtcctctgtatctttagaatttcccaggtgagcactcagattgcaagtaataaaatactgatatcaacaataccctgtgttgagcatttattctgggaattaacttatgttaaatgccctccctctgtaattctccctaatctccaacctgagatatcttgggaccagattctccctcctggcaccagcatctcaaggtagccctaagcacccttcc

SEQ ID NO: 29136 - DNA, 809 bp, Macaca Mulatta
  misc_feature (1)...(809): n = A,T,C or G
ggggacagaggcaagtaaggagactgatgttaaactggagcctaagacagtgatgaagatggaaacagatacccacactggcattggactccttcttgctcccctgccatgggtcccctctttttccctggttgacccccacccttgcatcactcttcttcccatcctatccnnnnnnnnnnnnnnnnnnnnnnnnnnnnnggagtttcactcttgtcgcccaannnnnnnnnnnnnnnnncnnnnnnnnnnnnnnnnnnnnnnnagcttctgnnnnnnnnnnnnnnntnnnnnnnnnnnnnnnnnnnnnnnnncactacagacatgcgccaccatnnnnnnnnnnnnnnnnnnnnnnnnnnnnnnnnnnagtttcaccatannnnnnnnnnnnnnnnnnnnnnnnnnnnnnnnnnnnnnnngcccnnnnnnnnnnnnnnnnnnnnnnnnnnnnnnnnnnnnnnnnnntgtgcccggcccccatcctcttctatcattttttaaatctcttctcccatcataaaattaatttctctcataatttntggtcaggtagaattgggaaagtcccacactctcctcccattaccttaacatcccaagcttcctttcccttttttggtctttaaggntatattttttatgggaccgaattttagattaaacaaaattggagtttcccccatttctcttccacttccccaatgtttgggctttccctagacccccaccagagtttaaaaaacttgggggacctcccccttgggcccccccaccagaaaaacacctttggaaaaattggggtttga

SEQ ID NO: 29137 - DNA, 570 bp, Macaca Mulatta
tagttacagagtaattacatggttatttttgcaatgtaaaataaagtgtttctgattatttgctatgtaaaggaaccctctcctttcccctctggtccccgcgctttggtataatatatatacttctccatacacagacctctgcagaatgcaaaataaaacttgccgtgaatgaatttagcattttatgagagtgctgttggaaagacttgataattcaccccttttgtgttgaagagttgaatcttctgttaaaaggtgatttaaaacttgaatgtgatgaattgtggcaagttaacttcaagttatgtgcaatacttatttcaaacttttgaaagatctttgcagtgtaattctttgtacttaattgcagacatttaaaaatgtcattttctactgttaacagtaatcctctttcttgctggtgtttctacagaaaaagaatcagaaatcaatctttctactaatgtaaatttgagattatttctacaaatggaataaaagaggttttggtcatttgctttatttcattattttaaaggctactgtgattgatagcattgtaagaat

SEQ ID NO: 29138 - DNA, 694 bp, Macaca Mulatta
  misc_feature (1)...(694): n = A,T,C or G
tggtcccagccagcacgcacaaaaggcagatctcataaacgcggcctcccgccctggatctggagtggagctgctctgggatttcgagttcttctgcacagatgactaaatatatccgagagacgttggaaaacctgctgaacgttttacgttggtctgctcagcacatggctggatgtggatatttctgtaattcaggacgtcacaccactcctgtgtaccaagaccagtgggcgccgtttgatgtagaagagcaggacgagactctacgattattcttaataaatgtaatggattgtttnnnnnnnnnnnnnnnnnnnnnnnnnnnnnnnnnnnnnnnnnnnnnnnnnnnnnnnnnnnnnnnnnnnnnnnnnnnnnnnnnnnnnnnnnnnnnnnnnnnnnnnnnnnnnnnnnnnnnnnnnnnnnnnnnnnnnnnnnnnnnnnnnnnnnnnnnnnnnnnnnnnnnnnnnnnnnnnnnnnnnnnnnnnnnnnnnnnnnnnnnnnnnnnnnnnnnnnnnnnnnnnnnnnnnnnnnnnnnnnnnnnnnnnnnnnnnnnnnnnnnnnnnnnnnnnnnnnnnnnnnnnnnnnnnnnnnnnnnnnnnnnnnnnnnnnnnnnnnnnnnnnnnnnnnnnnnnnnnnnnnnnnnnnnnnnnnnnnnnnnnnnnnnnnnnnnnnnnnnnnnnnnnnnnnnnnn

SEQ ID NO: 29139 - DNA, 90 bp, Macaca Mulatta
agttctgatacaacacctcttttaaatggatcaagccaagacagaatgtttgagacaatggcgatcgagattgaacaacttttggcaagg

SEQ ID NO: 29140 - DNA, 789 bp, Macaca Mulatta
gggttgagaccacacagccagcccaggctcaactcatgccaactccatcctacatggctgccctgtgccctcggggtaaaccccgagcccctgagcttgtgttgacagccgttggccctgctcccccagcttcatcagctcaggacccctgtgtacacccagatggtagcgcttgcgaccctggcctggcagtcctgctcacagtgttctgtgcctgtgtgctcccacccttcccccctgctgctgcggaatccctgtcatccttccacactccctgtcatccttccacacccggatctcttgtcctgtcccctccccaccctgccaccatcagccctgcctggagccacctgcccttcagcaacaaaacccaaacttttttgtgggcgttcaagatggtattgtgccccaaccagtcagatcctgtgttttgagtcccaaaggccttgcaaggattgggctctgggaagtttttaatcccaaccctcaacatccagcctccccccagccgggtccaataaatgtatttttaattcgaatattcatctgttttagatccaataaacactccaaaaaaataaaacttttttgacctctcttgccccacccaaaaaatatcttaaaaaaattattttgttttctcgcggccttcaaggttatgaaaacatgaccaaacaatttatccttcccgcaaacaagaacacttcatattttcttttatttttatcttattacaacaaacaatataactccacacttggcgtatactacaattttgtatataaaaaa

SEQ ID NO: 29141 - DNA, 93 bp, Macaca Mulatta
tcaggtgtgagctgtcagtggagaagtccacagtgctgcagtctgagctggaatcctgtaaggagctgcaggagctggagcctgagaataaat

SEQ ID NO: 29142 - DNA, 754 bp, Macaca Mulatta
gggtcaagggggtagcaaattccattcgttttcaatattgccacaatacccagggattaatgctgccacaggggggcaatctctatttgtcttactacccaccccttccctgttctgcctctgtaactcaattaagttgttctgtttgggacctggaaaagaacccaaagaaaacctgagtggacaggttcatttctggaatgcagaaaacattttaaaggttagatttttagcatattctcaactagcattctttccagtgagttgagggggaaattaactagtataatctcttgaatccaaaactggatattaagaactttcccccttactaagtttaagacttttgtcatatggtgagtcaaataagaccattttgattgtaaaccataaaatagttcagcaagtagcccacaattctggcctaacagcagacatgctgttttcacttggtatcccggagttgggttgccaaccttaatttctatgatgttttcaaaactgaaacttgacaaagtagaccaccagctgcaccgtgtttttctgtaagttttagtgcaagctagaattctgtgtgtccataaaaatggttcaacacctgcaactggggaattaagaattgtattttgttgccctttttaaattaaaagaagtgcaaaatttttaaggctagtcaatatgcacccatacaggaaaaattaaatcccattaacaccttgaaacaaacctttggggaaacttagaccaaaattaa

SEQ ID NO: 29143 - DNA, 508 bp, Macaca Mulatta
  misc_feature (1)...(508): n = A,T,C or G
ncagctggcgtgcggccaggatgggcagctgaagggtttcgcggtgctggagtatgagacggctgagatggcggaggaggcacagcagcaggcggacggtctggccctggggggcagccacctgcgagtctccttctgcgcccctgggccccccggccgcagtatgctggccgctctcatcgctgcccaggccacgnnnnnnnnnnnnnnnnnnnnnnnnnnnnnnnnnnnnnnnnnnnnnnnnnnnnnnnnnnnnnnnnnnnnnnnnnnnnnnnnnnnnnnnnnnnnnnnnnnnnnnnnnnnnnnnnnnnnnnnnnnnnnnnnnnnnnnnnnnnnnnnnnnnnnnnnnnnnnnnnnnnnnnnnnnnnnnnnnnnnnnnnnnnnnnnnnnnnnnnnnnnnnnnnnnnnnnnnnnnnnnagaagcccggcatcctgggagactcacccctgggcgccctccagcctggggcccagccggccaaccccctcctcggggagctgcctgcag

SEQ ID NO: 29144 - DNA, 4508 bp, Macaca Mulatta
  misc_feature (1)...(4508): n = A,T,C or G
ttctcaagaacctactgtgtgcatatcccgggcttagtgaagtgaagtcctaggcgggctctggcaccaccaggtgcccaagacacagctccttcccgcacctaacagggacttcccatctctctctgtgacctcagcccgctgtgcccacccaccccactgaccccgcgagcgtgctcgggcttgggaaggcacgtctgtgggggtgagagacggagccacagcattcggtgactagggggaagccaggtncaggttggaagtactccatgacacacactcggagaaagtctcttcccatgctgagttcgggccccagtggccgccgagagcccctgcagatggaagacagcaacatggagcagggggctgagggtgtggagccaggcatgcctgagagcccaggtcacctcacagggcgccgcaagaactacccacttcgtaagcgcccattggttcctgagaagcccaaggcctgcaaagtgctgctgactcgcctggagaatgtggccggtccccggagtgcagatgaggctgatgagctaccgcctgnnnnnnnnnnnnnnnnnnnnnnnnnnnnnnnnnnnnnnnnnnnnnnnnnnnnnnnnnnnncaagcggcgcctggcctccctcaatgccgaagctctcaataacctgctgctggagcgagaggacaccggcagcctggccggcacccgccgcagccgagcgggggatccccaccgcagccgggaccgggaccgtgctactgggggctggtcctcctccaagaagcggccccggctgggggaccttggaggaggaagtcgggacctgtctccagagccagcaccagatgaaggtccccgccgagatggagacccagctcccaagagactggctagcctgaacgcagctgctttcctaaagctgagccaggagcgggagctacccctgcgtctgcctcgtgcccatgcagaagtagatgggcgctccactgagcccccagcacccaaggccccgaggccaaagtggcccaaggtcaatggcaagaactatcccaaggcttggcagggggccagctctggggaggctgcaggcccaccnnnnnnnnnnnnnnnnnnnnnnnnnnnnnnnnnnnnnnnnnnnnnnnnnnnnnnnnnnnnnnnnnnnnnnnnnnnnnnnnnnnnnnnnnnnnnnnnnnnnnnnnnnnnnnnnnnnnnnnnnnnnnnnnnnnnnnnnnnnnnnnnnnnnnnnnnnnnnnnnnnnnnnnnnnnnnnnnnnnnnnnnnnnnnnnnnnnnnnnnnnnnnnnnnnnnnnnnnnnnnnnnnnnnnnnnnnnnnnnnnnnnnnnnnnnnnnnnnnnnnnnnnnnnnnnnnnnnnnnnnnnnnnnnnnnnnnnnnnnnnnnnnnnnnnnnnnnnnnnnnnnnnnnnnnnnnnnnnnnnnnnnnnnnnnnnnnnnnnnnnnnnnnnnnnnnnnnnnnnnnnnnnnnnnnnnnnnnnnnnnnnnnnnnnnnnnnnnnnnnnnnnnnnnnnnnnnnnnnnnnnnnnnnnnnnnnnnnnnnnnnnnnnnnnnnnnnnnnnnnnnnnnnnnnnnnnnnnnnnnnnnnnnnnnnnnnnnnnnnnnnnnnnnnnnnnnnnnnnnnnnnnnnnnnnnnnnnnnnnnnnnnnnnnnnnnnnnnnnnnnnnnnnnnnnnnnnnnnnnnnnnnnnnnnnnnnnnnnnnnnnnnnnnnnnnnnnnnnnnnnnnnnnnnnnnnnnnnnnnnnnnnnnnnnnnnnnnnnnnnnnnnnnnnnnnnnnnnnnnnnnnnnnnnnnnnnnnnnnnnnnnnnnnnnnnnnnnnnnnnnnnnnnnnnnnnnnnnnnnnnnnnnnnnnnnnnnnnnnnnnnnnnnnnnnnnnnnnnnnnnnnnnnnnnnnnnnnnnnnnnnnnnnnnnnnnnnnnnnnnnnnnnnnnnnnnnnnnnnnnnnnnnnnnnnnnnnnnnnnnnnnnnnnnnnnnnnnnnnnnnnnnnnnnnnnnnnnnnnnnnnnnnnnnnnnnnnnnnnnnnnnnnnnnnnnnnnnnnnnnnnnnnnnnnnnnnnnnnnnnnnnnnnnnnnnnnnnnnnnnnnnnnnnnnnnnnnnnnnnnnnnnnnnnnnnnnnnnnnnnnnnnnnnnnnnnnnnnnnnnnnnnnnnnnnnnnnnnnnnnnnnnnnnnnnnnnnnnnnnnnnnnnnnnnnnnnnnnnnnnnnnnnnnnnnnnnnnnnnnnnnnnnnnnnnnnnnnnnnnnnnnnnnnnnnnnnnnnnnnnnnnnnnnnnnnnnnnnnnnnnnnnnnnnnnnnnnnnnnnnnnnnnnnnnnnnnnnnnnnnnnnnnnnnnnnnnnnnnnnnnnnnnnnnnnnnnnnnnnnnnnnnnnnnnnnnnnnnnnnnnnnnnnnnnnnnnnnnnnnnnnnnnnnnnnnnnnnnnnnnnnnnnnnnnnnnnnnnnnnnnnnnnnnnnnnnnnnnnnnnnnnnnnnnnnnnnnnnnnnnnnnnnnnnnnnnnnnnnnnnnnnnnnnnnnnnnnnnnnnnnnnnnnnnnnnnnnnnnnnnnnnnnnnnnnnnnnnnnnnnnnnnnnnnnnnnnnnnnnnnnnnnnnnnnnnnnnnnnnnnnnnnnnnnnnnnnnnnnnnnnnnnnnnnnnnnnnnnnnnnnnnnnnnnnnnnnnnnnnnnnnnnnnnnnnnnnnnnnnnnnnnnnnnnnnnnnnnnnnnnnnnnnnnnnnnnnnnnnnnnnnnnnnnnnnnnnnnnnnnnnnnnnnnnnnnnnnnnnnnnnnnnnnnnnnnnnnnnnnnnnnnnnnnnnnnnnnnnnnnnnnnnnnnnnnnnnnnnnnnnnnnnnnnnnnnnnnnnnnnnnnnnnnnnnnnnnnnnnnnnnnnnnnnnnnnnnnnnnnnnnnnnnnnnnnnnnnnnnnnnnnnnnnnnnnnnnnnnnnnnnnnnnnnnnnnnnnnnnnnnnnnnnnnnnnnnnnnnnnnnnnnnnnnnnnnnnnnnnnnnnnnnnnnnnnnnnnnnnnnnnnnnnnnnnnnnnnnnnnnnnnnnnnnnnnnnnnnnnnnnnnnnnnnnnnnnnnnnnnnnnnnnnnnnnnnnnnnnnnnnnnnnnnnnnnnnnnnnnnnnnnnnnnnnnnnnnnnnnnnnnnnnnnnnnnnnnnnnnnnnnnnnnnnnnnnnnnnnnnnnnnnnnnnnnnnnnnnnnnnnnnnnnnnnnnnnnnnnnnnnnnnnnnnnnnnnnnnnnnnnnnnnnnnnnnnnnnnnnnnnnnnnnnnnnnnnnnnnnnnnnnnnnnnnnnnnnnnnnnnnnnnnnnnnnnnnnnnnnnnnnnnnnnnnnnnnnnnnnnnnnnnnnnnnnnnnnnnnnnnnnnnnnnnnnnnnnnnnnnnnnnnnnnnnnnnnnnnnnnnnnnnnnnnnnnnnnnnnnnnnnnnnnnnnnnnnnnnnnnnnnnnnnnnnnnnnnnnnnnnnnnnnnnnnnnnnnnnnnnnnnnnnnnnnnnnnnnnnnnnnnnnnnnnnnnnnnnnnnnnnnnnnnnnnnnnnnnnnnnnnnnnnnnnnnnnnnnnnnnnnnnnnnnnnnnnnnnnnnnnnnnnnnnnnnnnnnnnnnnnnnnnnnnnnnnnnnnnnnnnnnnnnnnnnnnnnnnnagtccacagacctgctgagctgcagccacttactctaggagctaaggacctgcattttcagtttgttcctgttgcccagaggccctgttctcacctcatgctgctccccagagtagactaagaggctcagtcccctgttgtccttgtggagactaggccttggccctggccctgagactctgtgaggcggctggagcagcctggctatttcctatttgtaccaaagaggagcatggtgggagagggagtggagtgcagtgtggcttgggcgtggcgctgggaacctgctagctgagcacttccacaagggcatactcccaggggcaggggccagggctgagaactgcagccctgggtcttcccttagggaggaggggcagacgaacccagcaggctgaggaggtggcactgggtgaggacagttgggcaggggctgcagagggaggtagaaatgaaccctgagggctcccccgacatgccctgccctgtcccttagtagatgagttgctcctgattggtcattgggtttgggtgaggcctggaggcttcagaggtgaatttatgcttgggaagcctgatcccaaacctgaagggaagggacttgggtctccttgtattgaataagctgtttggaggaaggtgtccgtctgggaggatggggcagtaaatgaggttggcagagtggcagtgggggctctgcagagccaggcttggagcctgctcattctgagcccttgctgccaaggagcccagcctcacctagcaggaaaggagatcatagccctcctcccaggaggtagggtctgctgccctgaacttaaatgcttttgaaatctcttagatgtggaaatattttttcgaacctgaaaatgcagctggtagaattt

SEQ ID NO: 29145 - DNA, 608 bp, Macaca Mulatta
  misc_feature (1)...(608): n = A,T,C or G
gggactgaccaaaaccacaatctagactacaaagtatattgttttagagtactcaaattgtannnnnnnnnnnnnnnnnngtttgcagaatcttaacaggaactgtgttttctagattttaaagaattttatttgtcccacttttactaaacgggggcagcagattttaagttaaagaatatggaacatagggaaataagtaaatgtattttggaatatttttagtaacaaatagccactataattctgtaggccagattttatattgagtttagctgttttctcaaaatttagcagagtggttaaaattctgtgctgataagtaactgatacgtataacataaacaaaacaaggttgcctagtttatgtaacagtggaaagttatctggaaatagtattttgaactttcagccaagtttaaaccattataataaaaggaataccatttgtgcatttaaagtaannnnnnnnnnnnnnnnnnnnnncttttccatgttatagggaaaggacaaagatacttttatcagtttactttttgtcttgtggctgtacatgctgttggcatagccctaacagttgttcacaagttttccttttattgcaattt

SEQ ID NO: 29146 - DNA, 1038 bp, Macaca Mulatta
  misc_feature (1)...(1038): n = A,T,C or G
ggcgagtgctggaccttcgtgcagctggacgcctactccaatgcggtagctaacctcttccgccagctgggcttcgcaccgggcgacgtggtggccgtcttcctggagggccggcccgagtttgtggggctgtggctgggcctggccaaggcgggcatggaggccgcgctgctcaacgtgaacctgcggcgcgagaccctggccttctgtctgggcacctnnnnnnnnnnnnnnnnnnnnnnnnnnnnnnnnnnnnnnnnnnnnnnnnnnnnnnnnnnnnnnnnnnnnnnnnnnnnnnnnnnnnnnnnnnnnnnnnnnnnnnnnnnnnnnnnnnnnnnnnnnnnnnnnnnnnnnnnnnnnnnnnnnnnnnnnnnnnnnnnnnnnnnnnnnnnnnnnnnnnnnnnnnnnnnnnnnnnnnnnnnnnnnnnnnnnnnnnnnnnnnnnnnnnnnnnnnnnnnnnnnnnnnnnnnnnnnnnnnnnnnnnnnnnnnnnnnnnnnnnnnnnnnnnnnnnnnnnnnnnnnnnnnnnnnnnnnnnnnnnnnnnnnnnnnnnnnnnnnnnnnnnnnnnnnnnnnnnnnnnnnnnnnnnnnnnnnnnnnnnnnnnnnnnnnnnnnnnnnnnnnnnnnnnnnnnnnnnnnnnnnnnnnnnnnnnnnnnnnnnnnnnnnnnnnnnnnnnnnnnnnnnnnnnnnnnnnnnnnnnnnnnnnnnnnnnnnnnnnnnnnnnnnnnnnnnnnnnnnnnnnnnnnnnnnnnnnnnnnnnnnnnnnnnnnnnnnnnnnnnnnnnnnnnnnnnnnnnnnnnnnnnnnnnnnnnnnnnnnnnnnnnnnnnnnnnnnnnnnnnnnnnnnnnnnnnnnnnnnnnnnnnnnnnnnnnnnnnnnnnnnnnnnnnnnnnnnnnnnnnnnnnaggtcggctcctgtggtttcaacagccgcatcctgccccacgtgtaccccatccggctggtgaaggtcaatgaggacacgatggagctgctgcgggatgcccagggcctctgcatcccctgccaggccggtgag

SEQ ID NO: 29147 - DNA, 453 bp, Macaca Mulatta
atgccccctgacctatcccacccaggacttcatattgctactttggagtgaaaacagatgatggtttgtcaaagctcatatattttggtgactaatttctagacaataccaagaggcaaacggtggctctaatgacattcttgcaggaaaattgaactttccttgaaaaagagaaaaaagctaggaaactttgttttcatccttactcagtctctgagcttatagatcaaaacatatcttctgttctcaggtgagcactctgcacaaggaaaaaccaagaactgacagcttgaggaattctccccacacctaggcaataattatgtaagtttccctatttcattcacggagacaatcattaatatctgttttgttagcctggtgcagtttagattgtttttaaagaatttcaaaagctgaaaagttaatggtttgtgtcagtgcaattatcat

SEQ ID NO: 29148 - DNA, 374 bp, Macaca Mulatta
  misc_feature (1)...(374): n = A,T,C or G
gatatcgcttctaaattatgaagatggagtcttagatccaagctccattgtccctttgatagatggggggacagaaggttttaaaggaaatgcccgggtgattctgcctggaatgactgcttgtatcgaatgcacgctggaactttatccaccacaggtnnnnnnnnnnnnnnnnnnnnnnnnnnnnnnnnnnnnnnnnnnnnnnnnnnnnnnnnnnnnnnnnnnnnnnnnnnnnnnnnnnnnnnnnnnnnnnnnnnnagaaggggttccattagatggagatgatcctgaacatatacaatggattttccaaaaatccctagagagagcatcacaatataatattaggggtgttacgtatagactcactcaag

SEQ ID NO: 29149 - DNA, 652 bp, Macaca Mulatta
  misc_feature (1)...(652): n = A,T,C or G
gctgtggggcctgtacgagtcaatccaggactacaaacacctgtgtcaagacctgagcttctgtcaggacctgtcatcctccctccattcggacagctcctacccaccggatgcgggcctgtctgacgatgaggagcctcccgatgccagcctgcctcctgacccaccacccctcactgtgccccagacgcacaatgcccgtgaccagtggctgcaggatgccttccacatcagcctctgaannnnnnnnnnnnnnnnnnnngcacccatgcaaaaggctcagaaactccccctccggcaagccctcagactgcggagcctgcgccttcccccataccacctcacctcacaggagggccaggcatgtattcctcagaggcgaaactgccaaaccctttctcctgtcttgggttgactggcactggggcgggtacctagggtacagcctctgcccatggtactgggcctccacttcttccacatgtgtgcacccccagcttggccaaccctcagccttgcagtggggcccgaagcatcttcccctccccttggcatctctgggattgggatgagtgcctcgctcccatctcctcctcaccttttgttgctatcggcagctgctggctcaggggcatcccacctccgggctctg

SEQ ID NO: 29150 - DNA, 537 bp, Macaca Mulatta
ttgtttctctattatgtttttcacaattaccattttaatcggtatttctagcttacatgaaatgactaagctgttctttggctcaaactgtcttcctcttgtttttcaggaacaataccagttcgtctataaagcaatgctcagcttggtcagcactaaagaaaatggaaatggtcccatgacagtggacaaaaatggtgctgttctcattgcagatgaatcagaccctgccgagagcatggagtccctagtgtgactggaatcctgaaagggcacttaatttgtaaacttctgaagactgagaacttttttgaggccttttttgccagactctaggttatacaataacccagttacttttttacactgataaaagttttgatatttattttttgccattttatgtcttactggtatcctactgagcatttgcacctgtgttcatttcacacatggaaacgcaatgttacctagtttgcactatatgatcagtgttactgcctataatcttacacaacagcaaaccctgatgtgaca

SEQ ID NO: 29151 - DNA, 179 bp, Macaca Mulatta
  misc_feature (1)...(179): n = A,T,C or G
ncaggactaatcaggaatgctttgaagaagcttttcttccaaccctgcaaacactggccaatgcccctgcatcgtctcctttagctgaaattgatatcacaaatgttgctgagttacttgtagatttgacaagaccaagtggattaaatcctcagaccaagacttcccaagattatcag

SEQ ID NO: 29152 - DNA, 199 bp, Macaca Mulatta
agctgaaagtgtcaagcgtgacagcttggaagcagttatttatacatctctgtaaaaggatatgtgggaattgagttgtgtgaagatgtcaaaaagagattttagaagtgcaatatttatagtgatatttgtttcaccttcaagcctttgccctgaggtgttacaatcttgtcttgcattttctaaatcaatgcttaat

SEQ ID NO: 29153 - DNA, 1110 bp, Macaca Mulatta
  misc_feature (1)...(1110): n = A,T,C or G
ccaggtccctgcttccccttctctgtgagcgcggaactggatggggtggtctgccctgcgggcactgcaaacagcaagacagaggctaaacagcaggcagcgctctctgccctctgctacatccggagtcagctggagagcccannnnnnnnnnnnnnnnnnnnnnnnnnnnnnnnnnnnnnnnnnnnnnnnnnnnnnnnnnnnnnnnnnnnnnnnnnnnnnnnnnnnnnnnnnnnnnnnnnnnnnnnnnnnnnnnnnnnnnnnnnnnnnnnnnnnnnnnnnnnnnnnnnnnnnnnnnnnnnnnnnnnnnnnnnnnnnnnnnnnnnnnnnnnnnnnnnnnnnnnnnnnnnnnnnnnnnnnnnnnnnnnnnnnnnnnnnnnnnnnnnnnnnnnnnnnnnnnnnnnnnnnnnnnnnnnnnnnnnnnnnnnnnnnnnnnnnnnnnnnnnnnnnnnnnnnnnnnnnnnnnnnnnnnnnnnnnnnnnnnnnnnnnnnnnnnnnnnnnnnnnnnnnnnnnnnnnnnnnnnnnnnnnnnnnnnnnnnnnnnnnnnnnnnnnnnnnnnnnnnnnnnnnnnnnnnnnnnnnnnnnnnnnnnnnnnnnnnnnnnnnnnnnnnnnnnnnnnnnnnnnnnnnnnnnnnnnnnnnnnnnnnnnnnnnnnnnnnnnnnnnnnnnnnnnnnnnnnnnnnnnnnnnnnnnnnnnnnnnnnnnnnnnnnnnnnnnnnnnnnnnnnnnnnnnnnnnnnnnnnnnnnnnnnnnnnnnnnnnnnnnnnnnnnnnnnnnnnnnnnnnnnnnnnnnnnnnnnnnnnnnnnnnnnnnnnnnnnnnnnnnnnnnnnnnnnnnnnnnnnnnnnnnnnnnnnnnnnnnnnnngctgactcatgccacgaccctccgactctgagcagggccatccacacccggccctgcctggacagtgtcctggggccatgcctgccacctccctacgtccggaccgccctgcacctgttttcagggcccccagtggccccctctgaacctacccctgacacctgtcatggcctgagcctcaactggagcctgggggactctggcatcgaggttgtggatgtggccactgggcgcgtgaaggcca

SEQ ID NO: 29154 - DNA, 805 bp, Macaca Mulatta
gtgacttcttatatcctgatcatagtcctatggcttctttgcctttttttgttgcagtttaccaaattcgcaaagtttgggctggtatggcaccatgactgggtgtggcagcagcagttacacagtcactccccacctgaacggacctatgacagatactgctcctttgctctttacttgtagtaatttagatttgaacaatcatcatagcttatatgtgacaccacaaaactgacagcatcaccaagtcatgattcttgagttgtttttcataaatgtgtatattcgatgtgtttaaattccatctacataaacattccattatctgttgcaactgaaaacaaaatctagaagtgtggctgtgtttggtaaagaacacagctattatttttgaccttttcatagtaaaatgaagtaaaacggaaagtttggagtaggagaaaagagagattagatcttaaggcacttgatggcctccaaaaatcctgactttggaacatcaaatgcatgtgtgcacttttatctttgttctgaaagagtcactgcagtccccaaagtcatatgccaatgttcacactggaatactatattgtacaccgaactggaaggcaattttcctatgaaaatcaaagcctgtatattcattggtatgctctatatggaaatcttaataaaaattttatagtgtgaacagtgcagagttaaggcataaaaatgtttcactctctataaaaatctactgaaaatgtgtaatcattgaagacagttcttttaagcatgattttaaaatagcgactgaaattca

SEQ ID NO: 29155 - DNA, 654 bp, Macaca Mulatta
  misc_feature (1)...(654): n = A,T,C or G
gctgcgtagctcccgcgccccgagtgcatgcccaagcgggggctgccnnctttcgcggacgcggccccgctacagctcaaggtccgcgtgggccgagagggaggtgagccgcggcgtgtgtgccgagcgctactcgcaggaggtcttcngagaagaccaagcgactcctcttcctcggggcccaggcctacctggaccatgtgtgggatgaaggctgtgccgtcgttcacctgccagagtccccaaagcctggccctacaggggcgccgagggctgcacgtgggcagatgctgattggaccagacggccgcctgatcaggagccttgggcaggcctccgaagctgacccatccgggatagtgtccatcgcctgctcctcatgtgtgcgagccgtagatgggaaggccgtctgcagccagtgtgagcgagccctgtgcgggcggtgtgtgcgcacctgctggggctgtggctctgtggcctgtaccctgtgtggcctcgtggactgcagtgacatgtacgagaaagtgctgtgcaccagctgcgccatgttcgagacctgaggctggctcaagccggctgccttcacggagagccacaccatgcatggcagccttccctggacgagcgctcggtgttcacactgaactgtggggt

SEQ ID NO: 29156 - DNA, 890 bp, Macaca Mulatta
ggcttgcagtcctcttggcagacatgaggcaacgattgctcccgttcttcaccagccttctccttgtggctctgctgtttccaggattgtcccaagccagacatgttaaccactcagccaccgaggctctcagagaactccgggaaggagccactgggcaaggcacaaacaggtctcagctgctacgccacccagtgaaacgggcccccataatacggcgcatcccctattacccagaagttgaatcagatttaagaattgtcgactgcaagagaagtgaaggcttctgtcaagaatactgtaattatctggaaacgcaagcaaagacattctgttgtagactcaagttgcacccagaaactcacagatttaacagaagaaagcacttcctgggcagtaagatgataagactccttgtttgtatagtgaattatccacgaaatagttccttggggattgctttctggatctgtgatttggaaatggattcaagtctggaggagaagtgcacatctctcaccaggaggctcgaggaccctgatttaagagctgcatgggctttttagggcctagatgggccaggggatgttccaccgggaattagaaataccatctgccttatgcagcaagggacctgcagactttttttctgccattctggtgagaaaaagcgtgacatttgctctgatccctggaataggtgttgcgtatcaaatagagatgaagaaggaaaagagaagccaaagaccgatggcagatctggaatctaaaatgtaagctcctggaaggcagggatcttgaagtatcccaagggcttaaaggaatgtgtggcttgtagtaggtgttcaataaatatttgttgaatgaatttagcaccaaaaaaaaaaaaa

SEQ ID NO: 29157 - DNA, 676 bp, Macaca Mulatta
  misc_feature (1)...(676): n = A,T,C or G
tagaaaagcaggaaccaagaaagcaatactgtacataaaatgtcatttatattatccaacctggcatgggtgtctgttgcaaaggggtgcatgggaaagggctgttgatattnnnnnnnnnnnnnnnnnnnnnnnccccacacataactgttttgcacgtgcaaaaatgtattgggtcaagaagtgatctttagctaataaagaaagagaatagaaaacacgcatgagatattcagaaaatactagcctagaaatatagagcattaacaaagtaaaattaatatattaagttataattggaatatgtcagaagtttctttttacattcatatcttaaaaattaaagaaactgattttagctcatgtatattttatatgaaagaaaacacccttatgaattgatgactatatataaaattatattcactacttttgaacacattctgctatgaattatttatataagccaaagctatatgttgtaacttttttttagagaatagctttatcttggtttaactttttagttttattttaagaggggaaaacaaaaatatcttgcaagcagaaccttggaaaaaaaaagccatgaacacttattctatatgtaaattaaaagttgagccaaactctttgtgtatatagcatcttaaatatattatcacctttgatgtaa

SEQ ID NO: 29158 - DNA, 1042 bp, Macaca Mulatta
gctcaggtgttctcagcaccatgatgactcacacgggagagaagtcacataaggagctccaaaagtagggaggcctttcatgctggaaaaaggtattacaaatgcagtgaatgtgggaaagactttggtcagaaatatttacttgttcagcaccagagactacacactggggaaaagccttatgaatgcagtgaatgtgggaagttatttagccataagtccaacctttttatacaccaaatagttcacactggagaaaggccttatgggtgtagtgactgtggaaaatcctttagccgtaatgctgacctcattcaacatcagagagttcacactggagaaaagccttttacatgcagtgaatgtggaaaagctttcaggcataattccacacttgttcagcatcacagaatccacactggagtaaggccttatgagtgcagtgaatgtggaaaattgtttagtttcaactccagcctcatgaaacatcagagagttcacactggagaaagaccttataagtgcagtgaatgtggaaaattctatagccacaagtccagccttatcaatcattggcgtgttcacactggagaaaggccttatgagtgcagcgaatgtgggaagttttttagccaaagttcaagcctcatgcaacatcgaaaagttcacactggagaaaagccttttaagtgcaatgaatgtgggagattctttagtgagaattccagcctggttaaacatcagagggttcacactggagcaaagccttatgagtgcagggaatgtgggaaattttttcgccacagctccagtcttgttaaacatcgaaggattcacactggagaaatacagtgattgtgggaaatcctttagccagcatttcaacctcattccacaccagaaagttcacaggggaaaaaagtcttgaaggtaaacaatggaaatccattagctacacttctaaactcatttcacactggacagacagttcacagagtggacaatgtagtgaatatggaagaaggcctcagccaaaggccta

SEQ ID NO: 29159 - DNA, 274 bp, Macaca Mulatta
tccttcttagaaaatacagcaagttttcagaaagggagagagttggtttactttaagttggtgctttgtcattctagtgattatgaaaacggatgatttttaaagtggtttcattataaaatggctttatttcatttgaactgttaaaagtttccagagcacatactacattagtcatctaatatttacagttcagataatgccacaaagcacacttcattttggattatctacattgttaacttcttgaacacagatattcacagttggctaa

SEQ ID NO: 29160 - DNA, 543 bp, Macaca Mulatta
cccgggactcgacaacatggcttccccgccccaccagcagctgctgcatcaccacagcaccgaggtgagttgcgactccagcggggacagcaacagcgtgcgcgtcaagatcaaccccaagcagctgtcctccaacagccatcccaagcactgcaaatacagcatctcctccagctgcagcagctccggggattccgggggcgtcccccggcgagtgggcggcggaggccggctgcgcaggcagaagaagctgccccagctgttcgagagggcctccagccgctggtgggaccccaagttcgactcggtgaacctggaggaggcctgccgggagcgctgcttcccgcagacccagcgccggttccggtatgcgctcttctacatcggcttcgcctgccttctgtggagcatctattttgcggtgcacatgagatccagactgatcgtcatggttgcccccgcgctgtgcttcctcgtggtgtgtgtgggcttctttctgtttaccttcacccaagctgtacgccgcggcattacgcgtggacc

SEQ ID NO: 29161 - DNA, 691 bp, Macaca Mulatta
agaggtcccctccactcaggctgaggaatggagctcagaggagcattctgtccccaccagtctctagggccacaaggacaagctcagaaatgcctctgtcagtggcccatgagggtcccacctgggtgcctgggaggagcctccaggatctcacccattgcccatcccttccttcttacctggctccctcggttttgtactgcaggaatgctgagaaaatcctagggtacctcaactccaatgtcctgagccgggacctcatcccaccccacgtcaacttctcccacctgaccacaaaggactacatggagatgtacaatgtcatcatgaccgtgaaggaagaccagttctcagccctgggccttgacccctgccttctggaggacgagctagacaaggtgcggggataggctgcccttcccaggacaggcaggaacccagagagcagctgtcgctggctggagcttgggctcaggcctcaggatgctgacaggtagtcattagtttacttagtaagcaaggatctgctatgtgtccagagagagtgaaagggaagaaaggtattggccaaagtccctgcccagaggtaggcttgagcctagacaaagagtagggcagacacacacctctcagaagtcacagtaagtgtatgggatgatgtttccatttactgagtgggcttctcgtgcac

SEQ ID NO: 29162 - DNA, 158 bp, Macaca Mulatta
  misc_feature (1)...(158): n = A,T,C or G
nggactcacccttggtgctggtctcagcctagcccaggtgaaggacattttggctgacgtagtccagaagcttccagaggagaagacacagacataccatgctctcctgaagcatttgggaactctggctgggtcccagatcaggaacatggctgtat

SEQ ID NO: 29163 - DNA, 1766 bp, Macaca Mulatta
  misc_feature (1)...(1766): n = A,T,C or G
naggactggagccgggcctcgtctttcttggcttcctcctggtggttgggatggggctggctggggccttcctggcccattatgtgnnnnnnnnnnnnnnnnnnnnnnnnnnnnnnnnnnnnnnnnnnnnnnnnnnnnnnnnnnnnnnnnnnnnnnnnnnnnnnnnnnnnnnnnnnnnnnnnnnnnnnaggtggcccaggggagtcgatcaagtctgcctgcccgcagtatgtcagacgttcgcagtggccccagccaacccacggacagccccaacgttggcgtctatgagnnagggagacagggtttggctgaagaaattcccaggggatcagcacatagctatccgcccagcaaccaagacggccttctccaannnnnnnnnnnnnnnnnnnnnnnnnnnnnnnnnnnnnnnnnnnnnnnnnnnnnnnnnnnnnnnnnnnnnnnnnnnnnnnnnnnnnnnnnnnnnnnnnnnnnnnnnnnnnnnnnnnnnnnnnnnnnnnnnnnnnnnnnnnnnnnnnnnnnnnnnnnnnnnnnnnnnnnnnnnnnnnnnnnnnnnnnnnnnnnnnnnnnnnnnnnnnnnnnnnnnnnnnnnnnnnnnnnnnnnnnnnnnnnnnnnnnnnnnnnnnnnnnnnnnnnnnnnnnnnnnnnnnnnnnnnnnnnnnnnnnnnnnnnnnnnnnnnnnnnnnnnnnnnnnnnnnnnnnnnnnnnnnnnnnnnnnnnnnnnnnnnnnnnnnnnnnnnnnnnnnnnnnnnnnnnnnnnnnnnnnnnnnnnnnnnnnnnnnnnnnnnnnnnnnnnnnnnnnnnnnnnnnnnnnnnnnnnnnnnnnnnnnnnnnnnnnnnnnnnnnnnnnnnnnnnnnnnnnnnnnnnnnnnnnnnnnnnnnnnnnnnnnnnnnnnnnnnnnnnnnnnnnnnnnnnnnnnnnnnnnnnnnnnnnnnnnnnnnnnnnnnnnnnnnnnnnnnnnnnnnnnnnnnnnnnnnnnnnnnnnnnnnnnnnnnnnnnnnnnnnnnnnnnnnnnnnnnnnnnnnnnnnnnnnnnnnnnnnnnnnnnnnnnnnnnnnnnnnnnnnnnnnnnnnnnnnnnnnnnnnnnnnnnnnnnnnnnnnnnnnnnnnnnnnnnnnnnnnnnnnnnnnnnnnnnnnnnnnnnnnnnnnnnnnnnnnnnnnnnnnnnnnnnnnnnnnnnnnnnnnnnnnnnnnnnnnnnnnnnnnnnnnnnnnnnnnnnnnnnnnnnnnnnnnnnnnnnnnnnnnnnnnnnnnnnnnnnnnnnnnnnnnnnnnnnnnnnnnnnnnnnnnnnnnnnnnnnnnnnnnnnnnnnnnnnnnnnnnnnnnnnnnnnnnnnnnnnnnnnnnnnnnnnnnnnnnnnnnnnnnnnnnnnnnnnnnnnnnnnnnnnnnnnnnnnnnnnnnnnnnnnnnnnnnnnnnnnnnnnnnnnnnnnnnnnnnnnnnnnnnnnnnnnnnnnnnnnnnnnnnnnnnnnnnnnnnnnnnnnnnnnnnnnnnnnnnnnnnnnnnnnnnnnnnnnnnnnnnnnnnnnnnnnnnnnnnnnnnnnnnnnnnnnnnnnnnnnnnnnnnnnnnnnnnnnnnnnnnnnnnnnnnnnnnnnnnnnnnnnnnnnnnnnnnnnnnnnnnnnnnnnnnnnnnnnnnnnnnnnnnnnnnnnnnnnnnnnnnnnnnnncttaccgcatccacgtgaacttgagcaccgtggggattctccgtgctctggactcgggctaccaggtggagctgcgaggccgcacggagctgaag

SEQ ID NO: 29164 - DNA, 3441 bp, Macaca Mulatta
  misc_feature (1)...(3441): n = A,T,C or G
gtggcacgtctctgagcttcctggtgttggtgacaggctgcacatctgtgggcagaattcccgatgctgaaatctacaaaatcaccgccaccgacttttaccctcttcaggaagaggccaaggaggaggaacgcctcatagctctgaagaaaatcctcagctcgggggtgttctatttctcgtggcccaacgacgggtctcactttgacttgactgtccgcacgcagaagcagggggacgacagctctgagtgggggaactccttcttctggnnnnnnnnnnnnnnnnnnnnnnnnnnnnnnnnnnnnnnnnnnnnnnnnnnnnnnnnnnnnnnnnnnnnnnnnnnnnnnnnnnnnnnnnnnnnnnnnnnnnnnnnnnnnnnnnnnnnnnnnnnnnnnnnnnnnnnnnnnnnnnnnnnnnnnnnnnnnnnnnnnnnnnnnnnnnnnnnnnnnnnnnnnnnnnnnnnnnnnnnnnnnnnnnnnnnnnnnnnnnnnnnnnnnnnnnnnnnnnnnnnnnnnnnnnnnnnnnnnnnnnnnnnnnnnnnnnnnnnnnnnnnnnnnnnnnnnnnnnnnnnnnnnnnnnnnnnnnnnnnnnnnnnnnnnnnnnnnnnnnnnnnnnnnnnnnnnnnnnnnnnnnnnnnnnnnnnnnnnnnnnnnnnnnnnnnnnnnnnnnnnnnnnnnnnnnnnnnnnnnnnnnnnnnnnnnnnnnnnnnnnnnnnnnnnnnnnnnnnnnnnnnnnnnnnnnnnnnnnnnnnnnnnnnnnnnnnnnnnnnnnnnnnnnnnnnnnnnnnnnnnnnnnnnnnnnnnnnnnnnnnnnnnnnnnnnnnnnnnnnnnnnnnnnnnnnnnnnnnnnnnnnnnnnnnnnnnnnnnnnnnnnnnnnnnnnnnnnnnnnnnnnnnnnnnnnnnnnnnnnnnnnnnnnnnnnnnnnnnnnnnnnnnnnnnnnnnnnnnnnnnnnnnnnnnnnnnnnnnnnnnnnnnnnnnnnnnnnnnnnnnnnnnnnnnnnnnnnnnnnnnnnnnnnnnnnnnnnnnnnnnnnnnnnnnnnnnnnnnnnnnnnnnnnnnnnnnnnnnnnnnnnnnnnnnnnnnnnnnnnnnnnnnnnnnnnnnnnnnnnnnnnnnnnnnnnnnnnnnnnnnnnnnnnnnnnnnnnnnnnnnnnnnnnnnnnnnnnnnnnnnnnnnnnnnnnnnnnnnnnnnnnnnnnnnnnnnnnnnnnnnnnnnnnnnnnnnnnnnnnnnnnnnnnnnnnnnnnnnnnnnnnnnnnnnnnnnnnnnnnnnnnnnnnnnnnnnnnnnnnnnnnnnnnnnnnnnnnnnnnnnnnnnnnnnnnnnnnnnnnnnnnnnnnnnnnnnnnnnnnnnnnnnnnnnnnnnnnnnnnnnnnnnnnnnnnnnnnnnnnnnnnnnnnnnnnnnnnnnnnnnnnnnnnnnnnnnnnnnnnnnnnnnnnnnnnnnnnnnnnnnnnnnnnnnnnnnnnnnnnnnnnnnnnnnnnnnnnnnnnnnnnnnnnnnnnnnnnnnnnnnnnnnnnnnnnnnnnnnnnnnnnnnnnnnnnnnnnnnnnnnnnnnnnnnnnnnnnnnnnnnnnnnnnnnnnnnnnnnnnnnnnnnnnnnnnnnnnnnnnnnnnnnnnnnnnnnnnnnnnnnnnnnnnnnnnnnnnnnnnnnnnnnnnnnnnnnnnnnnnnnnnnnnnnnnnnnnnnnnnnnnnnnnnnnnnnnnnnnnnnnnnnnnnnnnnnnnnnnnnnnnnnnnnnnnnnnnnnnnnnnnnnnnnnnnnnnnnnnnnnnnnnnnnnnnnnnnnnnnnnnnnnnnnnnnnnnnnnnnnnnnnnnnnnnnnnnnnnnnnnnnnnnnnnnnnnnnnnnnnnnnnnnnnnnnnnnnnnnnnnnnnnnnnnnnnnnnnnnnnnnnnnnnnnnnnnnnnnnnnnnnnnnnnnnnnnnnnnnnnnnnnnnnnnnnnnnnnnnnnnnnnnnnnnnnnnnnnnnnnnnnnnnnnnnnnnnnnnnnnnnnnnnnnnnnnnnnnnnnnnnnnnnnnnnnnnnnnnnnnnnnnnnnnnnnnnnnnnnnnnnnnnnnnnnnnnnnnnnnnnnnnnnnnnnnnnnnnnnnnnnnnnnnnnnnnnnnnnnnnnnnnnnnnnnnnnnnnnnnnnnnnnnnnnnnnnnnnnnnnnnnnnnnnnnnnnnnnnnnnnnnnnnnnnnnnnnnnnnnnnnnnnnnnnnnnnnnnnnnnnnnnnnnnnnnnnnnnnnnnnnnnnnnnnnnnnnnnnnnnnnnnnnnnnnnnnnnnnnnnnnnnnnnnnnnnnnnnnnnnnnnnnnnnnnnnnnnnnnnnnnnnnnnnnnnnnnnnnnnnnnnnnnnnnnnnnnnnnnnnnnnnnnnnnnnnnnnnnnnnnnnnnnnnnnnnnnnnnnnnnnnnnnnnnnnnnnnnnnnnnnnnnnnnnnnnnnnnnnnnnnnnnnnnnnnnnnnnnnnnnnnnnnnnnnnnnnnnnnnnnnnnnnnnnnnnnnnnnnnnnnnnnnnnnnnnnnnnnnnnnnnnnnnnnnnnnnnnnnnnnnnnnnnnnnnnnnnnnnnnnnnnnnnnnnnnnnnnnnnnnnnnnnnnnnnnnnnnnnnnnnnnnnnnnnnnnnnnnnnnnnnnnnnnnnnnnnnnnnnnnnnnnnnnnnnnnnnnnnnnnnnnnnnnnnnnnnnnnnnnnnnnnnnnnnnnnnnnnnnnnnnnnnnnnnnnnnnnnnnnnnnnnnnnnnnnnnnnnnnnnnnnnnnnnnnnnnnnnnnnnnnnnnnnnnnnnnnnnnnnnnnnnnnnnnnnnnnnnnnnnnnnnnnnnnnnnnnnnnnnnnnnnnnnnnnnnnnnnnnnnnnnnnnnnnnnnnnnnnnnnnnnnnnnnnnnnnnnnnnnnnnnnnnnnnnnnnnnnnnnnnnnnnnnnnnnnnnnnnnnnnnnnnnnnnnnnnnnnnnnnnnnnnnnnnnnnnnnnnnnnnnnnnnnnnnnnnnnnnnnnnnnnnnnnnnnnnnnnnnnagatgacgcggacctggtggagctcaagcaggagctggaagccgtcggggagttccgccaccgttctccgagcaggtctctgtcggtccccaaccggcctcggcnnnnnnnnnnnnnnnnnnnnnnnnnnnnnnnnnnnnnnnnnnnnnnnnnnnnnnnnnnnnnnnnnnnnnnnnnnnnnnnnnnnnnnnnnnnnnnnnnnnnnnnnnnnnnnnnnnnnnnnnnnnnnnnnnnnnnnnnnnnnnnnnnnnnnnnnnnnnnnnnnnnnnnnnnnnnnnnnnnnnnnnnnnnnnnnnnnnnnnnnnnnnnnnnnnnnnnnnnnnnnnnnnnnnnnnnnnnnnnnnnnnnnnnnnnnnnnnnnnntccgaagaagccctaagtgccatggctccgagggcccccgaagcatcatctgaaccagagcccacaccgggggcagccaaaccaga

SEQ ID NO: 29165 - DNA, 342 bp, Macaca Mulatta
gtccacaatctccacagaggcggcattgggtcaccgctggaggatgcaggagggaggacccttgaggagcgccccctgcaggcccggaaccctccacgggtcgcggcaagggtctccggggcatacgaaatgggcattccccaaggcgagtctgagttccgcccagccccattcctggatgctcacgcggtctcccctaaacttccactgcgctcacagggagcccaggtcatcatcaccaccgcccgtggctaatgggccaaaacagaggaagaaaagcaactggcggagtacaacgcgcctgcgcgttatcagactcagcgacaggctggaaccccgccc

SEQ ID NO: 29166 - DNA, 751 bp, Macaca Mulatta
aagtcttaggttttcatgattcaaaagatacagcgtggtaaactaggtaactctaggtcagataattcattacggtgtcttaaatgaagattagattctattctgttagtatatcagtgatatgactaatctcactgttacatattaacccccagttctcatctgttgatcatatgtcttagaacagatttatggtttacctacaggtactagaattctgtgagtctttgaaaaaattacttaagagtaattttattatgtaagagtatggccttacttttccatacttgattctcatcaactttaaaaaatgttaatgtggcatagcaaaaatgcaatttctgttttagaatgttactacaaagagttactacagagttctttataataagataacagatgtgaggagtcagtggactgttctgaataatgacacttcatttgtgttattactttgatacttggtgaagacttgaaaaatagtattaaagaagcttttacagtgtaatataagttatattcacctcaaaagagtaaagataatgctttatatatgaagtgaacttgttggcagtgcagtttcaaaactaaactcttatttcatcttcagaaaagatttgggatacaaatttgtgagccatgttgaggaaatcaacagttacattttatacacttattttaaagttaatttttgaaaataaagcccttttcatgtttacaagatccagcagatgaatacatttgctaaccc

SEQ ID NO: 29167 - DNA, 765 bp, Macaca Mulatta
gttcatacatgtagatatgatcagatttaccatttttagggtaaagagggaaaaaaggtgtatttatcatcagctagatgtgctcactgtatgctccgttatttatatgcaaggcccgggtgactggaagtgcagttgtcaggcattttaataaactggacagccatttgtttctgcacgacaaggcatctttacacaggagcaatcgggagaaaacaggaaacagccaagcactctgcactgcaacacgccaccttaacagctaaccagcattactcaactgctacacaactgcgcctagtgcacaaaaatacataagagaagagattagaattgtgtttgataaacaatcctttcaaaaaatcaagtcttttcacctgaaaagtctttatacaaatttgggttcagattaccatttagatctgaaggtaaataacatatacaaatttacaccaacttttgtaggtttttaattttaaggaatgaaggcaatgctgagtcaatctctcgacagctttaggctgtgtgtaatggctgcacacgttttccttaaaagtcaggaggccacaaattaggttaccaatctgtttaatttcaaacaaaaaaagtcagcactatgtaacaaaatgaaattttacctcaaatatccaaatctcaataatgaaatctgaagtcgttcacctcactaaattacaagaaatttgaataacagcaacaaaatggcacataaaatgaagtttgccaactgaggcaaagcttaaaccc

SEQ ID NO: 29168 - DNA, 795 bp, Macaca Mulatta
agtgtatgattactggcctttttcatttatctataatttacctaagattacaaatcagaagtcatcttgctaccagtatttagaagccaactatgattattaatgatgtccaacccgtctggcccaccagggtccttttgacactgctctaacagccctcctctgcactcccacctgacacaccaggcgctaattcaaggaatttcttaacttcttgcttctttctagaaagagaaacagttggtaacttttgtgaattaggctgtaactactttataactaacatgtcctgcctattatctgtcagctgcaaggtactctggtgagtcaccacttcagggctttactcattaacagattttgttggcatagctctggggtgggcagttttttgaaaatgggctcaaccagaaaagcccaagttcatgcagctgtggcagagttacagttctgtggtttcatgttagttaccttatagttactgtgtaattagtgccacttaatgtatgttaccaaaaataaatatatctaccccagactagatgtagtattttttgtataattggatttcctaatactgatatttgtcatccccaaagaaagtgtattggttttttaaaaaagaaagtgtatttggaaataaagtcagatggaaaattcattttttaaattcccgttttgtcactttttctgataaaagatggccatattaccccttttcggccccatgtatctcagtacccctatctggagctgggctaagtaaataggaattggtttcacgcctgaggcaat

SEQ ID NO: 29169 - DNA, 2621 bp, Macaca Mulatta
  misc_feature (1)...(2621): n = A,T,C or G
gcgggtgaccagagggcctcagccgccctgcgggtcactgnnaagccaagtgtcttctcccgggagctcacagatgccaccatcacagagggtgaggacttgaccctggtgtgcgagaccagtgcctgcgacagccctgtgtgctggaccaaggatgggaagaccctgcggggatctgcccggtatcagctgagccacgagggccaccgagcccagttgctcatcactggggccaccctgcaggacagcggacgctacaagtgtgagactgggggcgcctgcagcagctccattgtcagggtgcannnnnnnnnnnnnnnnnnnnnnnnnnnnnnnnnnnnnnnnnnnnnnnnnnnnnnnnnnnnnnnnnnnnnnnnnnnnnnnnnnnnnnnnnnnnnnnnnnnnnnnnnnnnnnnnnnnnnnnnnnnnnnnnnnnnnnnnnnnnnnnnnnnnnnnnnnnnnnnnnnnnnnnnnnnnnnnnnnnnnnnnnnnnnnnnnnnnnnnnnnnnnnnnnnnnnnnnnnnnnnnnnnnnnnnnnnnnnnnnnnnnnnnnnnnnnnnnnnnnnnnnnnnnnnnnaaaccaggaggccagagaagggaccacagtcatgctgcagtgtgagctgaacaatgcagcccctgtggagtggaggaaggggtctgagaccctgagagatggggacagatacagcctgaggcaggatgggaccaaatgtgaactgcagattcgtggcctgtccatggtagacactggggagtactcgtgtgtgtgtgggcaggagaggacctcagccacgctcaccatcaggnagaagggaccacagtcatgctgcagtgtgagctgaacaatgcagcccctgtggagtggaggaaggggtctgagaccctgagagatggggacagatacagcctgaggcaggatgggaccaaatgtgaactgcagattcgtggcctgtccatggtagacactggggagtactcgtgtgtgtgtgggcaggagaggacctcggccacgctcaccnnnnnnnnnnnnnnnnnnnnnnnnnnnnnnnnnnnnnnnnnnnnnnnnnnnnnngaagggaccacagtcatgctgcagtgtgagctgaacaatgcagcccctgtggagtggaggaaggggtctgagaccctgagagatggggacagatacagcctgaggcaggatgggaccaaatgtgaactgcagattcgtggcctgtccatggtagacactggggagtactcgtgtgtgtgtgggcaggagaggacctcggccacgctcaccatcagggngctctgcctgccaggttcatagaagatgtgaaaaaccaggaggccagagaagggaccacagtcatgctgcagtgtgagctgaacaatgcagcccctgtggagtggaggaaggggtctgagaccctgagagatggggacagatacagcctgaggcaggatgggaccaaatgtgaactgcagattcgtggcctgtccatggtagacactggggagtactcgtgtgtgtgtgggcaggagaggacctcggccatgctcactgtcagggnnnnnnnnnnnnnnnnnnnnnnnnnnnnnnnnnnnnnngaggccagagaagggaccacagtcatgctgcagtgtgagctgaacaatgcagcccctgtggagtggaggaaggggtctgagaccctgagagatggggacagatacagcctgaggcaggatgggaccaaatgtgaactgcagattcgtggcctgtccatggtagacactggggagtactcgtgtgtgtgtgggcaggagaggacctcggccatgctcactgtcagggnnnnnnnnnnnnnnnnnnnnnnnnnnnnnnnnnnnnnnnnnnncacagaaggagccacagccacactgcggtgtgagctgaacaatgcagcccctgtggagtggaggaaggggtctgagaccctgagagatggggacagatacagcctgaggcaggatgggaccaaatgtgaactgcagattcgtggcctgtccatggtagacactggggagtactcgtgtgtgtgtgggcaggagaggacctcggccatgctcactgtcagggnnnnnnngccctgcctgccaggttcatagaagatgtgaaaaaccaggaggccagagaagggaccacagtcatgctgcagtgtgagctgaacaatgcagcccctgtggagtggaggaaggggtctgagaccctgagagatggggacagatacagcctgaggcaggatgggaccaaatgtgaactgcagattcgtggcctgtccatggtagacactggggagtactcgtgtgtgtgtgggcaggagaggacctcggccatgctcactgtcagggnnnnnnnnnnnnnnnnnnnnnnnnnnnnnnnnnnnnaggaggccagagaagggaccacagtcatgctgcagtgtgagctgaacaatgcagcccctgtggagtggaggaaggggtctgagaccctgagagatggggacagatacagcctgaggcaggatgggaccaaatgtgaactgcagattcgtggcctgtccatggtagacactggggagtactcgtgtgtgtgtgggcaggagaggacctcggccatgctcactgtcagg

SEQ ID NO: 29170 - DNA, 151 bp, Macaca Mulatta
gatcttcgagccaaagatgcggcgaggctggaagatggctctgtctggggggctgcggtgctgccgccgggtactgtcctgggtgccagtgctcgttattgtcctcgtcgtgctctggtcctactatgcctacgtctttgaactctgcctg

SEQ ID NO: 29171 - DNA, 1121 bp, Macaca Mulatta
  misc_feature (1)...(1121): n = A,T,C or G
ggattctctgcctaagcttaaggacctggcatttctcaagaaccagctggaacgcctgcagcggcgtgtggaagacgaagtcaacagtggagtgggccaggnnnnnnnnnnnnnnnnnnnnnnnnnnnnnnnnnnnnnnnnnnnnnnnnnnnnnnnnnnnnnnnnnnnnnnnnnnnnnnnnnnnnnnnnnnnnnnnnnnnnnnnnnnnnnnnnnnnnnnnnnnnnnnnnnnnnnnnnnnnnnnnnnnnnnnnnnnnnnnnnnnnnnnnnnnnnnnnnnnnnnnnnnnnnnnnnnnnnnnnnnnnnnnnnnnnnnnnnnnnnnnnnnnnnnnnnnnnnnnnnnnnnnnnnnnnnnnnnnnnnnnnnnnnnnnnnnnnnnnnnnnnnnnnnnnnnnnnnnnnctgccaccttcatccttgcctcccttcctgcagattgtgaacagtagttcctcagcctgcaccctggattccttcttccccttcctaactccatgggactggccccaagattgtgacttcaaggactaccagccccttattcttcaagccccgactgtggggttggtagatgcctctgatcctcagtattctctctggcaatgttccacagctcctccttcctggtagctggctccgtaacttgattttccccaaacgtgttgcaatccctgctgccccttagtcacccagggtctggtgtgggtatgagtgtagaggatgggggtatgccgggcctgggccatcccaggcaggcccgctggaccctgatgctactcctatccactgccatgtatggtgcccacgccccattgctggcactgtgccatgtggacggccgagtgcccttccgaccctcctcagccgtgctgctgactgagctgaccaagctactgttatgcgccttctcccttctggtaggctggcaagcatggccccagggggccccaccctggcgccaggctgctcccttcgcagtatcagccttgctgtatggcgctaacaacaacctagtgatctatcttcagcgttacatggaccccagcacctaccaaaagatgagcaatctcaagattggaagcacggctgtgctctactgcctctgcctccggcaccgcctctc

SEQ ID NO: 29172 - DNA, 876 bp, Macaca Mulatta
  misc_feature (1)...(876): n = A,T,C or G
gtgtatctcaaagtgcggccagatgnnnnnnnnnnnnnnnnnnnnnnnnnnnnnnnnnnnnnnnnnnnnnnnnnnnnnnnnnnnnnnnnnnnnnnnnnnnnnnnnnnnnnnnnnnnnnnnnnnnnnnnnnnnnggagatcatgagagactatatccagaagcacccagagctgaagatcagtgaggagggtttcaccaagaccaccctcggcagaacagaacgccagctcaaggacaagattgatgggcgacccaaaaaaccacctccgnnnnnnnnnnnnnnnnnnnnnnnnnnnnnnnnnnnnnnnnnnnnnnnnnnnnnnnnnnnnnnnnnnnnnnnnnnnnnnnnnnnnnnnnnnnnnnnnnnnnnnnnnnnnnnnnnnnnnnnnnnnnnnnnnnnnnnnnnnnnnnnnnnnnnnnnnnnnnnnnnnnnnnnnnnnnnnnnnnnnnnnnnnnnnnnnnnnnnnnnnnnnnnnnnnnnnnnnnnnnnnnnnnnnnnnnnnnnnnnnnnnnnnnnnnnnnnnnnnnnnnnnnnnnnnnnnnnnnnnnnnnnnnnnnnnnnnnagggcggctccgagaagcccaagcggcccgtgtcggccatgttcatcttctcggaggagaagcggcggcagctgcaggaggagcggcctgagctctccgagagcgaggtgacccgcctgctggcccgaatgtggaacgacctgtctgagaagnnnaggccaagtacaaggcccgggaggcggcgctcaaggctcagtcggagaggaagcccggcggggagcgcgaggaaaggggcaagctgcccgagtcccccaagagagctgaggagatctggcaacagagtgtcatcggcgactacctggcccgcttcaa

SEQ ID NO: 29173 - DNA, 427 bp, Macaca Mulatta
tttgacaacgcctcaaacttttctaaatataaaggaaatcatactggtttaaaacttctagaaatgtaaagaatgtgtcaaagattttaaatggttttcacacttcattgtatgtaagataattcatactggagaaaactacaagtgtgaagaatttggcaatactgttaattacggttcaaaccttattgcacaggaaagcatttatacttaagaaaaattgtacaaatataaagaatgtaaagtagccattaatatctgttgacatcctaatatcagaatgttggtacttaatataagcattataaatgcaattactgtctaaagattttaagaaaatataagccattaaagtgaagaagagtattcattttgaagacaaaggttacaaacataaaaagggttgtagtacatgtactggtatcac

SEQ ID NO: 29174 - DNA, 1207 bp, Macaca Mulatta
ggagttcaggaagtcagtcctcgcagatcagggtaaaagttttgctactgcatctcaccggaatactgaggaggaaggactcaagtacaagtccaaagtttcactgaaaggcaatagagaaagtgatggatttagagaagaaaaaaattataaacttaaagagactggatatgtagtggaaaggcctagcactacaaaagataagcacaaagaagaagacaaaaattctgaaagaataacagtaaagaaagaaactcagtcacctgagcaggtaaagtctgaaaagctcaaagacctctttgattacagtccccctctacacaagaatctggatgcacgggaaaaatctaccttcagagaggaaagcccacttaggatcaaaatgatagcgagtgattctcatcgtcctgaagtcaaactcaaaatggcacctgttcctcttgatgattctaacagacctgcttccttgactaaagacaggctgcttgctagtacacttgtccattctgtcaagaaggagcaagagttccgatccatctttgaccacattaagttgccacaggccagcaaaagcacttcagagtcatttattcaacacattgtgtccttggttcatcatgttaaagagcaatacttcaagtcagctgcaatgaccctaaacgagcggttcacttcgtatcagaaagccactgaagaacatagtactcggcaaaaggagccctgaaatacacagggagaattgacatctcaccaagtaccttgaggaagcatacccgtttagcaggggaagagagagtttttaaagaagaaaatcagaagggagataaaaaattaaggtgtgactctgctgaccttcggcatgacattgatcgccgtagaaaagaaagaagtaaagaacggggagattccaagggctccagggaatccagtggatcaagaaagcaggaaaaaactccaaaagattacaaggaatacaaatcttacaaagatgacagtaaacataaaagtagagagcaagatcattctcgatcttcatcctcttcagcatcaccttcttctcccagttctcgagaagaaaaggagagtaagaagggaagagaaagaagaatttaaaaccccaccctgaaaatgaaagaatactccagcttttgcaagaagttagcccgaccaccaggaaccctttttttcgaattagagggcgaaagaa

SEQ ID NO: 29175 - DNA, 740 bp, Macaca Mulatta
  misc_feature (1)...(740): n = A,T,C or G
gggtggatattggatacattaagatttctttttataagtattcattttgaatgtgcatatagttatttgactccttccaaatacttgtagccaaacattggctagaacaccccaagatatgttgacactatcctgttagcttcatattatacttgctagtttaggtctctatagaagccctatataatttagaatatgcccactgagtatctttattagaaagtaacataaagctatattaatgtagagtattttcatttgttttttcgtagcccgttacaaattggcaatgtttggttaatgtttgtgttacttggaaatcgctacagcttggccctatttttttcctaaatttttagcattaatccaattctgctgctaacaactgaagccagaaatctacttcctccatcttccactcttagtgcagtgagcaatactgttgtgcaacaaaaatgtcactttatcccagtgtgaatgagtagtctanattccccttctaccattgatttaaacatacatgttggtaagactgagactgcccatgtgtttagatagaatttttttaatgaaatgatcaggtggaattttgaaatatattctcctacaaaagaagatttcttttcccttttatattttggaggattggtttcttatatggaagattaaagaaatggtccttggctccttttattagaaattatttaaaattaagggtttcccccctggaatttttttta

SEQ ID NO: 29176 - DNA, 456 bp, Macaca Mulatta
  misc_feature (1)...(456): n = A,T,C or G
atatgccaagaatttggagtcttctttcaaaccagtgggggttggacaatgaatgtagttaanctggttcctgctcacactccagaattaaattctattgaaaaaggaaaatcagcaattcagcnnnnnnnnnnnnnnnnnnnnnnnnntaaatatgatagtaataaaatagagcataacgaaactgtgaaactttctgaagccttgtcagtggttaaagtatttaacactctactgttatgacagatgtctgtttataacttacaaaggaaactaagcttcttggtgaaaggatttgtgaagtggtttctgcaagcagcctataatcaagggtggcatccatttctgggaatggttaaacacaaaaggctgatagctggcataacatagttggagtcagtgcataattccaagtgnnnnnnnnnnnnnnnnnnnnnnatggggactggccaggaa

SEQ ID NO: 29177 - DNA, 76 bp, Macaca Mulatta
agtcctccgggcctcatatgaacaggagaaagaagcgcttacccactctttccaggaggccagtgctgcccagcag

SEQ ID NO: 29178 - DNA, 674 bp, Macaca Mulatta
ggggttgtgaggctgcttcagtggtagggagggagccgagaggggtccctgagtatacattcagagatgataattacaaaatggattgtgtatattcttgctgtgaaaggtgcagggcttcccttcctaccaataacctgttctgacattgacgttgtggagagctgaggctgtgtctgtactacggcattgggttgaaaaaaacagaagaagaggcttctcagggcataaaggaaaagctgtccatcaactgcccttcccagggcgtaagggagaagatgtccacggactcccctcccacccatggccaggacgtccatgtgaccagagacgtggtgaagcaccacctctctaagtctgatatgtcggcaaaccagagccaagaggtcctagaggagagaacacgaatccagttcataagatggagccacactcgtatcttccaagtgccaagtgagatgacagaggacatcatgcgagatcgaatagagcaggtgagacgaagcatctcccgtcttgcagatgtctcagctcaggacttcagtatgagaccctcctactcagactgctaagagcaacaggtggaagtccttcaagggtcagcagcaactgtatcagaagacattcttctcctgcttgactgacgaagggccagaaactgggagaaggactca

SEQ ID NO: 29179 - DNA, 790 bp, Macaca Mulatta
  misc_feature (1)...(790): n = A,T,C or G
gggggtccccgacgcaaccatggctgaagaacaaccgcaggtcgaattgttcgtgaaggctggtagtgatggggccaagattgggaactgcccgttctcccagagactgttcatggtactgtggctcaagggagtcaccttcaatgttaccaccgttgacaccaaaaggcggaccgagacagtgcagaagctgtgcccaggagggcagctcccattcctgctgtatggcactgaagtgcacacagacgccaacaagattgaggaatttctggaggcagtgctgtgccctcccaggtaccccaagctggcagctctgaaccctgagtccaacactgctgggctggacatatttgccaaattttctgcctacatcaagaattcaaacccagcactcaatgataatctggaaaaaggactcctgaaagccctgaaagttttaaaacattacttaacatcccccctcccagaataagtggtatgaaaaccaatgctgaaaaaagaaagggtgtcctctcaaaaagaagttttcgggatgggcaaacaaagcccacccctgggctgaactgccaaccctggtttcccaaaatttacacaatagtaacaaggtgggggggttaaaaaaattcccgggggaatacacacattcccccgaaggtcccttccgggagaagaagccaacccggaaacctagaaacaatggacgctacaacaccggggaaaaattantcccctttccacacgttaacccagaaaaatataaagaacaatggaaacctcacccctaactaaa

SEQ ID NO: 29180 - DNA, 968 bp, Macaca Mulatta
  misc_feature (1)...(968): n = A,T,C or G
ttttcattatcctcatttttggaaagacttcctcgcgacttcttctcccnnnnnnaggaggagacagaggaggacagtgacctgtcagattatggcgatgatgtggatgggaggaaagacgccttggctgaaccatgtttcatgttgattggggagatttttgaacttcgaggaantgtttaaatgggtgagaagaacattaattgccctcgttcaggtcacttttggaagaaccatcaacaannnnnnnnnnnnnnnnnnnnnnnnnnnnnnnnnnnnnnnnnnnnnnnnnnnnnnnnnnnnnnnnnnnnnnnnnnnnnnnnnnnnnnnnnnnnnnnnnnnnnnnnnnnnnnnnnnnnnnnnnnnnnnnnnnnnnnnnnnnnnnnnnnnnnnnnnnnnnnnnnnnnnnnnnnnnnnnnnnnnnnnnnnnnnnnnnnnnnnnnnnnnnnnnnnnnnnnnnnnnnnnnnnnnnnnnnnnnnnnnnnnnnnnnnnnnnnnnnnnnnnnnnnnnnnnnnnnnnnnnnnnnnnncttcaacaaatatgctgctgtctcctagagaccatgattgaaattttctgaaataaggcctgaactttggaatttgtaaaagatcctcgggtgattttaacatgcagagaagcttgggaaccactgcggtaatatcagagtcagccaagggactcagaannntcccccactcaggctgaatgatctgtgcactacaaacactgctctaccaagtctgctatgatgtaattctnnnnnnnnnnnnnnnnnnnnnnnnnnnnnnnnnnnnnnnnnnnnnnnnnnnnnnnnnnnnnnnnnnnnnnnnnnnnnnnnnnnnnnnnnnnnnnnnnnnnnnnnnnnnnnnnnnnnnnnnnnnnnnnnnntttttagtagttactttgagatgtgaaatgcatttgggatctaaataaattgatcacacggattaaaatatgaaag

SEQ ID NO: 29181 - DNA, 233 bp, Macaca Mulatta
  misc_feature (1)...(233): n = A,T,C or G
gtataggctgctggtgaaaggttcacgtggcccgagctgaacttcattgcctagcttnggatgtgctttctgccatgaagactgattttngttcgttctgagcatcaaaggaatttgctttttacaactggaatatgctcctgtgtgtataacagatcatgtatgtcttatgttttcattgatcattaaagagtttgacctcagagctccaggatcatcaataaatttgtcat

SEQ ID NO: 29182 - DNA, 670 bp, Macaca Mulatta
tgaagtgaccacttttcttctctttgaggcactacctggcagcaccatctaaacctgctctctgctgtggtcccagttactcaggaggctgaggcaggaggatcgcctgagtccaggaggttgaggctgcagtaagccatgactgtaccactgcactccagcctgggtgacagagtgaggccctatctggctgccagtgagttctgttgtgcatcagactttggacctcagaattttcacctggaacatgagaggtcagatgacataatgagtacgttctaacttttgaaacttctggagcttatttttactcttgatagcacgtatccttaaagaacaaagcttgtcagtttaaggcctgtctgtaatggcatctggtggtccagcagcctaacggtgctctgctccagaaacatctgtgtggcttccctacccctacaccaaggagctgccctgctgggtggatgtaaagactgttctgccagggtttcccactaaaggtattaacaagtcacgtggaccacagagggcccaatcccccttggccgctaaggctaaggttggagccggagagctgtagggaccggaccaccaggatgcttcatctccacaaaggagagtgccgcgctgtctgggggccgggcgtcactactatcatgaagaaaaatga

SEQ ID NO: 29183 - DNA, 708 bp, Macaca Mulatta
  misc_feature (1)...(708): n = A,T,C or G
cagatccaggcaccggaacctcaacccggatgcctctatgtgtattattgtcaaatgagacagtgcagggtgtgagtttgactttatccccgatgtcaagggagcagtactggtttgtgacatgtcctcaaactttcctgtccaagcccagtggatgtttccaagnnnnnnnnnnnnnnnnnnnnnnnnnnnnnnnnnnnnnnnnnnnnnnnnnnnnnnnnnnnnnnnnnnnnnnnnnnnnnnnnnnnnnnnnnnnnnnnnnnnnnnnnnnnnnnnnnnnnnnnnnnnnnnnnnnnnnnnnnnnnnnnnnnnnnnnnnnnnnnnnnnnnnnnnnnnnnnnnnnnnnnnnnnnnnnnnnnnnnnnnnnnnnnnnnnnnnnnnnnnnnnnnnnnnnnnnnnnnnnnnnnnnnnnnnnnnnnnnnnnnnnnnnnnnnnnnnnnnnnnnnnnnnnnnnnnnnnnnnnnnnnnnnnnnnnnnnnnnnnnnnnnnnnnnnnnnnnnnnnnnnnnnnnnnnnnnnnnnnnnnnnnnnnnnnnnnnnnnnnnnnnnnnnnnnnnnnnnnnnnnnnnnnnnnnnnnnnnnnnnnnnnnnnnnnnnnnntaggtccgtgggaggcatccgggcctctctgtataatgctgtcacgattgaagatgttcagaagctggccgccttcatgaaaaattttttggagatgcatcagctatga

SEQ ID NO: 29184 - DNA, 182 bp, Macaca Mulatta
  misc_feature (1)...(182): n = A,T,C or G
atgaggcgtgcagtcaatccgaatcactcgctgagatgttgccccttccggggtcactcgtcgtgtagacgctgcctttgtgcagctgagggaacagcccttggcccctgccgcacaatacgtatttatattcacatgtgcctgttgtgggagcagggccagcagatcaccatgatgagggn

SEQ ID NO: 29185 - DNA, 3744 bp, Macaca Mulatta
  misc_feature (1)...(3744): n = A,T,C or G
tacaaactatattggcgggcgttgggggctgaggaggaggccaatggcgatcgcccgcccgtggccgtggagaccaggcttgggatgtggggcccatccggctcaagaagaaagtgaagcagtacgagctgacccagctagnagtccctggccggctgtatgaggtgaagctcgtggcattcaacaaacatgaggacggctatgcagcagtgtggaagggcaagacggagaaggcgcccgcaccagnnnnnnnnnnnnnnnnnnnnnnnnnnnnnnnnnnnnnnnnnnnnnnnnnnnnnnnnnnnnnnnnnnnnnnnnnnnnnnnnnnnnnnnnnnnnnnnnnnnnnnnnnnnnnnnnnnnnnnnnnnnnnnnnnnnnnnnnnnnnnnnnnnnnnnnnnnnnnnnnnnnnnnnnnnnnnnnnnnnnnnnnnnnnnnnnnnnnnnnnnnnnnnnnnnnnnnnnnnnnnnnnnnnnnnnnnnnnnnnnnnnnnnnnnnnnnnnnnnnnnnnnnnnnnnnnnnnnnnnnnnnnnnnnnnnnnnnnnnnnnnnnnnnnnnnnnnnnnnnnnnnnnnnnnnnnnnnnnnnnnnnnnnnnnnnnnnnnnnnnnnnnnnnnnnnnnnnnnnnnnnnnnnnnnnnnnnnnnnnnnnnnnnnnnnnnnnnnnnnnnnnnnnnnnnnnnnnnnnnnnnnnnnnnnnnnnnnnnnnnnnnnnnnnnnnnnnnnnnnnnnnnnnnnnnnnnnnnnnnnnnnnnnnnnnnnnnnnnnnnnnnnnnnnnnnnnnnnnnnnnnnnnnnnnnnnnnnnnnnnnnnnnnnnnnnnnnnnnnnnnnnnnnnnnnnnnnnnnnnnnnnnnnnnnnnnnnnnnnnnnnnnnnnnnnnnnnnnnnnnnnnnnnnnnnnnnnnnnnnnnnnnnnnnnnnnnnnnnnnnnnnnnnnnnnnnnnnnnnnnnnnnnnnnnnnnnnnnnnnnnnnnnagggaatccctcccaggcctgtcctccacggccacccctgggaatcctgcgctgtactccagagctcagcttggccccccgagtcccccagctgcccatgaactggagtcccttgtgcacccccatccccaggactggtccccgccaccctcagatgtggaggacagggctgaagtgcacagccttatgggtggcggtatttctgaaggccggggtcactccaaaagaaagngatctcttgggctcaaccaagcggtccgagctgggctggctcctgggcaggctgtgagctgccccaggcaggcccccggccggctctgacccgggccctgctgccccctgctggaactgggcagacgctgttgctgcaggctctggtgtacgacgccataaaggnnnnnnnnnnnnnnnnnnnnnnnnnnnnnnnnnnnnnnnnnnnnnnnnnnnnnnnnnnnnnnnnnnnnnnnnnnnnnnnnnnnnnnnnnnnnnnnnnnnnnnnnnnnnnnnnnnnnnnnnnnnnnnnnnnnnnnnnnnnnnnnnnnnnnnnnnnnnnnnnnnnnnnnnnnnnnnnnnnnnnnnnnnnnnnnnnnnnnnnnnnnnnnnnnnnnnnnnnnnnnnnnnnnnnnnnnnnnnnnnnnnnnnnnnnnnnnnnnnnnnnnnnnnnnnnnnnnnnnnnnnnctacccagacctccagccaggcaaagtgctggaggagaccactggagacagctgccagctcaaagccccctgccctctaggagccagcccaggcctgcccagatccccggtctcctcctctgcctagctcctcccagagggtgtagtttggggtaggcaggtatgggtcacacaggatgcaacacctgtggccatgcatgtccacatgtgtgcctgtagatacatcatcaagccctttggagcttcctaagatgctttggctggggggagaggaaaacatggattattcactccccccatactctttgtgatacacatgtgacatgtgaaagacatacgagacacagctacatgtgatgtgcacatgtgtgaagtgcatgtatgtgtactggttggtgagctgggaaaccttggcccaggcagtggtcactacagccagattggtcctccaggtcaggacggtgccccagagtggtcagtccccagccctgtgggcccccacctccatcacccagccttttattacacactctgagagtgtctccaatgcctgtctgacaaagacagtcccagcccattttcctgtctggctgggttgagtgcaagcagactctgaatgcctagcatttcagctgcatcacctcccagcttcttattgcccaaaaagagagggtgaccctggctccccnnnnnnnnnnnnnnnnnnnnnnnnnnnnnnnnnnnnnnnnnnnnnnnnnnnnnnnnnnnnnnnnnnnnnnnnnnnnnnnnnnnnnnnnnnnnnnnnnnnnnnnnnnnnnnnnnnnnnnnnnnnnnnnnnnnnnnnnnnnnnnnnnnnnnnnnnnnnnnnnnnnnnnnnnnnnnnnnnnnnnnnnnnnnnnnnnnnnnnnnnnnnnnnnnnnnnnnnnnnnnnnnnnnnnnnnnnnnnnnnnnnnnnnnnnnnnnnnnnnnnnnnnnnnnnnnnnnnnnnnnnnnnnnnnnnnnnnnnnnnnnnnnnnnnnnnnnnnnnnnnnnnnnnnnnnnnnnnnnnnnnnnnnnnnnnnnnnnnnnnnnnnnnnnnnnnnnnnnnnnnnnnnnnnnnnnnnnnnnnnnnnnnnnnnnnnnnnnnnnnnnnnnnnnnnnnnnnnnnnnnnnnnnnnnnnnnnnnnnnnnnnnnnnnnnnnnnnnnnnnnnnnnnnnnnnnnnnnnnnnnnnnnnnnnnnnnnnnnnnnnnnnnnnnnnnnnnnnnnnnnnnnnnnnnnnnnnnnnnnnnnnnnnnnnnnnnnnnnnnnnnnnnnnnnnnnnnnnnnnnnnnnnnnnnnnnnnnnnnnnnnnccagaagaagctaaatgaggagaaggggagtgagagttcagggaggcccttcccaccctgtgaagcttgacttgatctgggttggggatgacagaaatgtcactctctggggtgctggcagggaggtctttgcacaggaaaaggattagctcatttcagtttgttttttctttaaattgaatcctcaagtcattttctgttcacctgccgcacagggacaagcttgacttctattttatgtgtaatgaaaacaatgtcattgatttgatttttcacctcagccctctcgtaggagcatagaaagttagggtctttactccctaatggtgtctgatcggcacatcaagagttaactctggcttctgagccaaattcgaaataaccaatccatttttccnnnnnnnnnnnnnnnnnnnnnnnnnnnnnatgtctctcagcacagttgcggcttcctcaaaccctgaaagcatctgtgtttattacactcgggtgtcactcactgttgatgtctgcacctacatttccacctcctccccctccttcagccagcctatgataacactaaagattattaatgttggttttgtatctcgttaaagacagaattgtcacttgtactattcctgtagcattcagcgctgctgtggctaacaccactgtgtatgtttcatcattgctctgaaggtcaaaagcctcattttattttgctggtttgannnnnnnnnnnnnnnnnnnnnnnnnnnntgccctgaattaaatggctgttttaacagtaggctctta

SEQ ID NO: 29186 - DNA, 707 bp, Macaca Mulatta
tcattacctcctggccatgattcttctaggagataattctgctctctggagatgttggtaggaaagttcaagttatgcagctgagaagcagggaccaagtagggctcctgggtgcattgtcaccttgggtgtccactccaatgtacaagtctcttgtgccatccttaggcaacaactggggtgggtgtgagcaggtggaaggagcctcagcctatgccattacctcctgcttccttatcaggctgtgtgttaattctgggccagtctgggccatggggtggaaatggcctgggggacatgagagcaccccttcgttgaagatccctgtacatggggtgttggaacctggagcgcaaccattatgcagccctgtaggcctcagtagtcatcccagcagcagtggctgagaggtggtggtctcagtagggatctgtacagagggcaaataaacaagttttctatttatctggaaagcatggacttcctttgactcttttgatgttgaaaagttgatagtttcacccatgtgcagtgatttgaatgttcttatgaagctcctcttggataccaaacacatgagatcgcaatccctctctgagcctgcgttccctcctttgctcagtacctagaatcactccatccagaaaaccaggtcactgtcagcatctctaggactataagtcaaaggcgagaaaagagtgagcagg

SEQ ID NO: 29187 - DNA, 798 bp, Macaca Mulatta
ggagtttttttgagacaatgacttttgtaaggattggtactatcattccttatgacatgtacattgtctgtcactaatccttggattttgctgtattgtcacctaaattggtacaggtactgatgaaatctctagtggataatcataacactcttggtcacatgtttttccttcagcttgaaagctttttttttaaaaggaaaagataccaaatgcctgctgctaccacccttttcaattgctatcttttgaaaggcaccagtatgtgttttagattgatttccctgtttcagggaaatcacagacggtagtttcagttctgatggtataagcaaaacaaataaaacatgtttataaaagttgtatcttgaaacactggtgttcaacagctagcagcttatgtgattcacccccataccacgttagtgtcacaaattttatggttatctccagcaacatttctctagtacttgcacttattatcttttgtctaatttaaccttacctgaattcctcccttttctcctggaggcatttatattcaaaagtgataattcttttccttagatgcataagggagagtctctaaattttgatggaaatggacccttgaattattgacttacccttatgtactccggtgggaaattgtggctaccagtttgagcactaattctggggtgcctatgaaccttaaggccggcttattatcctccttcctgaacttccgggaaaaaattaagcccccccttttaaaccaaagggtacccaaggttaaaggggggtttttccggggca

SEQ ID NO: 29188 - DNA, 906 bp, Macaca Mulatta
  misc_feature (1)...(906): n = A,T,C or G
tttgtgacataaatcctaaacttgattttgatttagaggatcaatggaagtgtataattagctggtcattttggttgaggcagttgctgttttactttccttcctgaaaggcagtagcaggaagccattggcttccccttgtctgtggtgagcagatgacacccttcttattgctgtctttcctctgctcatggcatataaagctgctgctttctacagaaggttggatacttaaactcttccgtagtgtatttttgaaaggattataaagcatagtaaaggaattatatcaactgtgttttccttataataacatggcattatcatcactgaaagtcagtgagcttaagtttcttaaaagaagtagttcattgggaatccttctctctctttgcggtgatacctggaattacagtttttatatcaatctctgacctcattaaggtcccatgttgtatatacttcatagatttttgaaatgaaatgtgcttaggaatataatcttttattggataatcaattaccaaatcaatggcaatggaaagtccagagttgttgttgtataaatggnnnnnnnnnnnatgaatgtaaggtatgtcgttatatatatataaaaatgttttcctaaagaaacttcttagtgaagtgggtactacatttgttacagaatttgctaaacgaatttaagtgagaaaaaattaagcctttaagtttcaaaaatactctctcagatcgtttaaaaataatatattctaggccaggtacggtggctaacgcctgtattcccagcactttgggaggccaaggcgggtggatcacgaggtcaggagatcgagaccatcctggctaacacaatgaaaccccatctccactaaaatacaaaaaattagctgggcgtggtggcgg

SEQ ID NO: 29189 - DNA, 85 bp, Macaca Mulatta
gtcttagtggtgcaatggctagtataagcgtgcgttcgagtaccccaggctctcctacacatgtaagcagtggatcgaatgctag

SEQ ID NO: 29190 - DNA, 781 bp, Macaca Mulatta
ttaagggtgagtcagatgattccattcttcgattggccagggccgacggcatcgtctcaaagtaaggttgggggctcacatttgggcagagtgagtggactagggctgctccagaggcgtggtcctaacgttgtccttttcccctggttctaggaacttttgactggagagaatcatggaagtggaatatttgtcataaataaagagtgaaaacctatctgtgcaggttcgttctgtgtctgtaggcccagggttgaggttttgctgtcaatgggtgacaagggtggggtacggtacccagttagttgaaaggagacaagctgtgaaacgtattgcaaaaccgaggtttaaaggatacattatccatttagaaacatcttaagataaaatgactcaaacgttctgaggtcagagactcgcttatgcacattgacatccacaactgctaccgacgtggaagcaacaccaggcctgcttttgtggagtcacagcccagctgaacacctcagctcccgacacctgggtgtgttctaggggatgacacgctgagagtgtagtttggtgtaactactggctttgttgcagtaatcctcgaataccacacagtggcagctcttggcatcacgacaatggacatactgaagggaaggcttcacacttcacatagaccggtttggttaataactttcactacataaatacacaaacttaaattactgtgcttatcagccatttcttgctttcatgtgtagaaagaaccatgaagacgggtgtccctgga

SEQ ID NO: 29191 - DNA, 1031 bp, Macaca Mulatta
  misc_feature (1)...(1031): n = A,T,C or G
gggacataggaagctgggagcaaggaaagggtcttagtcactgcctcccgaggttgcttgaaagcactcagagaattgtgcagctgtcatttatctatgaccaataggaagagcaaccagttactgttagcaaaagggaaccagaagatgggctgcagggccctaccttgtgagtggggcatctgttggactttccacctggtcatatactctgcagctgttagaatgtgcaagcacttgggaacagcatgagcttgctgtttgtatacagggtatttctagaagcagaaatagactgggaagatgggcaacctatgggttacaggcatggccgtgctcctcacctgtattttgtaatgagaaaataaattgctttttaccgaagacagatggaaacgatacaactccgtagcccacatattatttaaaaagaccccccttcttcataaagaaattttattacatatatagaatgttgttttgggccggcctttcggcaccataaaaaaagcctcttcctaaaacctatattctgtgggggggcgggggtgcccttatgggataaggtgaagaaggggtcaataatctggtttcccttagagatataccgggggtaaaagatatatatggtgggggattgtccatccccaataaaaagagaccattctcagagggggagagtatggagtattttggtgaaacttaatttcctgacaatgggagttatcctatgaagcctcatttatcttgatgattttataagcggccggtgaggtccatcagtcgatgtagattgtctacataacaatatattatacacacacggacacccttgatgatacgtacgatgtacgagagggactcaggtaatgcgcgagattcctaatcataaggagcatattttatagcgtcggaacgatagtgcacagaggatatcaggatataaagctcgcggagtagaccgaanatagcacatgagagtcagctcctgagtgatgagatcgtagtcgcgcagacaaatatgtgtatat

SEQ ID NO: 29192 - DNA, 445 bp, Macaca Mulatta
  misc_feature (1)...(445): n = A,T,C or G
gagaagatgtttgaacaaattgactctgctaatgagnnnnnnnnnnnnnnnnnnnnnnnnnnnnnnnnnnnnnnnnnnnnnnnnnnnnnnnnnnnnnnnnnnnnnnnnnnnnnnnnnnnnnnnnnnnnnnnnnnnnnnnnnaggtgttctagaggtctattacacacacttgaggtgtagatgtgtccaagagagctcagtctttatccccagacgcttcattgatcgaattcaaatctcgcctcgtgggaatggttgtccaaggaaagaaatcannnnnnnnnnnnnnnnnnnnnnnnnnnnnnnnnnnnnnnnnnnnnnnnnnnnnnnnnnnnnnnnnnnnnnnnnnnnnnnnnnnnaagttcttcaactccaccagttccagtgtttaagagaaagattccctgatgctgatattactgctgagaacacctgcattcttccc

SEQ ID NO: 29193 - DNA, 767 bp, Macaca Mulatta
  misc_feature (1)...(767): n = A,T,C or G
ggggctgggcttnnnnnnnnnnnnnnnnnnnnnacccaccttgacctcccaaagtannnnnnnnnnnnnnnnnnnnnnnngtgcctggccaagttttcttaaagtgagcttaatttctgaactcttagtgattcatatatgtacataaatctgtgatcccatttcttattgcaccattcaggaacactttgtataaatgagtggctttttatttcatactattagtagtatcatggttccattacaggcctattaacctcatacattgtcattagtctttgaagaaaaaatatgtaaatatatatgtgtaacaagagaatttctctctaaagcaagggcttaaaattttttggaaaagtttgacaaagtataccacatgaattcagatttacctcaatgctaagaattatgtttagttaggaaaaggaaagtcattttgatctcaggtagaaaagtagattgctttgagttttatgtagctttagactttaaaaagttagaatttattctgttactctattatttgaaaaaattatgcctctggtttaattgttggtgattacacactgtctttctcttacccttgtgtattgaattatgtccataatcaagttgatgtggatcctgaaaagtgttaagaaaatctgaatgggaatttgtccatttatttttaaattactctgacactcaactgctggatggttccaaccgtgctcatatacacagtgctagagttgtgacnnnnnnnnnnnnnnnnnnnnnnnnnn

SEQ ID NO: 29194 - DNA, 814 bp, Macaca Mulatta
gggagtgcaccaacatggctgcccccgtggatcttgagttgaagaaggccttcacagagcttcaagccaaagttattgacactcaacagaaggtgaagctcgcagacatacagattgaacagctaaacagaacgaaaaagcatgcacatcttacagatacagagatcatgactttggtagatgagactaacatgtatgaaggtgtaggaagaatgtttattcttcagtccaaggaagcaattcacaatcagctgttagagaagcagaaaatagcagaagaaaaaattaaagaactagaacagaaaaagtcctacctggagcggagcgttaaggaagctgaggacaacatccgggagatgctgatggcacgaagggcccagtagggagcctctcggggaagctcttcctcctgcccctcccattcctggtgggggcagaggagtctctgcagggaaacttcagcttctcttctgccccgatggacactttatctggatgacctagcaacgtcacattttctgcgtcaccctgagccccatttgcttccaagccctggagtttttaccctggcgctgcctgcccactctgcccaggacactcttccctctcggggtgtgtgatgaactcccaggagaaggaagatgggagccaggggcagataggaagctctgcctgggcttttcactaggcatgccagccagaccaataaaaagcgtccgtcccactctgctaagcctgcttttcttcaccaaagggaaggaacaaaggttgaaaaaaagcattggccattctcacccttagctccttgctccct

SEQ ID NO: 29195 - DNA, 755 bp, Macaca Mulatta
  misc_feature (1)...(755): n = A,T,C or G
ggggtgctgattggacaagtctgtctacctcccattgtagatgttagaagctatattcttttcacatgcataatataactctttgtgtatgtatatatgcccaggcatgttccttcctcaaaacattaaattcaccattttggtcaactcaaagcaagtacaccatgggatatagatctgaaataatgtctagatttttacttactgaatgaggtgtcttgagtgtctaagactatatgatgagatggcaagtaattgcctaaagaaatgatgtagtgattttatatctcttatatttatttactttttgatccagaaataaattatatagataaccannnnnnnnnnnnnnnnnnnnnnnnnnntggaggagaaaggatgggtgtatattcaggaacctatgttacttgtttgcaactaataccccttctcagtagtacaaagatttgatttctttttctttctatttcctatagacttcatctgcagagagaaagagacgattacctatgtggtttgccaaaggaagtcacaccagcaagaaattaatggacaaaacgaaaaggggaggcctttttagttaagctggcaattaccggaacaattatgtttcttgctgtattacaagaggagagttatattttatttctgaagagtaaggaataatatttttgacttaaaaatgattctgattacagagttcactgttttatttgaaagaactagacatccttaaaatcaggcctttcccgcaa

SEQ ID NO: 29196 - DNA, 1708 bp, Macaca Mulatta
  misc_feature (1)...(1708): n = A,T,C or G
acagatctgtgtctccaagtgcccagaaaaatttttaacctatgtggaaatgcaacttttgtacacaaaagacaaaagccactgggaagactaccgtcagttctgtaagaccactgctaagcctgtgaagnnnnnnnnnnnnnnnnnnnnnnnnnnnnnnnnnnnnnnnnnnnnnnnnnnnnnnnnnnnnnnnnnnnnnnnnnnnnnnnnnnnnnnnnnnnnnnnnnnnnnnnnnnnnnnnnnnnnnnnnnnnnnnnnnnnnnnnnnnnnnnnnnnnnnnnnnnnnnnnnnnnnnnnnnnnnnnnnnnnnnnnnnnnnnnnnnnnnnnnnnnnnnnnnnnnnnnnnnnnnnnnnnnnnnnnnnnnnnnnnnnnnnnnnnnnnnnnnnnnnnnnnnnnnnnnnnnnnnnnnnnnnnnnnnnnnnnnnnnnnnnnnnnnnnnnnnnnnnnnnnnnnnnnnnnnnnnnnnnnnnnnnnnnnnnnnnnnnnnnnnnnnnnnnnnnnnnnnnnnnnnnnnnnnnnnnnnnnnnnnnnnnnnnnnnnnnnnnnnnnnnnnnnnnnnnnnnnnnnnnnnnnnnnnnnnnnnnnnnnnnnnnnnnnnnnnnnnnnnnnnnnnnnnnnnnnnnnnnnnnnnnnnnnnnnnnnnnnnnnnnnnnnnnnnnnnnnnnnnnnnnnnnnnnnnnnnnnnnnnnnnnnnnnnnnnnnnnnnnnnnnnnnnnnnnnnnnnnnnnnnnnnnnnnnnnnnnnnnnnnnnnnnnnnnnnnnnnnnnnnnnnnnnnnnnnnnnnnnnnnnnnnnnnnnnnnnnnnnnnnnnnnnnnnnnnnnnnnnnnnnnnnnnnnnnnnnnnnnnnnnnnnnnnnnnnnnnnnnnnnnnnnnnnnnnnnnnnnnnnnnnnnnnnnnnnnnnnnnnnnnnnnnnnnnnnnnnnnnnnnnnnnnnnnnnnnnnnnnnnnnnnnnnnnnnnnnnnnnnnnnnnnnnnnnnnnnnnnnnnnnnnnnnnnnnnnnnnnnnnnnnnnnnnnnnnnnnnnnnnnnnnnnnnnnnnnnnnnnnnnnnnnnnnnnnnnnnnnnnnnnnnnnnnnnnnnnnnnnnnnnnnnnnnnnnnnnnnnnnnnnnnnnnnnnnnnnnnnnnnnnnnnnnnnnnnnnnnnnnnnnnnnnnnnnnnnnnnnnnnnnnnnnnnnnnnnnnnnnntatcacacacgatccctaacatttggatctttaattattgcattaattcaaatgtttcaaattgtcctacaatacttgaaccaccgtcttaaacgtannnnnnnnnnnnnnnnnnnnnnnnnnnnnnnnnnnnnnnnnnnnnnnnnnnnnnnnnnnnnnnnnnnnnnnnnnnnnnnnnnnnnnnnnnnnnnnnnnnnnnnnnnnnnnnnnnnnnnnnnnnnnnnnnnnnnnnnnnnnnnnnnnnnnnnnnnnnnnnnnnnnnnnnnnnnnnnnnnnnnnnnnnnnnnnnnnnnnnnnnnnnnnnnnnnnnnnnnnnnnnnnnnnnnnnnnnnnnnnnnnnnnnnnnnnnnnnnnnnnnnnnnnnnnnnnnnnnnnnnnnnnnnnnnnnnnnnnnnnnnnnnnnnnnnnnnnnnnnnnnnnnnnnnnnnnnnnnnntcattttggggtcttacctgattgcacatgggttcttcagcgtctatgcaatgtgtgttgaaacaattttcatctgcttctgtga

SEQ ID NO: 29197 - DNA, 207 bp, Macaca Mulatta
gcttaatcgaaccctgaagaagatgggacagagaccttgacgacattcacacacattattcaggaacctcttttgatatattataggcaggaagtgtttttgctaccatgaaacctttacctagatcagccatcagcctgtcaactcagttaacaagttaaggaccgaagtgtttcacgtggatctcagtaaaggatctttggagcc

SEQ ID NO: 29198 - DNA, 557 bp, Macaca Mulatta
gaacactttgcagcctgagagattcaactttagagcacaattttgaatacagtgtatgtcgggaagccctccttgaaaaggcagtattcaatacacggaagagagagaatgcagaagagaataactgtgaatataatgaatttgggagaactttctgtgatggttcatccctcttgttccatcagatacctccatcaaaggacaaccactatgaatttagtgattgtaagaagttcttatgtgtgaagtccaccctttctaaacatcacggggtacctatgaaacactatgattgtggtgaaagtgggaataatttcaggaggaaattgtgtctgtcacagcttcagaaaggtgataaaggagagaaacactttgagtgtcatgaatgtgggaaagctttctgggagaagtcacatctcactcgacatcagagggtgcacacaggagagaaacgctttcaatgtaatgacatgtggcaaaatgttctgggagaagtcaaatctcactaaacatcagagatcacacacaggggagaaaccttttgaatgccatgaatg

SEQ ID NO: 29199 - DNA, 6381 bp, Macaca Mulatta
  misc_feature (1)...(6381): n = A,T,C or G
cagaacaaggagttcaagacactgtcggagcagttgtccgtgactacctccacatacaccatggaggtagagaggctgaagaaggagctggcgcactaccagcagagcctgggtgaggaccccagcctgagtctgcaggaggaggtggagagcctgcgcacggagctgcagagggcccactcggagcgcaagatcttggaggatgcacacagtagggagaaggacgagctgaggaannnnnnnnnnnnnnnnnnnnnnnnnnnnnnnnnnnnnnnnnnnnnnnnnnnnnnnnnnnnnnnnnnnnnnnnnnnnnnnnnnnnnnnnnnnnnnnnnnnnnnnnnnnnnnnnnnnnnnnnnnnnnnnnnnnnnnnnnnnnnnnnnnnnnnnnnnnnnnnnnnnnnnnnnnnnnnnnnnnnnnnnnnnnnnnnnnnnnnnnnnnnnnnnnnnnnnnnnnnnnnnnnnnnnnnnnnnnnnnnnnnnnnnnnnnnnnnnnnnnnnnnnnnnnnnnnnnnnnnnnnnnnnnnnnnnnnnnnnnnnnnnnnnnnnnnnnnnnnnnnnnnnnnnnnnnnnnnnnnnnnnnnnnnnnnnnnnnnnnnnnnnnnnnnnnnnnnnnnnnnnnnnnnnnnnnnnnnnnnnnnnnnnnnnnnnnnnnnnnnnnnnnnnnnnnnnnnnnnnnnnnnnnnnnnnnnnnnnnnnnnnnnnnnnnnnnnnnnnnnnnnnnnnnnnnnnnnnnnnnnnnnnnnnnnnnnnnnnnnnnnnnnnnnnnnnnnnnnnnnnnnnnnnnnnnnnnnnnnnnnnnnnnnnnnnnnnnnnnnnnnnnnnnnnnnnnnnnnnnnnnnnnnnnnnnnnnnnnnnnnnnnnnnnnnnnnnnnnnnnnnnnnnnnnnnnnnnnnnnnnnnnnnnnnnnnnnnnnnnnnnnnnnnnnnnnnnnnnnnnnnnnnnnnnnnnnnnnnnnnnnnnnnnnnnnnnnnnnnnnnnnnnnnnnnnnnnnnnnnnnnnnnnnnnnnnnnnnnnnnnnnnnnnnnnnnnnnnnnnnnnnnnnnnnnnnnnnnnnnnnnnnnnnnnnnnnnnnnnnnnnnnnnnnnnnnnnnnnnnnnnnnnnnnnnnnnnnnnnnnnnnnnnnnnnnnnnnnnnnnnnnnnnnnnnnnnnnnnnnnnnnnnnnnnnnnnnnnnnnnnnnnnnnnnnnnnnnnnnnnnnnnnnnnnnnnnnnnnnnnnnnnnnnnnnnnnnnnnnnnnnnnnnnnnnnnnnnnnnnnnnnnnnnnnnnnnnnnnnnnnnnnnnnnnnnnnnnnnnnnnnnnnnnnnnnnnnnnnnnnnnnnnnnnnnnnnnnnnnnnnnnnnnnnnnnnnnnnnnnnnnnnnnnnnnnnnnnnnnnnnnnnnnnnnnnnnnnnnnnnnnnnnnnnnnnnnnnnnnnnnnnnnnnnnnnnnnnnnnnnnnnnnnnnnnnnnnnnnnnnnnnnnnnnnnnnnnnnnnnnnnnnnnnnnnnnnnnnnnnnnnnnnnnnnnnnnnnnnnnnnnnnnnnnnnnnnnnnnnnnnnnnnnnnnnnnnnnnnnnnnnnnnnnnnnnnnnnnnnnnnnnnnnnnnnnnnnnnnnnnnnnnnnnnnnnnnnnnnnnnnnnnnnnnnnnnnnnnnnnnnnnnnnnnnnnnnnnnnnnnnnnnnnnnnnnnnnnnnnnnnnnnnnnnnnnnnnnnnnnnnnnnnnnnnnnnnnnnnnnnnnnnnnnnnnnnnnnnnnnnnnnnnnnnnnnnnnnnnnnnnnnnnnnnnnnnnnnnnnnnnnnnnnnnnnnnnnnnnnnnnnnnnnnnnnnnnnnnnnnnnnnnnnnnnnnnnnnnnnnnnnnnnnnnnnnnnnnnnnnnnnnnnnnnnnnnnnnnnnnnnnnnnnnnnnnnnnnnnnnnnnnnnnnnnnnnnnnnnnnnnnnnnnnnnnnnnnnnnnnnnnnnnnnnnnnnnnnnnnnnnnnnnnnnnnnnnnnnnnnnnnnnnnnnnnnnnnnnnnnnnnnnnnnnnnnnnnnnnnnnnnnnnnnnnnnnnnnnnnnnnnnnnnnnnnnnnnnnnnnnnnnnnnnnnnnnnnnnnnnnnnnnnnnnnnnnnnnnnnnnnnnnnnnnnnnnnnnnnnnnnnnnnnnnnnnnnnnnnnnnnnnnnnnnnnnnnnnnnnnnnnnnnnnnnnnnnnnnnnnnnnnnnnnnnnnnnnnnnnnnnnnnnnnnnnnnnnnnnnnnnnnnnnnnnnnnnnnnnnnnnnnnnnnnnnnnnnnnnnnnnnnnnnnnnnnnnnnnnnnnnnnnnnnnnnnnnnnnnnnnnnnnnnnnnnnnnnnnnnnnnnnnnnnnnnnnnnnnnnnnnnnnnnnnnnnnnnnnnnnnnnnnnnnnnnnnnnnnnnnnnnnnnnnnnnnnnnnnnnnnnnnnnnnnnnnnnnnnnnnnnnnnnnnnnnnnnnnnnnnnnnnnnnnnnnnnnnnnnnnnnnnnnnnnnnnnnnnnnnnnnnnnnnnnnnnnnnnnnnnnnnnnnnnnnnnnnnnnnnnnnnnnnnnnnnnnnnnnnnnnnnnnnnnnnnnnnnnnnnnnnnnnnnnnnnnnnnnnnnnnnnnnnnnnnnnnnnnnnnnnnnnnnnnnnnnnnnnnnnnnnnnnnnnnnnnnnnnnnnnnnnnnnnnnnnnnnnnnnnnnnnnnnnnnnnnnnnnnnnnnnnnnnnnnnnnnnnnnnnnnnnnnnnnnnnnnnnnnnnnnnnnnnnnnnnnnnnnnnnnnnnnnnnnnnnnnnnnnnnnnnnnnnnnnnnnnnnnnnnnnnnnnnnnnnnnnnnnnnnnnnnnnnnnnnnnnnnnnnnnnnnnnnnnnnnnnnnnnnnnnnnnnnnnnnnnnnnnnnnnnnnnnnnnnnnnnnnnnnnnnnnnnnnnnnnnnnnnnnnnnnnnnnnnnnnnnnnnnnnnnnnnnnnnnnnnnnnnnnnnnnnnnnnnnnnnnnnnnnnnnnnnnnnnnnnnnnnnnnnnnnnnnnnnnnnnnnnnnnnnnnnnnnnnnnnnnnnnnnnnnnnnnnnnnnnnnnnnnnnnnnnnnnnnnnnnnnnnnnnnnnnnnnnnnnnnnnnnnnnnnnnnnnnnnnnnnnnnnnnnnnnnnnnnnnnnnnnnnnnnnnnnnnnnnnnnnnnnnnnnnnnnnnnnnnnnnnnnnnnnnnnnnnnnnnnnnnnnnnnnnnnataatggcatatactgacatttcccaaagtttgcaaactataggcatggttgagtttgtggtgagatgttttaagaacaaaaatatggggatgagacttctgagaaatgttcccaaaatattttttaatggctgattatacaaagacagtggtttaaatgacctccagaccagacattttgagtactggtttctgaagcaaaattagaagtgccaatcctcagtgtgctcaaacacttttgtggaatcttggtttaatggaagagattattgaaatgctgctatcccaaactccaagtgagaaagatggaaaaatattttgtttctgatgctagtccatacactttccaagtcccacaaaactttcacaaaaatgtatataagctaaatatcagaaaagtataacaacttgttttatttatagatataaaaaccaaacaagtcaatatgaaaacttttaatctcttaataccattaagcctccagtaagagcatcacataatgctctactattccagaaaccaaatagtaaaacaaactaaaacttgcacatcagagcatctgaaaaaccttcaaaaataatcagttcagggatattatactaaagtttggnnnnnnnnnnnnaagagaataaaatggtttaggtcaactttcccttttcaggttattttcaacgtttttcaaatttagcacacaaaaaaattgtaaatatctctcctacaaaataaggatttttaaaaagtaattcagtaataggcttagatttttgctgctcttagaattttttttaacttgtttttggattcttcaaaagcaagcatacagctggaaacccatattctttccacannnnnnnnnnnnnnnnnnnnnnnnnnnnnnnnnnnnnnnnnnnnnnnnnnnnnnnnnnnnnnnnnnnnnnnnnnnnnnnnnnnnnnnnnnnnnnnnnnnnnnnnnnnnnnnnnnnnnnnnnnnnnnnnnnnnnnnnnnnnnnnnnnnnnnnnnnnnnnnnnnnnnnnnnnnnnnnnnnnnnnnnnnnnnnnnnnnnnnnnnnnnnnnnnnnnnnnnnnnnnnnnnnnnnnnnnnnnnnnnnnnnnnnnnnnnnnnnnnnnnnnnnnnnnnnnnnnnnnnnnnnnnnnnnnnnnnnnnnnnnnnnnnnnnnnnnnnnnnnnnnnnnnnnnnnnnnnnnnnnnnnnnnnnnnnnnnnnnnnnnnnnnnnnnnnnnnnnnnnnnnnnnnnnnnnnnnnnnnnnnnnnnnnnnnnnnnnnnnnnnnnnnnnnnnnnnnnnnnnnnnnnnnnnnnnnnnnnnnnnnnnnnnnnnnnnnnnnnnnnnnnnnnnnnnnnnnnnnnnnnnnnnnnnnnnnnnnnnnnnnnnnnnnnnnnnnnnnnnnnnnnnnnnnnnnnnnnnnnnnnnnnnnnnnnnnnnnnnnnnnnnnnnnnnnnnnnnnnnnnnnnnnnnnnnnnnnnnnnnnnnnnnnnnnnnnnnnnnnnnnnnnnnnnnnnnnnnnnnnnnnnnnnnnnnnnnnnnnnnnnnnnnnnnnnnnnnnnnnnnnnnnnnnnnnnnnnnnnnnnnnnnnnnnnnnnnnnnnnnnnnnnnnnnnnnnnnnnnnnnnnnnnnnnnnnnnnnnnnnnnnnnnnnnnnnnnnnnnnnnnnnnnnnnnnnnnnnnnnnnnnnnnnnnnnnnnnnnnnnnnnnnnnnnnnnnnnnnnnnnnnnnnnnnnnnnnnnnnnnnnnnnnnnnnnnnnnnnnnnnnnnnnnnnnnnnnnnnnnnnnnnnnnnnnnnnnnnnnnnnnnnnnnnnnnnnnnnnnnnnnnnnnnnnnnnnnnnnnnnnnnnnnnnnnnnnnnnnnnnnnnnnnnnnnnnnnnnnnnnnnnnnnnnnnnnnnnnnnnnnnnnnnnnnnnnnnnnnnnnnnnnnnnnnnnnnnnnnnnnnnnnnnnnnnnnnnnggtttgaactctgcactagatgtctctttcactttttaatatgtaaaatttagtggatgcttttctcaccacgtgcctttagtagttactaacataactgacttatcaattgtttctctgaaataagtgttgctgtgtgaataattttaatgtttaatgtgatatcatggtggagttttgtcttttaaaacattggaagcattttaannnnnnnnnnnnnnnnnnnnnnnnnnnnnnnnnnnnnnnnnnnnnnnnnnnnnnnnnnnnnnnnnnnnnnnnnnnnnnnnnnnnnnnnnnnnnnnnnnnnnnnnnnnnnnnnnnnnnnnnnnnnnnnnnnnnnnnnnnnnnnnnnnnnnnnnnnnnnnnnnnnnnnnnnnnnnnnnnnnnnnnnnnnnnnnnnnnnnnnnnnnnnnnnnnnnnnnnnnnnnnnnnnnnnnnnnnnnnnnnnnnnnnnnnnnnnnnnnnnnnnnnnnnnnnnnnnnnttttaaggcttttgtgaaaacaaaaacaaaactaggaacttttaaaaattaacgctgttaccatcaattaattaaatatttacttagagccttcatacattaagattccagtaaccaataaattagaatttatttcttctgcataaattttcatacacttgactaagacaccaagggtgtcctaaattgagacatttggataatgcctatataagtaaatggtcactaaaacgggaccgcatggggtaagaccttgtagttcttcacagaacatttgtcatcagtttctccaattaatttgctgcacgaaccaaataaccataatttaccttttgtacccactggtgccataattagagaattagagggtgtagacagaggttaatgccaatgacaaacacaggacagggttttttattataaagttcattagatacaaaacattgtttttcaaaaacaagtttctaattctaagaaaggggatcaatcagaaatgaaactaagctacattctgaagtgatactgtatcagaacaatccagatttgaatataacattttgccaccacctgacatttagatgaagaactgtctctccgaaagagttcagaacatattcaggggtgaacctaacaccgtggaagaaagactactgatgaaaatatttttccactttgcacaaatctgtaaactacacgtttgtttatagaaaaatgcttgtaatagtcactgtaatatttagctgtggataaaaatttgtggaaataaatacttttgaat

SEQ ID NO: 29200 - DNA, 282 bp, Macaca Mulatta
  misc_feature (1)...(282): n = A,T,C or G
catatcagacaaacagtggacaagcacagcagcctatcaatgtatcagcagaatatcgtccttactgtatgtgtagtntgagtgcagattccaaacttacggctgagtttcctctagtatgatcgaaaatttcttttctctttgttgtgaataagactgaactgtgggttctctataagtgacattntgagctttctttcctgtaaagcgatgtctgcctagtttattgtccagttaactttagtgaccttttaaaaggcagtatgtaaataaaaccacttg

SEQ ID NO: 29201 - DNA, 2296 bp, Macaca Mulatta
  misc_feature (1)...(2296): n = A,T,C or G
gtgctcttgtacgtgaggaaggagactgacgatgtgttcgatgcgttgatgttgaagtctcccacagtgaagggcctgatggaagcgnnnnnnnnnnnnnnnnnnnnnnnnnnnnnnnnnnnnnnnnnnnnnnnnnnnnnnnnnnnnnnnnnnnnnnnnnnnnnnnnnnnnnnnnnnnnnnnnnnnnnnnnnnnnnnnnnnnnnnnnnnnnnnnnnnnnnnnnnnnnnnnnnnnnnnnnnnnnnnnnnnnnnnnnnnnnnnnnnnnnnnnnnnnnnnnnnnnnnnnnnnnnnnnnnnnnnnnnnnnnnnnnnnnnnnnnnnnnnnnnnnnnnnnnnnnnnnnnnnnnnnnnnnnnnnnnnnnnnnnnnnnnnnnnnnnnnnnnnnnnnnnnnnnnnnnnnnnnnnnnnnnnnnnnnnnnnnnnnnnnnnnnnnnnnnnnnnnnnnnnnnnnnnnnnnnnnnnnnnnnnnnnnnnnnnnnnnnnnnnnnnnnnnnnnnnnnnnnnnnnnnnnnnnnnnnnnnnnnnnnnnnnnnnnnnnnnnnnnnnnnnnnnnnnnnnnnnnnnnnnnnnnnnnnnnnnnnnnnnnnnnnnnnnnnnnnnnnnnnnnnnnnnnnnnnnnnnnnnnnnnnnnnnnnnnnnnnnnnnnnnnnnnnnnnnnnnnnnnnnnnnnnnnnnnnnnnnnnnnnnnnnnnnnnnnnnnnnnnnnnnnnnnnnnnnnnnnnnnnnnnnnnnnnnnnnnnnnnnnnnnnnnnnnnnnnnnnnnnnnnnnnnnnnnnnnnnnnnnnnnnnnnnnnnnnnnnnnnnnnnnnnnnnnnnnnnnnnnnnnnnnnnnnnnnnnnnnnnnnnnnnnnnnnnnnnnnnnnnnnnnnnnnnnnnnnnnnnnnnnnnnnnnnnnnnnnnnnnnnnnnnnnnnnnnnnnnnnnnnnnnnnnnnnnnnnnnnnnnnnnnnnnnnnnnnnnnnnnnnnnnnnnnnnnnnnnnnnnnnnnnnnnnnnnnnnnnnnnnnnnnnnnnnnnnnnnnnnnnnnnnnnnnnnnnnnnnnnnnnnnnnnnnnnnnnnnnnnnnnnnnnnnnnnnnnnnnnnnnnnnnnnnnnnnnnnnnnnnnnnnnnnnnnnnnnnnnnnnnnnnnnnnnnnnnnnnnnnnnnnnnnnnnnnnnnnnnnnnnnnnnnnnnnnnnnnnnnnnnnnnnnnnnnnnnnnnnnnnnnnnnnnnnnnnnnnnnnnnnnnnnnnnnnnnnnnnnnnnnnnnnnnnnnnnnnnnnnnnnnnnnnnnnnnnnnnnnnnnnnnnnnnnnnnnnnnnnnnnnnnnnnnnnnnnnnnnnnnnnnnnnnnnnnnnnnnnnnnnnnnnnnnnnnnnnnnnnnnnnnnnnnnnnnnnnnnnnnnnnnnnnnnnnnnnnnnnnnnnnnnnnnnnnnnnnnnnnnnnnnnnnnnnnnnnnnnnnnnnnnnnnnnnnnnnnnnnnnnnnnnnnnnnnnnnnnnnnnnnnnnnnnnnnnnnnnnnnnnnnnnnnnnnnnnnnnnnnnnnnnnnnnnnnnnnnnnnnnnnnnnnnnnnnnnnnnnnnnnnnnnnnnnnnnnnnnnnnnnnnnnnnnnnnnnnnnnnnnnnnnnnnnnnnnnnnnnnnnnnnnnnnnnnnnnnnnnnnnnnnnnnnnnnnnnnnnnnnnnnnnnnnnnnnnnnnnnnnnnnnnnnnnnnnnnnnnnnnnnnnnnnnncctaaacagtcacaaaatgtatgacccatcatgggccactgttctctttgaggggacaggtttaggggtttgcgttcgcccttgtggcctgaagcactagctttttggtaggtagacacatcctgcacccaanaggttctctacaacggcccagatttgtttgtaaagcactttgactcttacctggaggccccttctctcagggcttcctgtgctcccgcctcatctgcccctgagatgcagagcagggtggaggggctgcttctagctcagctgtttctccttgaggttgcggaggaattgaatgggacagagagcaggtgctgtgcccaagaagatctcagagcggcagtgaggggtcacctttctgtgtgtcctctgggcatgttaacccttcctgtggtgccaaaggtttgcatcgtggatccagctgtgctccagtttgtcccctcctcctccactctgactgccacgccctggaccagcagcttggggaccctccagggtactaatggggctctggtctgagatggacaaattcagtgttggaaatacatgtcgaactatgcacttcccatgctcctagg

SEQ ID NO: 29202 - DNA, 344 bp, Macaca Mulatta
gttgttgttcagtctctgtctgcagggagggagaccatgggccccactggcacagtggagcggatctcgtcactactgacgggtgacgtcaccgctggcatagtggccccactggagtggttgttgcagtcactgctgacaagtgacatgtgcgtctgaggtcatgtactggtgccagactttgtcacactgccctgtcccccctctgtgacatccagggagatgcctggcacatctgccggggctggcagcatggagggcctgctgtctgattccagggtcagtaggccgcgtcgctcccagtgccagggcagcctccacagtcagtcccgtccttgagggag

SEQ ID NO: 29203 - DNA, 669 bp, Macaca Mulatta
  misc_feature (1)...(669): n = A,T,C or G
nnnnnnnnnnnnnnnnnnnnnnnnnnnnnnnnnnnnnnnnnnnnnnnnnnnnnnnnnnnnnnnnnnnnnnnnnnnnnnnnnnnnnnnnnnnnnnnnnnnnnnnnnnncgccatcctttattaggaatataaaacctaatctatgtacaggatacgtcggtgtcagggtgaggggtggtcacaaggcgggccatggctgggaatggccgctctcctcggcatagtgcctggagcggagggtcacgcgcaggtaggaactgggctcacaggctgagcagagcccctctggcccctactcaattccttcctgcttgtctttgatggccacccggaagcgctcctccagcagggacagctcgctgatgaggtcggtgatggcgttggtgaaggcttcctgggggctgtagtccggcgtggtctgcactcggatgatgatcttgtgctccaaggggtgggggactttgtagccagcaaatagcacctgtgggtcctttaggagttgtgatttaatgatgtttcccagtgtgtggtcttctttgttgatggtgaataaacaggcattgggtaccttggtgtccttgttaatggtgatcttcttctcgccctcaaagagcaagaacgactcaaaggctggaggggcgttcatgctcccagccgccgtcgcgtccag

SEQ ID NO: 29204 - DNA, 777 bp, Macaca Mulatta
ggggcagaggtgctaatcacatcttccctaaggcacctggtagaattatttgaggaaaaaacgagttttcacattgttttataggaaattaaatttgtccaaagatttggagactatttttaaaacataaatacataaaatttcattatttcctgctatcttgtttgctggcagaagtgaatgtattggtgaggttattttgggataaattacaaaagaaaaaaatcaggcactgcattaatttcttgttgttgttttggaatatcttagtaactgaggatcattttctagcaatgtggttgacataccttcagttgctctccacatctaaaagagttttctttcatatatgtacaagttattggtagtcttatttttgggctgtttgttgacttatgccccatgtgttttacttattctttaatataaacccttccattttttaataattcctaacacttgacatcttaatatcagtcattaacattagtaacttcttgtattttatattatgacagatctctttacgttttttctcacatctatctgctagtccaggaatttgttactaaatagattttcttgggtattttggttgcctcaaagtgcttacatttgttaacagattgtaaaacacatttatttacatcgatgaatgggctgtcaagtaatcattgtaaagcactttgtatatataaaggggctatggtaagtgcgaaatattcattttaaaaatgaaaatgcccctctaacttttccatatttgacttatgtaac

SEQ ID NO: 29205 - DNA, 1970 bp, Macaca Mulatta
  misc_feature (1)...(1970): n = A,T,C or G
aaagagctcctggcatggtgctgctggatgcagtttgcaaccacctcaacctcgtggaaggtgactattttggcctcgagtttcctgatcacaaaaagatcacggtnnnnnnnnnnnnnnnnnnnnnnnnnnnnnnnnnnnnnnnnnnnnnnnnnnnnnnnnnnnnnnnnnnnnnnnnnnnnnnnnnnnnnnnnnnnnnnnnnnnnnnnnnnnnnnnnnnnnnnnnnnnnnnnnnnnnnnnnnnnnnnnnnnnnnnnnnnnnnnnnnnnnnnnnnnnnnnnnnnnnnnnnnnnnnnnnnnnnnnnnnnnnnnnnnnnnnnnnnnnnnnnnnnnnnnnnnnnnnnnnnnnnnnnnnnnnnnnnnnnnnnnnnnnnnnnnnnnnnnnnnnnnnnnnnnnnnnnnnnnnnnnnnnnnnnnnnnnnnnnnnnnnnnnnnnnnnnnnnnnnnnnnnnnnnnnnnnnnnnnnnnnnnnnnnnnnnnnnnnnnnnnnnnnnnnnnnnnnnnnnnnnnnnnnnnnnnnnnnnnnnnnnnnnnnnnnnnnnnnnnnnnnnnnnnnnnnnnnnnnnnnnnnnnnnnnnnnnnnnnnnnnnnnnnnnnnnnnnnnnnnnnnnnnnnnnnnnnnnnnnnnnnnnnnnnnnnnnnnnnnnnnnnnnnnnnnnnnnnnnnnnnnnnnnnnnnnnnnnnnnnnnnnnnnnnnnnnnnnnnnnnnnnnnnnnnnnnnnnnnnnnnnnnnnnnnnnnnnnnnnnnnnnnnnnnnnnnnnnnnnnnnnnnnnnnnnnnnnnnnnnnnnnnnnnnnnnnnnnnnnnnnnnnnnnnnnnnnnnnnnnnnnnnnnnnnnnnnnttcagtggtcggactcagaagcaggttctcgactatgttaaagaaggaggacataagaaggtgcagtttgaaagnnnnnnnnnnnnnnnnnnnnnnnnnnnnnnnnnnnnnnnnnnnnnnnnnnnnnnnnnnnnnnnnnnnnnnnnnnnnnnnnnnnnnnnnnnnnnnnnnnnnnnnnnnnnnnnnnnnnnnnnnnnnnnnnnnnnnnnnnnnnnnnnnnnnnnnnnnnnnnnnnnnnnnnnnnnnnnnnnnnnnnnnnnnnnnnnnnnnnnnnnnnnnnnnnnnnnnnnnnnnnnnnnnnnnnnnnnnnnnnnnnnnnnnnnnnnnnnnnnnnnnnnnnnnnnnnnnnnnnnnnnnnnnnnnnnnnnnnnnnnnnnnnnnnnnnnnnnnnnnnnnnnnnnnnnnnnnnnnnnnnnnnnnnnnnnnnnnnnnnnnnnnnnnnnnnnnnnnnnnnnnnnnnnnnnnnnnnnnnnnnnnnnnnnnnnnnnnnnnnnnnnnnnnnnnnnnnnnnnnnnnnnnnnnnnnnnnnnnnnnnnnnnnnnnnnnnnnnnnnnnnnnnnnnnnnnnnnnnnnnnnnnnnnnnnnnnnnnnnnnnnnnnnnnnnnnnnnnnnnnnnnnnnnnnnnnnnnnnnnnnnnnnnnnnnnnnnnnnnnnnnnnnnnnnnnnnnnnnnnnnnnnnnnnnnnnnnnnnnnnnnnnnnnnnnnnnnnnnnnnnnnnnnnnnnnnnnnnnnnnnnnnnnnnnnnnnnnnnnnnnnnnnnnnnnnnnnnnnnnnnnnnnnnnnnnnnnnnnnnnnnnnnnnnnnnnnnnnnnnnnnnnnnnnnnnnnnnnnnnnnnnnnnnnnnnnnnnnnnnnnnnnnnnnnnnnnnnnnnnnnnnnnnnnnnnnnnnnnnnnnnnnnnnnnnnnnnnnnnnnnnnnnnnnnnnnnnnnnnnnnnnnnnnnnnnnnnnnnnnnnnnnnnnnnnnnnnnnnnnnnnnnnnnnnnnnnnnngctgcagaaagtgtgttacctaccgctcaacaccttcctcctgcggccgctgcaccggctcatgcactataagcaggtcctggagcggctgtgcaaacaccacccgccgagccacgccgacttcagggactgccgagn

SEQ ID NO: 29206 - DNA, 400 bp, Macaca Mulatta
tgtgttcattcttttattgtccattgttttaacctgactgaatacaagatcaacaagagcactgtactcctggcaattattacatatgttagaacatggattttgcactgtagacaacatttaacaccagtctatggggtactgcattgctttttataaagttcaaaataaagatttattttcaaacaagtgactttggtttatttcatacattacactttttcttgcagaaaaaaataaaattgtacaactgcataaatataaaattcttccaccatgaaatggttaaacattcataaagacacagcaccagcatgtgatgcctccagaaaggaaaaaaagaatagtaaaagaaaatgtataaagcaaattaaaagcctgtgcagtaagccaaagtgat

SEQ ID NO: 29207 - DNA, 807 bp, Macaca Mulatta
  misc_feature (1)...(807): n = A,T,C or G
cagttaaacttacagttctgctcatgcccaatggccccatgcggataaccagtggtccctttgaacctgacctctacaagtctgagatggaggtccaggatgcagagctaaaggccctcctccagagttctgcaagtcgaaaaaccnnnnnnnnnnnnnnnnnnnnnncctccaagactgcagagaatgccaccagtggggaaacattagaagaaaatgaagctggggactgaggaccgccagcagagcgggggtctccctgcccccaccccagttccccaacccactcccttccaacaacaaccagctccaactgactctggtcttgggaggcgaggcttcccaaccacggaagactactttaaatgaaggaaaagaaattgaataataaaatcaggagtcaaaatgcatcgtcttcaagcccctctttctagccttttctactactatgcttggtcaaggtttgtgccctactacagaacagggctaaattagccatcaccactgaaaactcagctgaatttttaataccactctgatgtcagcatattaccatctgtttggggccttttcctcttgtattacattctcccgaggtatttaatctggcttcagaattaggaggaatattatcagatagattgattcagtgtggagatccacatctgatgangctgtccagttggccctccctaaaggagctggagctcctagtgaggagattctccttgaatgggtccctagaaactccactccattaacagtgtagagaggcctaaaacacgacgaaaaaggggtcacataaaa

SEQ ID NO: 29208 - DNA, 711 bp, Macaca Mulatta
caaggcaaggatgtcgtgcttgaaggccagggtggacttgagagattcctctgtctcgcaaatccatatctgggcagccagctgcagggcctgagcgtggctggcaggggcagctgctgtggccaactggccttgatcaatgctcatatgtaaggcgttgagaggaccctgcaggcagtcagcaccagtgtcagcaactgtgcaaagacctacaggcccacagccagtggcctgtccacattgccctgtgcctacaagcaatagtccacagcctttggtggcttctgttccttgtcccctcagcttctccctgcagccatcaggactaggtttgtgcaggaaggtgatgcccactggaactgtcctcacacctggcagcttcatggatgctgtatctgaactaaggaccagaggctgccagatgtttctggctcctcacatgtccttcaggacagaagagaagcacaaagactcagacaagagttctctttattccctttgatcctcccccaaggtgagggcttaggcagctgtagaaccccaggaaagaacgaaatgcaggcaatctgtttagagaccccccaccccaaatttatccttttcctttccttcccctaaaatgtttccagggctctctggtgcccgcactgtcctcttctttccactcgggggtggggaaatccttcctgcgaggtcagggcatttctctag

SEQ ID NO: 29209 - DNA, 214 bp, Macaca Mulatta
  misc_feature (1)...(214): n = A,T,C or G
gatctgcgatttccttctggttggctgtcctgcgtgggtgccaagttccacacatgatttaatgaataagaagnnnnnnnnnnnnnnnnngcaaaggtccttgaagagagcaagaaaaagtcttcccaggaaaagtggtcacctgagtgagtgttacagcgagaaggggggcatcccaggcaaggcagctaccaagcaaaggtgtgaaggtgag

SEQ ID NO: 29210 - DNA, 652 bp, Macaca Mulatta
caaaaatctagattgggatattatacaaaagcagcataatatgtgtatataaacaaaataatactcagatatccaaatgttcatatagtatcttccataatgaatgttctctttgttcagtaatagtgcagaagtgatctgattcttacaatgggagaggaagaacatttattattgggttactactaaccctgtcccaagaatagtaacatcacttctagttataaaacagcaacaggaacttttgtgaagacacattcatctctacagaacttcagtttaaatataatctagattaatgactgagaataagatccacatatgaactcattcctaagtgagcattgacatacccagttataaaaagcacttctgttggtcacagaaacatgactagattttgcatatctccaggtagggaaccgagtagactaccttatcacctgctaagaaaacttgctactaaactattaggccatcaatggcttgaataaaaaccagagaagggtttgcccaggaggtctcatgtttggccctttggaattgtgggtagaaatcagaaacaaaatgaggggaagcagcaaggagtctaaggccctggcgatttggtcatctaccgcattggtcatattcagaaagtgtatctcattga

SEQ ID NO: 29211 - DNA, 1109 bp, Macaca Mulatta
  misc_feature (1)...(1109): n = A,T,C or G
gcaggtctgtgggttctggcaccatctgagccccctggcaatccctggcacctctgctttggagccaccttgtccccggttagacagtgtcgcattttccagtgccgttttggaaagatgctgcctttggagaaggcatttgcctcccccaggagctccccaacccccctggatctgcccacgccagggacagcagccggagcccagcaggaagaacccgagaccatccatgggaggacccctgctgacctggagttctcccgcctgcgtttccgagaatttgtctaccaggaggctgccgggccccaccagaccctggcccgcctgcatgagctgtgccgccagtggctgatgcctgaggcgcgctccaaggagcagatgctggagctgctggtgctggagcagttcctgggcattctgcctgataaggtccggccctgggtggtggcacagtaccctgagagctgcaagaaggcagcctccctggtggagggcctcgctgatgtcctggacgagccagnnnnnnnnnnnnnnnnnnnnnnnnnnnnnnnnnnnnnnnnnnnnnnnnnnnnnnnnnnnnnnnnnnnnnnnnnnnnnnnnnnnnnnnnnnnnnnnnnnnnnnnnnnnnnnnnnnnnnnnnnnnnnnnnnnnnnnnnnnnnnnnnnnnnnnnnnnnnnnnnnnnnnnnnnnnnnnnnnnnnnnnnnnnnnnnnnnnnnnnnnnnnnnnnnnnnnnnnnnnnnnnnnnnnnnnnnnnnnnnnnnnnnnnnnnnnnnnnnnnnnnnnnnnnnnnnnnnnnnnnnnnnnnnnnnnnnnnnnnnnnnnnnnnnnnnnnnnnnnnnnnnnnnnnnnnnnnnnnnnnnnnnnnnnnnnnnnnnnnnnnnnnnnnnnnnnnnnnnnnnnnnnnnnnnnnnnnnnnnnnnnnnnnnnnnnnnnnnnnnnnnnnnnnnnnccagaaggcgggaggcggcaggagaccgctgggtgcgcctgcgaggaggccgcccccgcgcgggtggtgcctgagctgcctgcggaggcgcccccaggggacgcccctgccgatcccccgtcgggcaccactgaggaggaggaagagcagcctgggaag

SEQ ID NO: 29212 - DNA, 823 bp, Macaca Mulatta
  misc_feature (1)...(823): n = A,T,C or G
gnnnnnnnnnnnnnncnnnnnnnnnnnnnnnnnnnnnnnnnnnnntgtgatccgtccnnnnnnnnnnnnnnnnnnnnnnnnnnnnnnnnnnnnnnnnnnngcacccggcctannnnnnnnnnnnnnnnnnnnnnnnnnnnnncaacatgttggtnnnnnnnnnnnnnnnnnnnncacctcagatgatccacacgcctctgcctcccaaagttctgccattataggcgtgagccactacgcctggcttccccttcccctttcttgccccaaggcagatccacatcaccaaagctccctaggtgggcaaaagatggagtgagccacagaaagtttgaggcgtggtgagttggaatgatacatccatttctctatgaaatatttgctactagactgttcatttctctctgaaatatttgttgaatgaataaataatttgaaacnnnnnnnnnnnnnnnnnnnnnnnnnnnnnnnnnnnnnnnnnnnnnnnnnanntagaaatgcctatnnnnnnnnnnnnnnnnnnnnnnnnnnnnnnnnnnnnnnnnnnnnnnnnnnnnnnnnnnnnnnnnnnnnnnnnnnnnnnnnnnnnnnnnnnnnnnnnnnnnnnnnnnnnnnnnnnnnnnnnnnnnnnnnnnnnnnnnnnnnnnnnnnnnnnnnnnnnnnnnnnnnnnnnnnnnnnnnnnnnnnnnnnnnnnnnnnnnnnnnnnnnnnnnnnnnnnnnnnnnnnnnnnnnnnnnnnnnnnnnnnnnnnnnnnnnnnnnnnnnnnnnnnnnnnnnnnnnnnnnnnnnnnnnnnnnnnnnnnnnnnnnnnnnnnnnnnnnnn

SEQ ID NO: 29213 - DNA, 1234 bp, Macaca Mulatta
  misc_feature (1)...(1234): n = A,T,C or G
gcacccaggccagatcctattttgggctatctgggtccttgcagcccccaccannnnnnnnnnnnnnnnnnnnnnnnnnnnnnnnnnnnnnnnnnnnnnnnnnnnnnnnnnnnnnnnnnnnnnnnnnnnnnnnnnnnnnnnnnnnnnnnnnnnnnnnnnnnnnnnnnnnnnnnnnnnnnnnnnnnnnnnnnnnnnnnnnnnnnnnnnnnnnnnnnnnnnnnnnnnnnnnnnnnnnnnnnnnnnnnnnnnnnnnnnnnnnnnnnnnnnnnnnnnnnnnnnnnnnnnnnnnnnnnnnnnnnnnnnnnnnnnnnnnnnnnnnnnnnnnnnnnnnnnnnnnnnnnnnnnnnnnnnnnnnnnnnnnnnnnnnnnnnnnnnnnnnnnnnnnnnnnnnnnnnnnnnnnnnnnnnnnnnnnnnnnnnnnnnnnnnnnnnnnnnnnnnnnnnnnnnnnnnnnnnnnnnnnnnnnnnnnnnnnnnnnnnnnnnnnnnnnnnnnnnnnnnnnnnnnnnnnnnnnnnnnnnnnnnnnnnnnnnnnnnnnnnnnnnnnnnnnnnnnnnnnnnnnnnnnnnnnnnnnnnnnnnnnnnnnnnnnnnnnnnnnnnnnnnnnnnnnnnnnnnnnnnnnnnnnnnnnnnnnnnnnnnnnnnnnnnnnnnnnnnnnnnnnnnnnnnnnnnnnnnnnnnnnnnnnnnnnnnnnnnnnnnnnnnnnnnnnnnnnnnnnnnnnnnnnnnnnnnnnnnnnnnnnnnnnnnnnnnnnnnnnnnnnnnnnnnnnnnnnnnnnnnnnnnnnnnnnnnnnnnnnnnnnnnnnnnnnnnnnnnnnnnnnnnnnnnnnnnnnnnnnnnnnnnnnnnnnnnnnnnnnnnnnnnnnnnnnnnnnnnnnnnnnnnnnnnnnnnnnnnnnnnnnnnnnnnnnnnnnnnnnnnnnnnnnnnnnnnnnnnnnnnnnnnnnnnnnnnnnnnnnnnnnnnnnnnnnnnnnnnnnnnnnnnnnnnnnnnnnnnnnnnnnnnnnnnnnnnnnnnnnnnnnnnnnnnnnnnnnnnnnnnnnnnnnnnnnnnnnnnnnnnnnnnnnnnnnnnnnnnnnnnnnnnnnnnnnnnnnnnnnnnnnnnnnncacatcccgcctcagtatttgcaccttgtggctaatgaatacttccatgacaagcactccctgactgaaatccgagacggtcttctggacttgcttggagatgtgttctttgtggtccctgcactgat

SEQ ID NO: 29214 - DNA, 338 bp, Macaca Mulatta
  misc_feature (1)...(338): n = A,T,C or G
gaaaaaacagcatcatcaaaaaacacccaggcatcctctccacccgtgggcatccctaagtatcctgttgtttcagaggctgcaaacaacaattttggagtggtacttacagattcctctaggcacagtggagnnnnnnnnnnnnnnnnnnnnnnaccatctccactgcatcagagacgtcggtctatgtcacttggattcctcgggcaaatggggggtctccaatcactgccttcaaagtcgaatataaacagatgaggaccagcgattggctggtggcagctgaagacatccctccttccaaactttcagtggaagttcgtagtttagaaccaggt

SEQ ID NO: 29215 - DNA, 1742 bp, Macaca Mulatta
  misc_feature (1)...(1742): n = A,T,C or G
aggtgtaacaaccgcacccagtgtgtggtggtcgccggctcggatgcctttcctgacccctgtcctgggacctacaagtacctggaggtgcagtacgactgtgtcccctacnnnnnnnnnnnnnnnnnnnnnnnnnnnnnnnnnnnnnnnnnnnnnnnnnnnnnnnnnnnnnnnnnnnnnnnnnnnnnnnnnnnnnnnnnnnnnnnnnnnnnnnnnnnnnnnnnnnnnnnnnnnnnnnnnnnnnnnnnnnnnnnnnnnnnnnnnnnnnnnnnnnnnnnnnnnnnnnnnnnnnnnnnnnnnnnnnnnnnnnnnnnnnnnnnnnnnnnnnnnnnnnnnnnnnnnnnnnnnnnnnnnnnnnnnnnnnnnnnnnnnnnnnnnnnnnnnnnnnnnnnnnnnnnnnnnnnnnnnnnnnnnnnnnnnnnnnnnnnnnnnnnnnnnnnnnnnnnnnnnnnnnnnnnnnnnnnnnnnnnnnnnnnnnnnnnnnnnnnnnnnnnnnnnnnnnnnnnnnnnnnnnnnnnnnnnnnnnnnnnnnnnnnnnnnnnnnnnnnnnnnnnnnnnnnnnnnnnnnnnnnnnnnnnnnnnnnnnnnnnnnnnnnnnnnnnnnnnnnnnnnnnnnnnnnnnnnnnnnnnnnnnnnnnnnnnnnnnnnnnnnnnnnnnnnnnnnnnnnnnnnnnnnnnnnnnnnnnnnnnnnnnnnnnnnnnnnnnnnnnnnnnnnnnnnnnnnnnnnnnnnnnnnnnnnnnnnnnnnnnnnnnnnnnnnnnnnnnnnnnnnnnnnnnnnnnnnnnnnnnnnnnnnnnnnnnnnnnnnnnnnnnnnnnnnnnnnnnnnnnnnnnnnnnnnnnnnnnnnnnnnnnnnnnnnnnnnnnnnnnnnnnnnnnnnnnnnnnnnnnnnnnnnnnnnnnnnnnnnnnnnnnnnnnnnnnnnnnnnnnnnnnnnnnnnnnnnnnnnnnnnnnnnnnnnnnnnnnnnnnnnnnnnnnnnnnnnnnnnnnnnnnnnnnnnnnnnnnnnnnnnnnnnnnnnnnnnnnnnnnnnnnnnnnnnnnnnnnnnnnnnnnnnnnnnnnnnnnnnnnnnnnnnnnnnnnnnnnnnnnnnnnnnnnnnnnnnnnnnnnnnnnnnnnnnnnnnnnnnnnnnnnnnnnnnnnnnnnnnnnnnnnnnnnnnnnnnnnnnnnnnnnnnnnnnnnnnnnnnnnnnnnnnnnnnnnnnnnnnnnnnnnnnnnnnnnnnnggaattgcctccttccagtgtctaccagccttggggctctggaacccccggggccctgacctcagcaactgcacctccccctgggtcaaccaggtggcccagaagnnagattaagagtggggagaacgcagccaacatcgccagcgagctggcccgacacacccggggctccatctacgcgggggacgtctcctcctctgtgaagctgatggagcagctgctggacattctggacgcccagctgcaggccctgcggcccatcgagcgcgagtcagctggaaagaactacaacaannnnnnnnnnnnnnnnnnnnnnnnnnnnnnnnnnnnnnaggccgtggtggagacagtggacaatctgctccggccagaagctctggagtcctggaaggacatgaatgccacggagcaggtgcacacggccaccatgctcctggacgtcctggaggagggtgccttcctgctggccgacaacgtcagggagcctgcccgcttcctggctgccaaggagaacgtg

SEQ ID NO: 29216 - DNA, 2333 bp, Macaca Mulatta
  misc_feature (1)...(2333): n = A,T,C or G
gacacggaagcgccgttgtcggcannnnnnnnnnnnnnnnnnnnnnnnnnnnnnnnnnnncagcgtaagcctctggccgacgtgggccgagggggccagcgcgggctgttgtgacccagacgagcggnnnnnnnnnnnnnnnnnnnnnnnnnnnnnnnnnnnnnnnnnnnnnnnnnnnnnnnnnnnnnnnnnnnnnnnnnnnnnnnnnnnnnnnnnnnnnnnnnnnnnnnnnnnnnnnnnnnnnnnnnnnnnnnnnnnnnnnnnnnnnnnnnnnnnnnnnnnnnnnnnnnnnnnnnnnnnnnnnnnnnnnnnnnnnnnnnnnnnnnnnnnnnnnnnnnnnnnnnnnnnnnnnnnnnnnnnnnnnnnnnnnnnnnnnnnnnnnnnnnnnnnnnnnnnnnnnnnnnnnnnnnnnnnnnnnnnnnnnnnnnnnnnnnnnnnnnnnnnnnnnnnnnnnnnnnnnnnnnnnnnnnnnnnnnnnnnnnnnnnnnnnnnnnnnnnnnnnnnnnnnnnnnnnnnnnnnnnnnnnnnnnnnnnnnnnnnnnnnnnnnnnnnnnnnnnnnnnnnnnnnnnnnnnnnnnnntagaggccagcatcaaggtgctgtcggtatcccacgaggcagatgtgggcctcgtaggtgtccagcttccaggcctcacatttcctgactctgtggatgaccggtgctccactcacagcgaggatagcactgggaccgccactagcttggatactgcggccagtcttaccagcaccaagggtgagtttggggtagaagatgacagaccggcccggggaccaccacctccaaagtccgaagaggccagtgggtccgaaagtggcgttagcagtagcagtggggatgggccatttgcagttggggaggtggacaaaagactgcaccaactgaagactcagttggctactttgactagttctttggccacagtcactcaggagaagtcccgcatggaggcttcttacgtggctgacaagaagaagatgaaacaggacttagaggatgccagtaacaaggcggaggaaaagagggcccgcctggagggagaattgaaggggctgcaggagcaaatnnnnnnnnnnnnnnnnnnnnnnnnnnnnnnnnnnnnnnnnnnnnnnnnnnnnnnnnnnnnnnnnnnnnnnnnnnnnnnnnnnnnnnnnnnnnnnnnnnnnnnnnnnnnnnnnnnnnnnnnnnnnnnnnnnnnnnnnnnnnnnnnnnnnnnnnnnnnnnnnnnnnnnnnnnnnnnnnnnnnnnnnnnnnnnnnnnnnnnnnnnnnnnnnnnnnnnnnnnnnnnnnnnnnnnnnnnnnnnnnnnnnnnnnnnnnnnnnnnnnnnnnnnnnnnnnnnnnnnnnnnnnnnnnnnnnnnnnnnnnnnnnnnnnnnnnnnnnnnnnnnnnnnnnnnnnnnnnnnnnnnnnnnnnnnnnnnnnnnnnnnnnnnnnnnnnnnnnnnnnnnnnnnnnnnnnnnnnnnnnnnnnnnnnnnnnnnnnnnnnnnnnnnnnnnnnnnnnnnnnnnnnnnnnnnnnnnnnnnnnnnnnnnnnnnnnnnnnnnnnnccaagcagaaggaccagctggccattcaaaagctgaaggagcgcattctgcagctggacctggagaacaagacactggctctagcagcctccagcaggtcccctttagacagccatggagaggagtccagtctggatgtcaatgtcctgaaggataagatggagaggctgaagaggttgctgcaggttgcagccaggaaaagccaggtgaccctggatgtggagaagctctgtgacctggagataatgcctagctcggaggctgctgatggggagaaggctactgcactctattaccaacaggagctgaaacagctgaaggaagagtttgagaggtacaagatgagggcccaggtcgtcctcaaaagcaagaataccaaagatggtaacctgggaagggaactagaggcagcccaggagcagcttgcagagctgaaggagaagtatatctccctgcggctctcctgtgaggagctggaacagcaacaccagcaggaggctgaagactggaagcaggagctggcccggctgcagcagctccaccggcaggagctggagcggtgccagctggacttcagggaccgcacactgaaactggaggaggagctgcacaagcagcgggatcgtgccctggctgttctcactgagaaggacttggaactggagcaactgcgttctgtggccttggcctctagggtgccaggacgcagaagtcctgtgggtggtggtggtccaggggacccagctgacacatcatcctct

SEQ ID NO: 29217 - DNA, 529 bp, Macaca Mulatta
tgcagcccaaggccgcctcattgcctcatggacacctgtgtcgccaccttccatgtgaagcagcaaggcccaggtcccgaaagatgcagtgactttttgtcgtggcagccagtggtgactggattgacctactaggtacccagtggcagtctcatgggttaaggaaggaaatgcagcctcagtaacttccttttcaaagcagaggagaagcacaggccgcgctgttccccggagtcccagcaccccttgatcacacctgcagtagcggtgctgtcccaagtggcttacagatgaatccacctatggagatgctgcagtcggcccaacctgattcacagtgaaaagatgtttgccagggtccagagactttttctggtgtatttctcataccctgtattggcaactttggcacaccagaatttgtaaactccacctgtcctactttagtgagataaaaagcacacactcttaatcttcttccttgttgctttcaagtagttagagttgagctgtcaaggacggaataaaa

SEQ ID NO: 29218 - DNA, 1291 bp, Macaca Mulatta
  misc_feature (1)...(1291): n = A,T,C or G
ggcagatcagcggtttgtatggaatggtcatcttctaagagaactttctgcacagccagaggnnnggttcatcggtttgcccttccagtgttacatggctnnnnnnnnnnnnnnnnnnnnnnnnnnnnnnnnnnnnnnnnnnnnnnnnnnnnnnnnnnnnnnnnnnnnnnnnnnnnnnnnnnnnnnnnnnnnnnnnnnnnnnnnnnnnnnnnnnnnnnnnnnnnnnnnnnnnnnnnnnnnnnnnnnnnnnnnnnnnnnnnnnnnnnnnnnnnnnnnnnnnnnnnnnnnnnnnnnnnnnnnnnnnnnnnnnnnnnnnnnnnnnnnnnnnnnnnnnnnnnnnnnnnnnnnnnnnnnnnnnnnnnnnnnnnnnnnnnnnnnnnnnnnnnnnnnnnnnnnnnnnnnnnnnnnnnnnnnnnnnnnnnnnnnnnnnnnnnnnnnnnnnnnnnnnnnnnnnnnnnnnnnnnnnnnnnnnnnnnnnnnnnnnnnnnnnnnnnnnnnnnnnnnnnnnnnnnnnnnnnnnnnnnnagatacattgcctttgacttccataaggaatgtaaaaatatgagatgggatcgactaagtattttattggatcaggtagcagaaatgcaagatgaattaannnnnnnnnnnnnnnnnnnnnnnnnnnnnnnnnnnnnnnnnnnnnnnnnnnnnnnnnnnnnnnnnnnnnnnnnnnnnnnnnnnnnnnnnnnnnnnnnnnnnnnnnnnnnnnnnnnnnnnnnnnnnnnnnnnnnnnnnnnnnnnnnnnnnnnnnnnnnnnnnnnnnnnnnnnnnnnnnnnnnnnnnnnnnnnnnnnnnnnnnnnnnnnnnnnnnnnnnnnnnnnnnnnnnnnnnnnnnnnnnnnnnnnnnnnnnnnnnnnnnnnnnnnnnnnnnnnnnnnnnnnnnnnnnnnnnnnnnnnnnnnnnnnnnnnnnnnnnnnnnnnnnnnnnnnnnnnnnnnnnnnnnnnnnnnnnnnnnnnnnnnnnnnnnnnnnnnnnnnnnnnnnnnnnnnnnnnnnnnnnnnnnnnnnnnnnnnnnnnnnnnnnnnnnnnnnnnnnnnnnnnnnnnnnnnnnnnnnnnnnnnnnnnnnnnnnnnnnnnnnnnnnnnnnnnnnnnnnnnnnnnnnnnnnnnnnnnnnnnnnnnnnnnnnggtgacacttggacagaaacactggcctatgtgctcttctggggagttgcaagcattggaacattttttatcattctttacaatggcaaagattttgttgatgctcccagactggtccagaaggaaaagatagactg

SEQ ID NO: 29219 - DNA, 288 bp, Macaca Mulatta
gcccccctatacccactacctgccccctggctctcccactccatacaatcctcccctttctggtgcccccatgcccctaacccacctctaactctcgtggactcagacctcaccggacgtgcctcatcctccttttttaatccagcagcatcccctaccccaggctgtcaaccctttctcctgttggactacagtgcagacgccgcctgcagtcctcccacgaaagccagggagagccgcacaacacacagttatatttttggtagtattaaacacagttttgtatta

SEQ ID NO: 29220 - DNA, 97 bp, Macaca Mulatta
gggtattgtgtttacaaaccagaggtgatcttcaggctagaacaaggagaagagccatggagactggaggaagaattcccaagccagagctttccag

SEQ ID NO: 29221 - DNA, 1115 bp, Macaca Mulatta
ctctatccctataaggaagcttggttttccaccgaataagagttaaggtaagagatagctttcacctggatgacattccatttaagtcttggggcatttttcctgccctctgccaacctccctggtggcccaggtgagaggaggaagaggggtctggagagaaacccagaatgcagcagaactaggagtaagtccatctcaaggtgaacttctgatcattgaggatggtgagataaataggttgaaaacaatcatctgtgagtttaggagtcttaagatcctcacagcacgggagcagggagaggctctagaacaaggtttcacaaccgagatgcctttgacattttgggctgaagtgttcttggtaaaggatacctgtttcctgttttgtgcattacaggatatttggcagcatccctggcccaccctagttatgacaaccaaaaatgtctctatacattgccaaatttctcctagggggcaaaatcgcctccatttgagaaccacagctctaaagtcaagatatttttctctgaagtgatttctgcttggcacgctaccctcatcatgttactcatcttaagcccgagccatggatgaactaggagctcgtataaatgaggctcagcagggctgcacataatctccaaacaattctttattcagtgttttgcttgtgctcgcgtgttgctgtgatggacaggtcccatgctcctccattctcgccctctggagaagtggttcctgcagtgtagatatgaacagggtatggtaggattgaggatgggggagagagaagcagtagatacactccttatcctccccaaattttaagctctatttctgtgccctagtcctagaaccagacacacattagactcagggagttttgtctgaagaccaggtcccactgccccccccggctgaagagtctgctttagatgggaaaacaacgtaggagcaggggtctttaggcactttcagtattctcaggtgttctttgttctggcccttccagggtaataaggaaggcagaacaagacagatgagctcctgcctgctgtgagacaaggctggggtctcattccatttgccacaggaaactcctgttctat

SEQ ID NO: 29222 - DNA, 2351 bp, Macaca Mulatta
  misc_feature (1)...(2351): n = A,T,C or G
gatccggaagtcggatcctagctgctcgagagcatctgctcgcccaaccgacttgtcgtgttgccctcgcttctcagatctccgccggaagtnnnnnnnnnnnnnnnnnnnnnnnnnnnnnnnnnnnnnnnnnnnnnnnnnnnnnnnnnnnnnnnnnnnnnnnnnnnnnnnnnnnnnnnnnnnnnnnnnnnnnnnnnnnnnnnnnnnnnnnnnnnnnnnnnnnnnnnnnnnnnnnnnnnnnnnnnnnnnnnnnnnnnnnnnnnnnnnnnnnnnnnnnnnnnnnnnnnnnnnnnnnnnnnnnnnnnnnnnnnnnnnnnnnnnnnnnnnnnnnnnnnnnnnnnnnnnnnnnnnnnnnnnnnnnnnnnnnnnnnnnnnnnnnnnnnnnnnnnnnnnnnnnnnnnnnnnnnnnnnnnnnnnnnnnnnnnnnnnnnnnnnnnnnnnnnnnnnnnnnnnnnnnnnnnnnnnnnnnnnnnnnnnnnnnnnnnnnnnnnnnnnnnnnnnnnnnnnnnnnnnnnnnnnnnnnnnnggtggtggaatactctgatgtgattctggaagtcctggatgccagagacccattaggctgccgctgcttccaaatggaggaggctgtcctgcgagcacaaggcaacaagaagctggtcctggtcttgaacaagattgnnnnnnnnnnnnnnnnnnnnnnnnnnnnnnnnnnnnnnnnnnnnnnnnnnnnnnnnnnnnnnnnnnnnnnnnnnnnnnnnnnnnnnnnnnnnnnnnnnnnnnnnnnnnnnnnnnnnnnnnnnnnnnnnnnnnnnnnnnnnnnnnnnnnnnnnnnnnnnnnnnnnnnnnnnnnnnnnnnnnnnnnnnnnnnnnnnnnnnnnnnnnnnnnnnnnnnnnnnnnnnnnnnnnnnnnnnnnnnnnnnnnnnnnnnnnnnnnnnnnnnnnnnnnnnnnnnnnnnnnnnnnnnnnnnnnnnnnnnnnnnnnnnnnnnnnnnnnnnnnnnnnnnnnnnnnnnnnnattcatgcaggaggtctacctggacaagttcatccggctgctggatgctccaggcattgtcccaggcccaactcagaggtgggcaccatcttgcgtatttgcgtcaacgtgcagaagctggcagacnnnnnnnnnnnnnnnnnnnnnnnnnnnnnnnnnnnnnnnnnnnnnnnnnnnnnnnnnnnnnnnnnnnnnnnnnnnnnnnnnnnnnnnnnnnnnnnnnnnnnnnnnnnnnnnnnnnnnnnnnnnnnnnnnnnnnnnnnnnnnnnnnnnnnnnnnnnnnnnnnnnnnnnnnnnnnnnnnnnnnnnnnnnnnnnnnnnnnnnnnnnnnnnnnnnnnnnnnnnnnnnnnnnnnnnnnnnnnnnnnnnnnnnnnnnnnnnnnnnnnnnnnnnnnnnnnnnnnnnnnnnnnnnnnnnnnnnnnnnnnnnnnnnnnnnnnnnnnnnnnnnnnnnnnnnnnnnnnnnnnnnnnnnnnnnnnnnnnnnnnnnnnnnnnnnnnnnnnnnnnnnnnnnnnnnnnnnnnnnnnnnnnnnnnnnnnnnnnnnnnnnnnnnnnnnnnnnnnnnnnnnnnnnnnnnnnnnnnnnnnnnnnnnnnnnnnnnnnnnnnnnnnnnnnnnnnnnnnnnnnnnnnnnnnnnnnnnnnnnnnnnnnnnnnnnnnnnnnnnnnnnnnnnnnnnnnnnnnnnnnnnnnnnnnnnnnnnnnnnnnnnnnnnnnnnnnnnnnnnnnnnnnnnnnnnnnnnnnnnnnnnnnnnnnnnnnnnnnnnnnnnnnnnnnnnnnnnnnnnnnnnnnnnnnnnnnnnnnnnnnnnnnnnnnnnnnnnnnnnnnnnnnnnnnnnnnnnnnnnnnnnnnnnnnnnnnnnnnnnnnnnnnnnnnnnnnnnnnnnnnctgatctcacttcccttccgctccaagcaccagttccagtggtacgggggatataccagtgaaatagtttggttctccctgaagcatctgcatattgaaagaacgctttcccaactatgtgtcttttccctttcctccagtaaaacagtcccggctaggtgccgtggctcacgcctgtaatcccagcactttgggaggcagaagtgggtggatcacctgagatcaggagttcgagaccagcctggccaacgtggtgaaaccccatctctcctaaaannnnnnnnnnnnnnnnnnnnnnnnnnnnnnnnnnnaatcccagctacttgggaggctgaggcaggagaattcgcctgaacctgggagntgggaggctgaggcaggagaattcgcctgaacctgggaggcggaggttgcagtgagcctagacggcaccattgcactccagcctgggcaacaacacgaaa

SEQ ID NO: 29223 - DNA, 1884 bp, Macaca Mulatta
  misc_feature (1)...(1884): n = A,T,C or G
ggacgaaacaggtgcctatttaatcgacagagaccccacctattttgggcccgtgctgaactacctgagacatggcaaactggtgattaacaaagacctcgcggaggaaggnnnnnnnnnnnnnnnnnnnnnnnnnnnnnnnnnnnnnnnnnnnnnnnnnnnnnnnnnnnnnnnnnnnnnnnnnnnnnnnnnnnnnnnnnnnnnnnnnnnnnnnnnnnnnnnnnnnnnnnnnnnnnnnnnnnnnnnnnnnnnnnnnnnnnnnnnnnnnnnnnnnnnnnnnnnnnnnnnnnnnnnnnnnnnnnnnnnnnnnnnnnnnnnnnnnnnnnnnnnnnnnnnnnnnnnnnnnnnnnnnnnnnnnnnnnnnnnnnnnnnnnnnnnnnnnnnnnnnnnnnnnnnnnnnnnnnnnnnnnnnnnnnnnnnnnnnnnnnnnnnnnnnnnnnnnnnnnnnnnnnnnnnnnnnnnnnnnnnnnnnnnnnnnnnnnnnnnnnnnnnnnnnnnnnnnnnnnnnnnnnnnnnnnnnnnnnnnnnnnnnnnnnnnnnnnnnnnnnnnnnnnnnnnnnnnnnnnnnnnnnnnnnnnnnnnnnnnnnnnnnnnnnnnnnnnnnnnnnnnnnnnnnnnnnnnnnnnnnnnnnnnnnnnnnnnnnnnnnnnnnnnnnnnnnnnnnnnnnnnnnnnnnnnnnnnnnnnnnnnnnnnnnnnnnnnnnnnnnnnnnnnnnnnnnnnnnnnnnnnnnnnnnnnnnnnnnnnnnnnnnnnnnnnnnnnnnnnnnnnnnnnnnnnnnnnnnnnnnnnnnnnnnnnnnnnnnnnnnnnnnnnnnnnnnnnnnnnnnnnnnnnnnnnnnnnnnnnnnnnnnnnnnnnnnnnnnnnnnnnnnnnnnnnnnnnnnnnnnnnnnnnnnnnnnnnnnnnnnnnnnnnnnnnnnnnnnnnnnnnnnnnnnnnnnnnnnnnnnnnnnnnnnnnnnnnnnnnnnnnnnnnnnnnnnnnnnnnnnnnnnnnnnnnnnnnnnnnnnnnnnnnnnnnnnnnnnnnnnnnnnnnnnnnnnnnnnnnnnnnnnnnnnnnnnnnnnnnnnnnnnnnnnnnnnnnnnnnnnnnnnnnnnnnnnnnnnnnnnnnnnnnnnnnnnnnnnnnnnnnnnnnnnnnnnnnnnnnnnnnnnnnnnnnnnnnnnnnnnnnnnnnnnnnnnnnnnnnnnnnnnnnnnnnnnnnnnnnnnnnnnnnnnnnnnnnnnnnnnnnnnnnnnnnnnnnnnnnnnnnnnnnnnnnnnnnnnnnnnnnnnnnnnnnnnnnnnnnnnnnnnnnnnnnnnnnnnnnnnnnnnnnnnnnnnnnnnnnnnnnnnnnnnnnnnnnnnnnnnnnnnnnnnnnnnnnnnnnnnnnnnnnnnnnnnnnnnnnnnnnnnnnnnnnnnnnnnnnnnnnnnnnnnnnnnnnnnnnnnnnnnnnnnnnnnnnnnnnnnnnnnnnnnnnnnnnnnnnnnnnnnnnnnnnnnnnnnnnnnnnnnnnnnnnnnnnnnnnnnnnnnnnnnnnnnnnnnnnnnnnnnnnnntttgaaaacagacctttgtcagctggctgtggggacctgtcagagtctggggacctggtgtgcagggcaggctccaagcgctttgcttccggacctcaggcttcccaaggggcgctgtgcagactgaccaccggcctcccgcatgcaggtcagaggctctgacactgtctggtttccaatgcttctggagacttcctgcctaggcctcatcttcttctttgccagtcacttgattaaccagttgtccagcattaggacttacctcctcgtttttgtaaggtctcttgtatgttgttacatgtttggcttaaacaatttataaaagcctttctagaaggcagaattagc

SEQ ID NO: 29224 - DNA, 323 bp, Macaca Mulatta
  misc_feature (1)...(323): n = A,T,C or G
gcttctagagcagggcatccactgtgatgtggtctttgtagtacacggaaagccattccgggtgcatcgctgcgtcctgggtgcacgcagtgcctactttgctaacatgctggacaccaaatggaagggcaagagtgtcgtggttctcaagcacccactgnnnnnnnnnnnnnnnnnnnnnnnnnnnnnnnnnnnnnnnnnnnncaggccgcctggacattggtgtagagcatgtgagtgactgtgaacgcctggccaagcagtgccagctgtgggacctgctcagcgacctggaggccaagtgcgagaaggtgtctgagttt

SEQ ID NO: 29225 - DNA, 696 bp, Macaca Mulatta
  misc_feature (1)...(696): n = A,T,C or G
cgacatgtaaatttcctcaaatttggaaaagttttcccttcctttccccttttgccccagtttccccggtgatttccagtcgggtttcagttccacccccactgtttcttgttcagcctcagtgatggcctgacccccagctgtgaggcttgtgagctaaggctgaagagactttgcctgtgggagctggggtggtacctgccccaacagccccccatcatctgattttgggtgtgacccntcaagtgtgcatgccactgtggggctcttctcagtcctggacccaagtccctggcctagcagagggccagctcgggtggccagcacaccgcttggtgcaggcctcctggcactcgcctggcatcttggtgtctgggtgctcagctcctgggtcccagggcagtgggacagctccaaggcttttctcatcagagacttcagtttgggtggagagtgtgcaggtcagggaaggttctggtgcttttcatttgatccaaaaggagctgagagccagaaatgtggctgtgattgggaaagagatggcatttgggaggcccatggaagaaaaccttcgccatctccattgttttacccccagcttaagatggacaggattcttctggtcacctcccttccacctcttccaccctcatggatgccttccagaatctgtgtcaaaccatgcccaccacagag

SEQ ID NO: 29226 - DNA, 785 bp, Macaca Mulatta
gggaggtttcccacgtgcggcctgaacctgcggacataatgctatgaggagatgggggccctagtgattcgcggtatcagaaatttcaacgtagagaaccgagcggaaagggaaatcagcaagataaagccctctctcgctcccaggcacccctctaccagcaacctcctgcaagagcagattagtcactatccagaaattaagggagagattgctcgtaaagatgacaagctgctgtcatttctaaaagatgtgtatgttgattccaaagatcctgtgtcttccttgcaggtaaaagctgctgaaacatgtcaagagccaaaggaattcagattgccgaaaggccatcagtttggtatgataaatatgaagagcattcccaaaggcaaaatttccgttgtagaagcattgacacttctcaataatcataaactttatccagaaacctggactgctgagaaaatagtgcaagagtaccagttagaaaagaaagatgtgaattctcttcttaagtattttgttacttttgaagtcaaaatcttcactcctgaagacaagaaggcaatacaatcaaaatgaagaaaatcacaaaaatttcctatgtgtactcctcatccctcatcctgtatattttctctttttttgcatattaaattatgtttattaccaaatatttaatgctctcatcatgaggccatattcttaatatttattgagctccctgacttttcagattgccatagaaagtattttgttttaattaattttggtttaggcatatttca

SEQ ID NO: 29227 - DNA, 589 bp, Macaca Mulatta
tatcagacgtcttttagactccaagacaatttttctgtttcagtttcatctggcattccaacacgtcagtgacactgggtagagtaactctctcgttccaaactgtgtatagtcagccttatcattaatgtagtcctaattttttgtgctaaaacaggctcaatcaatccttctgatcattgtagagttctctgtcaaacatgaacactttagaattgtatgttctctttagaccccataaatcctgtatccatcagagagaatagtcactggaaacatagcaaatgaacttctatcttggccatcagagctgtgcagaagagggaaatctgtcttaaaaatcagcaaatccaatgtgatacttcatttggaagcattacatgataatctcttgtttctatattatacttccaaatgttgcatttcctgtgttttccaaaggtttcaaatcatgggttttaatttcctccatggggaaataaagtgagtttaattcaccctaacaggtatggctgttttttcaggactctggaaatgtgatgcattaagtactggatctcagaagtggggtagctattttaccagttaa

SEQ ID NO: 29228 - DNA, 431 bp, Macaca Mulatta
  misc_feature (1)...(431): n = A,T,C or G
attattatgacttcatcagcttcaggaatatatggcaactttggccaggcaaattatagtgctgcaaagttgggtcttctgggccttgcaaattctcttgcaattgaaggcagaaaaagcaacattcattgtaacaccattgctcctaatgctggatcacggatgactcagacagttatgcctgaannnnnnnnnnnnnnnnnnnnnnnnnnnnnnnnnnnnnnnnnnnnnnnnnnnnnnnnnnnnnnnnnnnnnnnnnnnnnnnnnnnnnnnnnnnnnnnnnnnnnnnnnnnnnnnnnnnnntacgctgggagaggactcttggagctattgtaagacaaaagaatcacccaatgactcctgaggcagtgaaggctaactggaagaagatctgtgactttgagaatgccagcaagcctcagagtatccaa

SEQ ID NO: 29229 - DNA, 382 bp, Macaca Mulatta
  misc_feature (1)...(382): n = A,T,C or G
aatcaaggcctgagcaaccaaaaggagtgcctcatatggcttttctacctgtaacatgcacatagagccatggccgtggatttataaataccaagagaagttctatttttgtaaagactgcaaaaagnnnnnnnnnnnnnnnnnnnnnnnnnnnnnnnnncaacgctccattgattgaagacagtccctgtcctagaggggttgagccttcttcctccttgggttggaggagaccaggatgtggagctgcctcttatctctttctaggggtctgcttcctggtgcctcttgggggggattggcaaacaggctatccctaaagtcccatgtgccatgagtatgcacacgtgcatgtgtgtgaatatgtgagaatgtgagagag

SEQ ID NO: 29230 - DNA, 142 bp, Macaca Mulatta
agctacagcatgatgttagttaccaaacctggcacgggtcctctctttttagacacactcgatagatcccaccactgaactgtggatgggcaaaccccagtggaaacccaccctccccaacaccccactgagcgctgggccc

SEQ ID NO: 29231 - DNA, 2110 bp, Macaca Mulatta
  misc_feature (1)...(2110): n = A,T,C or G
tgtccagcttcacagagttgctgtgcagctcagatgtggcacagaaaatagcagacacagggagagggcagcanagcataaggcactgtagggagcagtggccacgttttctgnnnnnnnnnnnnnnnnnnnnnnnnnnnnnnnnnnnnnnnnnnnnnnnnnnnnnnnnnnnnnnnnnnnnnnnnnnnnnnnnnnnnnnnnnnnnnnnnnnnnnnnnnnnnnnnnnnnnnnnnnnnnnnnnnnnnnnnnnnnnnnnnnnnnnnnnnnnnnnnnnnnnnnnnnnnnnnnnnnnnnnnnnnnnnnnnnnnnnnnnnnnnnnnnnnnnnnnnnnnnnnnnnnnnnnnnnnnnnnnnnnnnnnnnnnnnnnnnnnnnnnnnnnnnnnnnnnnnnnnnnnnnnnnnnnnnnnnnnnnnnnnnnnnnnnnnnnnnnnnnnnnnnnnnnnnnnnnnnnnnnnnnnnnnnnnnnnnnnnnnnnnnnnnnnnnnnnnnnnnnnnnnnnnnnnnnnnnnnnnnnnnnnnnnnnnnnnnnnnnnnnnnnnnnnnnnnnnnnnnnnnnnnnnnnnnnnnnnnnnnnnnnnnnnnnnnnnnnnnnnnnnnnnnnnnnnnnnnnnnnnnnnnnnnnnnnnnnnnnnnnnnnnnnnnnnnnnnnnnnnnnnnnnnnnnnnnnnnnnnnnnnnnnnnnnnnnnnnnnnnnnnnnnnnnnnnnnnnnnnnnnnnnnnnnnnnnnnnnnnnnnnnnnnnnnnnnnnnnnnnnnnnnnnnnnnnnnnnnnnnnnnnnnnnnnnnnnnnnnnnnnnnnnnnnnnnnnnnnnnnnnnnnnnnnnnnnnnnnnnnnnnnnnnnnnnnnnnnnnnnnnnnnnnnnnnnnnnnnnnnnnnnnnnnnnnnnnnnnnnnnnnnnnnnnnnnnnnnnnnnnnnnnnnnnnnnnnnnnnnnnnnnnnnnnnnnnnnnnnnnnnnnnnnnnnnnnnnnnnnnnnnnnnnnnnnnnnnnnnnnnnnnnnnnnnnnnnnnnnnnnnnnnnnnnnnnnnnnnnnnnnnnnnnnnnnnnnnnnnnnnnnnnnnnnnnnnnnnnnnnnnnnnnnnnnnnnnnnnnnnnnnnnnnnnnnnnnnnnnnnnnnnnnnnnnnnnnnnnnnnnnnnnnagtgtgcttgctgtggcaagcgcttccggcacaagcccaacttgatcgcccaccgccgcgtgcacacgggcgagcgacctcaccagtgccccgagtgcgggaagcgcttcaccaataagccctacctgacttcccaccggcgcatccacactggcgagaagccctacccgtgcaaagagtgcggccgccgcttccggcacaaacctaacctgctgtctcacagcaagattcacaagcgatccgaggggtcnnnnnnnnnnnnnnnnnnnnnnnnnnnnnnnnnnnnnnnnnnnnnnnnnnnnnnnnnnnnnnnnnnnnnnnnnnnnnnnnnnnnnnnnnnnnnnnnnnnnnnnnnnnnnnnnnnnnnnnnnnnnnnnnnnnnnnnnnnnnnnnnnnnnnnnnnnnnnnnnnnnnnnnnnnnnnnnnnnnnnnnnnnnnnnnnnnnnnnnnnnnnnnnnnnnnnnnnnnnnnnnnnnnnnnnnnnnnnnnnnnnnnnnnnnnnnnnnnnnnnnnnnnnnnnnnnnnnnnnnnnnnnnnnnnnnnnnnnnnnnnnnnnnnnnnnnnnnnnnnnnnnnnnnnnnnnnnnnnnnnnnnnnnnnnnnnnnnnnnnnnnnnnnnnnnncctccagctggtgtgtgctgaggttccatcctgactgccctgtgccctggaaaagtagcaatagcatctgccccttagagccctctggctagaggagccaccagtggaaaggaaaaccttccatcctctggtgttaacgccttaatgtccctgtcttttactgtaagttacttcagatcatttttggaagtaggcgaggtacagtcctgtaaatgatgttttgggctagatacagcttgcataatctgcggggcttgttagacagcacttgggcctttgccagcagcaagaggtgaagccgagccattctaacctctcctttcccctcccacctgccccccgcataggc

SEQ ID NO: 29232 - DNA, 6466 bp, Macaca Mulatta
  misc_feature (1)...(6466): n = A,T,C or G
ccggccgtacacagatggcccttgcggctctgggcagtacacacacaaggtgtatcatgcgtgcatgcacatccccagctggttccgctccatcctgcccaaggcagccctgcgggtggtggaggagtcctggaatgcctacccctacacccgaaccaggtnnnnnnnnnnnnnnnnnnnnnnnnnnnnnnnnnnnnnnnnnnnnnnnnnnnnnnnnnnnnnnnnnnnnnnnnnnnnnnnnnnnnnnnnnnnnnnnnnnnnnnnnnnnnnnnnnnnnnnnnnnnnnnnnnnnnnnnnnnnnnnnnnnnnnnnnnnnnnnnnnnnnnnnnnnnnnnnnnnnnnnnnnnnnnnnnnnnnnnnnnnnnnnnnnnnnnnnnnnnnnnnnnnnnnnnnnnnnnnnnnnnnnnnnnnnnnnnnnnnnnnnnnnnnnnnnnnnnnnnnnnnnnnnnnnnnnnnnnnnnnnnnnnnnnnnnnnnnnnnnnnnnnnnnnnnnnnnnnnnnnnnnnnnnnnnnnnnnnnnnnnnnnnnnnnnnnnnnnnnnnnnnnnnnnnnnnnnnnnnnnnnnnnnnnnnnnnnnnnnnnnnnnnnnnnnnnnnnnnnnnnnnnnnnnnnnnnnnnnnnnnnnnnnnnnnnnnnnnnnnnnnnnnnnnnnnnnnnnnnnnnnnnnnnnnnnnnnnnnnnnnnnnnnnnnnnnnnnnnnnnnnnnnnnnnnnnnnnnnnnnnnnnnnnnnnnnnnnnnnnnnnnnnnnnnnnnnnnnnnnnnnnnnnnnnnnnnnnnnnnnnnnnnnnnnnnnnnnnnnnnnnnnnnnnnnnnnnagcgagtccttcccgccacagcttctcggagtggaggatgcagagtatcgccagggacttggacgagagctcagacgacgagttcttcgatgcgcacnnnnnnnnnnnnnnnnnnnnnnnnnnnnnnnnnnnnnnnnnnnnnnnnnnnnnnnnnnnnnnnnnnnnnnnnnnnnnnnnnnnnnnnnnnnnnnnnnnnnnnnnnnnnnnnnnnnnnnnnnnnnnnnnnnnnnnnnnnnnnnnnnnnnnnnnnnnnnnnnnnnnnnnnnnnnnnnnnnnnnnnnnnnnnnnnnnnnnnnnnnnnnnnnnnnnnnnnnnnnnnnnnnnnnnnnnnnnnnnnnnnnnnnnnnnnnnnnnnnnnnnnnnnnnnnnnnnnnnnnnnnnnnnnnnnnnnnnnnnnnnnnnnnnnnnnnnnnnnnnnnnnnnnnnnnnnnnnnnnnnnnnnnnnnnnnnnnnnnnnnnnnnnnnnnnnnnnnnnnnnnnnnnnnnnnnnnnnnnnnnnnnnnnnnnnnnnnnnnnnnnnnnnnnnnnnnnnnnnnnnnnnnnnnnnnnnnnnnnnnnnnnnnnnnnnnnnnnnnnnnnnnnnnnnnnnnnnnnnnnnnnnnnnnnnnnnnnnnnnnnnnnnnnnnnnnnnnnnnnnnnnnnnnnnnnnnnnnnnnnnnnnnnnnnnnnnnnnnnnnnnnnnnnnnnnnnnnnnnnnnnnnnnnnnnnnnnnnnnnnnnnnnnnnnnnnnnnnnnnnnnnnnnnnnnnnnnnnnnnnnnnnnnnnnnnnnnnnnnnnnnnnnnnnnnnnnnnnnnnnnnnnnnnnnnnnnnnnnnnnnnnnnnnnnnnnnnnnnnnnnnnnnnnnnnnnnnnnnnnnnnnnnnnnnnnnnnnnnnnnnnnnnnnnnnnnnnnnnnnnnnnnnnnnnnnnnnnnnnnnnnnnnnnnnnnnnnnnnnnnnnnnnnnnnnnnnnnnnnnnnnnnnnnnnnnnnnnnnnnnnnnnnnnnnnnnnnnnnnnnnnnnnnnnnnnnnnnnnnnnnnnnnnnnnnnnnnnnnnnnnnnnnnnnnnnnnnnnnnnnnnnnnnnnnnnnnnnnnnnnnnnnnnnnnnnnnnnnnnnnnnnnnnnnnnnnnnnnnnnnnnnnnnnnnnnnnnnnnnnnnnnnnnnnnnnnnnnnnnnnnnnnnnnnnnnnnnnnnnnnnnnnnnnnnnnnnnnnnnnnnnnnnnnnnnnnnnnnnnnnnnnnnnnnnnnnnnnnnnnnnnnnnnnnnnnnnnnnnnnnnnnnnnnnnnnnnnnnnnnnnnnnnnnnnnnnnnnnnnnnnnnnnnnnnnnnnnnnnnnnnnnnnnnnnnnnnnnnnnnnnnnnnnnnnnnnnnnnnnnnnnnnnnnnnnnnnnnnnnnnnnnnnnnnnnnnnnnnnnnnnnnnnnnnnnnnnnnnnnnnnnnnnnnnnnnnnnnnnnnnnnnnnnnnnnnnnnnnnnnnnnnnnnnnnnnnnnnnnnnnnnnnnnnnnnnnnnnnnnnnnnnnnnnnnnnnnnnnnnnnnnnnnnnnnnnnnnnnnnnnnnnnnnnnnnnnnnnnnnnnnnnnnnnnnnnnnnnnnnnnnnnnnnnnnnnnnnnnnnnnnnnnnnnnnnnnnnnnnnnnnnnnnnnnnnnnnnnnnnnnnnnnnnnnnnnnnnnnnnnnnnnnnnnnnnnnnnnnnnnnnnnnnnnnnnnnnnnnnnnnnnnnnnnnnnnnnnnnnnnnnnnnnnnnnnnnnnnnnnnnnnnnnnnnnnnnnnnnnnnnnnnnnnnnnnnnnnnnnnnnnnnnnnnnnnnnnnnnnnnnnnnnnnnnnnnnnnnnnnnnnnnnnnnnnnnnnnnnnnnnnnnnnnnnnnnnnnnnnnnnnnnnnnnnnnnnnnnnnnnnnnnnnnnnnnnnnnnnnnnnnnnnnnnnnnnnnnnnnnnnnnnnnnnnnnnnnnnnnnnnnnnnnnnnnnnnnnnnnnnnnnnnnnnnnnnnnnnnnnnnnnnnnnnnnnnnnnnnnnnnnnnnnnnnnnnnnnnnnnnnnnnnnnnnnnnnnnnnnnnnnnnnnnnnaacgtgacggccaaccaccggatcaatgatgccctcgccaatgaggatggcccccaggttctgacgggcaggttcatgtatgggcccctggacatggtcaccctgactggggagaaggtnaggtggatgtgcacatcatgacccagccaccctcgggcgagtggctctacctggatacgctggtgaccaacaacagtgggcgtgtctcctacaccatccctgagtcgcaccgcctgggcgtgggtgtctaccccatcaagatggtggtcaggncaggggagaccacacgtttgccgacagctacatcactgtgctgcccaagggcacagagttcgtggtcttcagcatcgacggctcctttgccgctagcgtgtccatcatgggcagcgaccccaaggtgcgggccggggccgtggacgtggtgcggnnnnnnnnnnnnnnnnnnnnnnnnnnnnnnnnnnnnnnnnnnnnnnnnnnnnnnnnnnnnnnnnnnnnnnnnnnnnnnnnnnnnnnnnnnnnnnnnnnnnnnnnnnnnnnnnnnnnnnnnnnnnnnnnnnnnnnnnnnnnnnnnnnnnnnnnnnnnnnnnnnnnnnnnnnnnnnnnnnnnnnnnnnnnnnnnnnnnnnnnnnnnnnnnnnnnnnnnnnnnnnnnnnnnnnnnnnnnnnnnnnnnnnnnnnnnnnnnnnnnnnnnnnnnnnnnnnnnnnnnnnnnnnnnnnnnnnnnnnnnnnnnnnnnncagttcatcacggacggctatgcagcccacctggcgcagctgaagtacagccaccgggcgcggcctgctcgcaacacagccacccgcatggcgctgcgcaagggcagcttcggcctgcctggccagggcgacttcctgcgttcccggaaccacctgcttcgcaccatctcggcccagcccagcgggcccagccaccggcacgagcggacacagagccaagcagatggcgagcagcggggccagcgcagcatgagcatggcggccggctgctggggccgcgccatgactggccgcctggagccgggggcggccacgggctccaagtagggcaccgtgagtgcagtgcgaggtctccatggtgctagnnnnnnnnnnnnnnnnnnnnaggaggcctggcctgggtacatgcagagacgtgggcccgggagcttgtcccagggccttgcagaggacacgggccacaccacacagtgctccctgccctgcctcacgtccttgggcctgacgggtccagcttgtcatggaagctggcagggaccaccagccccacgatggcagagggaccaggactccccactcagactggcctgggaggctgtcccagacattttgtcctgcgtggatctccaagtgtcctggtgccaggtgtgggcccaagcccagcctgtcacatccccattcactggccaccctcactcccaggtcccctcccatttggtagcagctccaacaggggtccagcctgcannnnnnnnnnnnnnnnnnnnnnnnnnnnnnnnnnnnnnnnnnnnnnnnnnnnnnnnnnnnnnnnnnnnnnnnnnnnnnnnnnnnnnnnnnnnnnnnnnnnnnnnnnnnnnnnnnnnnnnnnnnnnnnnnnnnnnnnnnnnnnnnnnnnnnnnnnnnnnnnnnnnnnnnnnnnnnnnnnnnnnnnnnnnnnnnnnnnnnnnnnnnnnnnnnnnnnnnnnnnnnnnnnnnnnnnnnnnnnnnnnnnnnnnnnnnnnnnnnnnnnnnnnnnnnnnnnnnnnnnnnnnnnnnnnnnnnnnnnnnnnnnnnnnnnnnnnnnnnnnnnnnnnnnnnnnnnnnnnnnnnnnnnnnnnnnnnnnnnnnnnnnnnnnnnnnnnnnnnnnnnnnnnnnnnnnnnnnnnnnnnnnnnnnnnnnnnnnnnnnnnnnnnnnnnnnnnnnnnnnnnnnnnnnnnnnnnnnnnnnnnnnnnnnnnnnnnnnnnnnnnnnnnnnnnnnnnnnnnnnnnnnnnnnnnnnnnnnnnnnnnnnnnnnnnnnnnnnnnnnnnnnnnnnnnnnnnnnnnnnnnnnnnnnnnnnnnnnnnnnnnnnnnnnnnnnnnnnnnnnnnnnnnnnnnnnnnnnnnnnnnnnnnnnnnnnnnnnnnnnnnnnnnnnnnnnnnnnnnnnnnnnnnnnnnnnnnnnnnnnnnnnnnnnnnnnnnnnnnnnnnnnnnnnnnnnnnnnnnnnnnnnnnnnnnnnnnnnnnnnnnnnnnnnnnnnnnnnnnnnnnnnnnnnnnnnnnnnnnnnnnnnnnnnnnnnnnnnnnnnnnnnnnnnnnnnnnnnnnnnnnnnnnnnnnnnnnnnnnnnnnnnnnnnnnnnnnnnnnnnnnnnnnnnnnnnnnnnnnnnnnnnnnnnnnnnnnnnnnnnnnnnnnnnnnnnnnnnnnnnnnnnnnnnnnnnnnnnnnnnnnnnnnnnnnnnnnnnnnnnnnnnnnnnnnnnnnnnnnnnnnnnnnnnnnnnnnnnnnnnnnnnnnnnnnnnnnnnnnnnnnnnnnnnnnnnnnnnnnnnnnnnnnnnnnnnnnnnnnnnnnnnnnnnnnnnnnnnnnnnnnnnnnnnnnnnnnnnnnnnnnnnnnnnnnnnnnnnnnnnnnnnnnnnnnnnnnnnnnnnnnnnnnnnnnnnnnnnnnnnnnnnnnnnnnnnnnnnnnnnnnnnnnnnnnnnnnnnnnnnnnnnnnnnnnnnnnnnnnnnnnnnnnnnnnnnnnnnnnnnnnnnnnnnnnnnnnnnnnnnnnnnnnnnnnnnnnnnnnnnnnnnnnnnnnnnnnnnnnnnnnnnnnnnnnnnnnnnnnnnnnnnnnnnnnnnnnnnnnnnnnnnnnnnnnnnnnnnnnnnnnnnnnnnnnnnnnnnnnnnnnnnnnnnnnnnnnnnnnnnnnnnnnnnnnnnnnnnnnnnnnnnnnnnnnnnnnnnnnnnnnnnnnnnnnnnnnnnnnnnnnnnnnnnnnnnnnnnnnnnnnnnnnnnnnnnnnnnnnnnnnnnnnnnnnnnnnnnnnnnnnnnnnnnnnnnnnnnnnnnnnnnnnnnnnnnnnnnnnnnnnnnnnnnnnnnnnnnnnnnnnnnnnnnnnnnnnnnnnnnnnnnnnnnnnnnnnnnnnnnnnnnnnnnnnnnnnnnnnnnnnnnnnnnnnnnnnnnnnnnnnnnnnnnnnnnnnnnnnnnnnnnnnnnnnnnnnnnnnnnnnnnnnnnnnnnnnnnnnnnnnnnnnnnnnnnnnnnnnnnnnnnnnnnnnnnnnnnnnnnnnnnnnnnnnnnnnnnnnnnnnnnnnnnnnnnnnnnnnnnnnnnnnnnnnnnnnnnnnnnnnnnnnnnnnnnnnnnnnnnnnnnnnnnnnnnnnnnnnnnnnnnnnnnnnnnnnaagagggattcagcagagacccccttacctccctggctcggtctgagtcccactgcccgcccccttcagccttcacgtctcagcccctcctgtctggtctgtccatgtgccatctgtctcgctgggccatgtgtgagcagcatccccactctccccacccgtccctgctgtccctgcatcattgggcctgagtgtgctctgtatacaacgtcatgtctgttacaccaattaaagaagcgggaaggctt

SEQ ID NO: 29233 - DNA, 178 bp, Macaca Mulatta
  misc_feature (1)...(178): n = A,T,C or G
cgcgccagccgcgaatcggatatctgtggagatggcctaggcggtatccctgagctgagagcatcaccctgtccccgaatccttctttcctctgttttgtttttcattcccctccnnnntcccctccccctccagtccacgacgactggctgttgaccccgttcaggcctcggtgaag

SEQ ID NO: 29234 - DNA, 1198 bp, Macaca Mulatta
  misc_feature (1)...(1198): n = A,T,C or G
cggcacgaggccatcacaacaaaggaacttggaactgtcatgaggtcactgggtcagaacccaacagaagctgaattgcaggatatgatcaacgaagtggatgctgatggtaatggcaccattgacttccctgaatttttgactatgatggctagaaaaatgaaagatacagatagtgaagaagaaatccgtgaggcattccgagtctttgacaaggatggcaatggttacatcagtgcagcagaactacgtcacgtcatgacaaacttaggagaaaaactaacagatgaagaagtagatgaaatgatcagagaagcagatattgatggagacggacaagtcaactatgaagaattcgtacagatgatgactgcaaaatgaagacctactttcaactcctttttcccccctctagaagaatcaaattgaatcttttacttacctcttgnnnnnnnnnnnnnnnnnnnnnnnnntcatttattcattctgtttctgtatagcaaaactgaatgtcaaaagtaccttctgtccacacacacaaaatctgcatgtattggttggtggtcctgtcccctaaagatcaagctacacatcagttttacaatataaatacttgtactacctttaatggataaggactcccttaaaagattccatttgactaaataatacacatgttttgggcctgggcccagtttttttcatagccatgcaaaactatgacccaattggaacccaacagtccaaggcccctttttgataattttaaacaaattgtaaaaataatatggcctataatacatctcccagcgaatcattatccctctacatacattaacgcctatggcgtacgcccgttttatttctggggcccaactatcatctgaggcaccccatttcataagaaaaaatgccattattcttttgaagaaccaacaatttccgcattttagtggcgggccccccggggggtccccccacgacatatgggttaaagaaaattaaaaaacatatgggttgtcacataaggagcagcgcgttttcccgctttaanagaagaaaattcccgttagggatacccatagaaaaataaaaggaggacacatggggaaatttctcatgcccctcaaataatgaacataatatacgctccccgggtggcggcagaaccccaagtagcggtgttttaagaaaacac

SEQ ID NO: 29235 - DNA, 1451 bp, Macaca Mulatta
  misc_feature (1)...(1451): n = A,T,C or G
caggcacgcgggagctgattacacacaatgaatgggggcaatgagagcagtggagcagacagagctgggggccctgtggccacatctgtccccatcggctggcagcgctgtgtgcgagagggtgctgtgctctacatcagncagtccaagtggcacagagctgtcttccttggagcaaacccggagctacctcctcagcgatgggacctgnnnnnnnnnnnnnnnnnnnnnnnnnnnnnnnnnnnnnnnnnnnnnnnnnnnnnnnnnnnnnnnnnnnnnnnnnnnnnnnnnnnnnnnnnnnnnnnnnnnnnnnnnnnnnnnnnnnnnnnnnnnnnnnnnnnnnnnnnnnnnnnnnnnnnnnnnnnnnnnnnnnnnnnnnnnnnnnnnnnnnnnnnnnnnnnnnnnnnnnnnnnnnnnnnnnnnnnnnnnnnnnnnnnnnnnnnnnnnnnnnnnnnnnnnnnnnnnnnnnnnnnnnnnnnnnnnnnnnnnnnnnnnnnnnnnnnnnnnnnnnnnnnnnnnnnnnnnnnnnnnnnnnnnnnnnnnnnnnnnnnnnnnnnnnnnnnnnnnnnnnnnnnnnnnnnnnnnnnnnnnnnnnnnnnnnnnnnnnnnnnnnnnnnnnnnnnnnnnnnnnnnnnnnnnnnnnnnnnnnnnnnnnnnnnnnnnnnnnnnnnnnnnnnnnnnnnnnnnnnnnnnnnnnnnnnnnnnnnnnnnnnnnnnnnnnnnnnnnnnnnnnnnnnnnnnnnnnnnnnnnnnnnnnnnnnnnnnnnnnnnnnnnnnnnnnnnnnnnnnnnnnnnnnnnnnnnnnnnnnnnnnnnnnnnnnnnnnnnnnnnnnnnnnnnnnnnnnnnnnnnnnnnnnnnnnnnnnnnnnnnnnnnnnnnnnnnnnnnnnnnnnnnncagtgtcttcagccactatgcacctnnnnnnnnnnnnnnnnnnnnnnnnnnnnnnnnnnnnnnnnnnnnnnnnnnnnnnnnnnnnttccttgctagcagcctactctctgcagcagccaaggcacagcatcccccactaccccctcccagcactttacagggccgaaggccccgtgccccggtgccctcagcttcccactcctcatcacttcgtccctctcagcgtcgtccccgcagaccccctactgtatttcgattgctagaagggagaggccctcaaacccctagacggagccgtcctcgggcccctgctcctgtcccccaaccattttctctcccagagccatcccaaccaattctcccttctgtgctgtccctgctgggactccccacccctggcccttcccactctgatggaagctttaaccttttggggtcagatgcacaccttcctcctcccccaaccctctcctcagggagccctccccagcccaggcaccctatccagtcctccctgcctgggaccaccagtggcagcctcagcagtgtgccagg

SEQ ID NO: 29236 - DNA, 414 bp, Macaca Mulatta
tctggatgcctgccggtgtgagctgatgcgtttcaagactttgtataacggggatgatcttccgttttccttgaagtctgtagtggtgtccagtggagcatatggtgaacttcaggcttttgtcaacatggccccattggcgcagaggtcatcccatgctggttccttaaggtcctgtgacaatataatgatacactttcctgtcccatcgcagtggatcaaggccctttggaccatgaacctccagaggcagaagtctctgaaagccaaaatgaaccgccgggcctgtctggggagtttacatgaacttgaatctgaacctgttattcaagtcactgtggggtcagcaaaatatgagagtgcctaccaggcagtggtatggaagatagatcggcttccagacaaaaattcaag

SEQ ID NO: 29237 - DNA, 765 bp, Macaca Mulatta
  misc_feature (1)...(765): n = A,T,C or G
gggtggtgtatcaccccaaaatagaagcggtccaggagtttaccaggactctgcctgccctggtgtggcaccgacaggactggaccatccttcactcttacatgcacctcaatgccgacgagctggaagccctgcagatgtgcacaggttacatcgctggatttgtagacttggaggtgagcaacagaccagacctctatgatgtgtttgtgaatctggcagagagtgagattaccattgctccccttgcaaaagaggccatggcaatgggcaaactgcacaaagaaatgggtcagctaattgttcagtctgcagaagatccagagaaatcagacagccaggtgatacaggatattgctctaaaaacaagagaaatctttaccaacctagcaccattttcagaagtttcggctgatggagaaaagagagtccttaatttggaggcactaaagcaaaaacgatttccaccagcaacagaaaacttcctttatcatctagcagcagccgaacaaatgctgaaaatctgactgtgtgacagaatgtatcactgatgactgatagaaagccctctttcactctgattatccattaactacataaagtcctgaaaataacagaagaactgttatatatttttaatgatttatttgcaggtattgagatttgacctgnaaaacaatgaaacacatgaacatacttcctgattttctcctagctgattaagtttcctgcctggctgtcagtgctgggacaaaatgctgtttc

SEQ ID NO: 29238 - DNA, 811 bp, Macaca Mulatta
  misc_feature (1)...(811): n = A,T,C or G
ggggcttttggttcttacgggagactgcgtaggccttagattttttactgtctccttctgaagaatttaacacaaacatggatatcagaccaaatcatacaatttatatcaacaatatgaatgacaaaattaaaaaggaagaattgaagagatccctgtatgccctgttttctcaattcggtcatgtggtggacattgtggctttaaagaccatgaagatgagggggcaggcgtttgtcatatttaaggaactgggctcatccacgaatgctttgagacagttacaaggatttccattttatggtaaaccaatgcgaatacagtatgcaaaaacagattcggatataatatctaaaatgcgtggaacttttgctgannnnnnnnnnnnnnnnnnnnnnnnnnnnnccaaagctgtggaacagactgcaacaaccacaaacaaaaaacctggccagggaactccaaattcagctaatacccaaggaaatacaacaccaaatcctcaggtccctgattaccctccaaactatattttattccttaataacttaccagaagagactaacgagatgatgttatccattgctgttttaatcagttccctggccttcaaaggaagtgcgtctgggtaaccagggaaggcattgacattgctttttgtttgaaatttgaaaaaatgatggggcagggcctggagacctgtccaaggggatagccttttacagggggattttttaaataaaatccgtcccccgggtatggaggatgtcgctattgtgaaggaaataagccatttattggccccagaaat

SEQ ID NO: 29239 - DNA, 1252 bp, Macaca Mulatta
  misc_feature (1)...(1252): n = A,T,C or G
cgccaacaacgagttcatctacctggtcggcctggaggaggtggtgcagaacctactggagacacaannnnnnnnnnnnnnnnnnnnnnnnnnnnnnnnnnnnnnnnnnnnnnnnnnnnnnnnnnnnnnnnnnnnnnnnnnnnnnnnnnnnnnnnnnnnnnnnnnnnnnnnnnnnnnnnnnnnnnnnnnnnnnnnnnnnnnnnnnnnnnnnnnnnnnnnnnnnnnnnnnnnnnnnnnnnnnnnnnnnnnnnnnnnnnnnnnnnnnnnnnnnnnnnnnnnnnnnnnnnnnnnnnnnnnnnnnnnnnnnnnnnnnnnnnnnnnnnnnnnnnnnnnnnnnnnnnnnnnnnnnnnnnnnnnnnnnnnnnnnnnnnnnnnnnnnnnnnnnnnnnnnnnnnnnnnnnnnnnnnnnnnnnnnnnnnnnnnnnnnnnnnnnnnnnnnnnnnnnnnnnnnnnnnnnnnnnnnnnnnnnnnnnnnnnnnnnnnnnnnnnnnnnnnnnnnnnnnnnnnnnnnnnnnnnnnnnnnnnnnnnnnnnnnnnnnnnnnnnnnnnnnnnnnnnnnaggcgggacccttgcgtttgtcagcccaagcctggcggtgcacaagagctcctcggccgtggaccgccagcgagagtacctcctggacatgatcccaccccgctccatcccccagtcagccacgtggaaatagtgtgagccaggccccgtggaagacgggctccctccttccccacctggcccccagtctagaaggacccactgcaccaccctccgctggctcgggaagacaccgtgcccgtcccaagagcaagcaccggccgtgctgcagaggcgagacctcaattcttggctgcaaagtttcatcagggctggggggctggtgccgcctcataggcggacaaggatcatcgctggggaacctttcccgtgggctttcttcctttctctctttgcctttagtttgcccgacaccagcagaaaagtggaccttgggggttggttctgctcccgggcccctnnnnnncccctgccggcacacgggcagctcaccctggacactgtgacgcgcatgggcaaggccagcgcccggggcttctgaaccgagcggggcatttcattttgtttttgcttttccccgtcttaggctcccgatctttgactgccttcccatggcgatctataagttgaaagannnnnnnnnnnnnnatcacctcataatgatggagttaaaagtaaaccgtgcagaccctg

SEQ ID NO: 29240 - DNA, 224 bp, Macaca Mulatta
  misc_feature (1)...(224): n = A,T,C or G
cccgggacagaccctgtgttccccaaggcgccttcggcccgccccgagggacagagactggagctcaatcttggaccgtacaaacattcgccgacaacctgnggccggcggcaccatgaggcaggcggggcgcgcggcgctgctggccgcgctgctgctcctgctacagctgtgccctgggaacagccagaggagccccgaggcggccgggatccaggacccga

SEQ ID NO: 29241 - DNA, 119 bp, Macaca Mulatta
caggatttcatcactcagaatctgaaaataaattctgcttattttctggggctgtcagatccaaagggttggcgacattggcaatgggttgatcagacaccatacaataaaaatgtcac

SEQ ID NO: 29242 - DNA, 471 bp, Macaca Mulatta
ccatgtcctgggctgcccatcccgtgtcctggtgggacttggccacccccagagcctgtttgctccagaaggcagctcagggaccctccttgcttatcctctgtgcaaactacaaatgctctcaggagcctgtactgtgagcacagctgggacagggatggcgccgacacatcagcctcctgggcccttggggggtctcagaatagctctccccaggcccaccccgcagcccccattccagggccctgcggggagcccccaggcacttgtctcaggggcccggtctcacccagcactgcaaggggagactggccccagtcagtaagcagtcctggagcttttggggagcctgagagcagtatgggggctggactcctccctggcgaggtagggggctttgtgaccaaggtcccgtgcaaggaactgcacagcctggctatggctcagcccttccagtttgctggcctgtgg

SEQ ID NO: 29243 - DNA, 331 bp, Macaca Mulatta
attttgagtctcttcatgaaaatctcgaaactagaagtgactgaaatagtgaaaccatcaccaaagcgcaaaatggaccctgatattgaaaaaatggataggacccctgaaaaggacaaaatttcttcaactgcgccagccaaaaaaatcaaactcaacagagaaactgggaagaaaattggaagtacagaaaatatatctaacacaaaagaaccctgtgaaaagttggagtcaacatctagcaaagttaaacaagaaaaagtcaaagcaaaggtcagacgaaaagtgactggaactgaaggatccagctcaactctagtggattatacca

SEQ ID NO: 29244 - DNA, 615 bp, Macaca Mulatta
ctaggtagatggagtccgcagagatgagcagagcaacagtacaacagacttgctggactacatcacaaagacatcttgtcacctggcccctagctgttcttccatgccaataccatgccctgtggtggctgcagaacctcccccctccactgttaaaacataccattacttggttgatccacattttgctcaggtcttccttagtaaatttaccatggtgaaaaataaagccctgaggaaagggtttccttgagtcccctctgaggtattgattcgtacttgtgtgatttagtttttgggtttctttgagacagggtctcactacattgcccatgctgacatcaaattctgtggttcaagcaatcctcccacctcaacccacaagtagctaggactgcagacacatgccaacatacagggctgcatttttttaaaaaagcctaggcagctctaacatctgatatggacacaaggacaacagtttccttatttagatccttaccgctaaacgatacttcaaagtgacaaaaccgtgttcctttcccacttacagacaatgattagcaggtcccttaccacatacagaggatgcatttctttttgctctacgacact

SEQ ID NO: 29245 - DNA, 790 bp, Macaca Mulatta
aaatgtgttctatcataagaacttttcttttcttcaaaatatttgatataactcaccacatatttatttctatttacagatatgactgaaaagtgcattctctgaatttctcctctcatgaaaaaccatcttatctgaagacttgactgttgttttagaatagtaaaatcccatattgaaggaaattgttctttttgagttatctacttaatagcatatcattctttttcttaagctaaattttcctagagagtttcttgtctaaatttcagttgtatcatgccatatggagggcacctaatcagagggtattaaagtccttactaagtttctctagtggactttttgtttaaaaggtctttgaattgtcaattctgtaagtgccatcatttaaaataattttatgcagtgacagagattgttttctttttccttttcaataaattacactttaaggcaaaatccctattttctgtcattattcagcagtatttacataatcatcttaagagtctttgcatataacatttgtttacattaaattaaaatccatattttctgtcattattccatcaccagtatttacataatcctgttaatagtgtaatgtatgtaacattttgttttcattaattttttatgacactttgaatcacattttagtgaagatttgtagaactgttcacttctggctggcactagcagccagatcataaaaggcatttgtaaacttgtccaatgtctttaatgtatagtcagtggtttgtagaacattttccatgaggacata

SEQ ID NO: 29246 - DNA, 1397 bp, Macaca Mulatta
  misc_feature (1)...(1397): n = A,T,C or G
gaccttcatagatttgagcaacaagatgccgtccctgctgtttggttctgaaatcttcccagtatcctttcatgtaaaatcatccagctcagattgcacgactgagtcctcaaggacttttcctgagcactgtgctccggcaaggcttgccttaggagaggccctccagtgcccatctcaacctcccaagtggaccttttctttcttcctgtcccacggttgccctgggatggccacattcagggaagacactggtctccatagtcagacccacactcaggctcctccccagcctccagctcctctccaagactatggaggcactgccatgtccagacnnnnnnnnnnnnnnnnnnnnnnnnnnnnnnnnnnnnnnnnnnnnnnnnnnnnnnnnnnnnnnnnnnnnnnnnnnnnnnnnnnnnnnnnnnnnnnnnnnnnnnnnnnnnnnnnnnnnnnnnnnnnnnnnnnnnnnnnnnnnnnnnnnnnnnnnnnnnnnnnnnnnnnnnnnnnnnnnnnnnnnnnnnnnnnnnnnnnnnnnnnnnnnnnnnnnnnnnnnnnnnnnnnnnnnnnnnnnnnnnnnnnnnnnnnnnnnnnnnnnnnnnnnnnnnnnnnnnnnnnnnnnnnnnnnnnnnnnnnnnnnnnnnnnnnnnnnnnnnnnnnnnnnnnnnnnnnnnnnnnnnnnnnnnnnnnnnnnnnnnnnnnnnnnnnnnnnnnnnnnnnnnnnnnnnnnnnaggctggagcctccattccctgccttggtaccaaagtcttgcttggtagcagaatcagctgtcagcaagctcctgctttcagcctctgagttccaggttcctggattggatgagctggatggtgtgaaagcagcatgcccctgcccacagagcagccctccagaacagaaagaggnnnnnnnnnnnnnnnnnnnnnnnnnnnnnnnnnnnnnnnnnnnnnnnnnnnnnnnnnnnnnnnnnnnnnnnnnnnnnnnnnnnnnnnnnnnnnnnnnnnnnnnnnnnnnnnnnnnnnnnnnnnnnnnnnnnnnnnnnnnnnnnnnnnnnnnnnnnnnnnnnnnnnnnnnnnnnnnnnnnnnnnnnnnnnnnnnnnnnnnnnnnnnnnnnnnnnnnnnnnnnnnnnnnnnnnnnnnnnnnnnnnnnnnnnnnnnnnnnnnnnnnnnnnnnnnnnnnnnnnnnnnnnnnnnnnnnnnnnnnnnnnnnnnnnnnnnnnnnnnnnnnnnnnnnnnnnnnnnnnnnnnnnnnnnnnnnnnnnnnnnnnnnnnnnnnnnnnnnnnnnnnnnnnnnnnnnnnnnnnnnnnnnnnnnnnnnnnnnnnnnnnccgggcacagtggctcacgcctgtaatctcagcactttgggaggctgaggtgggtggatcgcttgag

SEQ ID NO: 29247 - DNA, 296 bp, Macaca Mulatta
tttgtgtgtgcttatacagattaaccctttctccccaaaattaatagtgatctttactttttcttttctctaaagtatgaaacacttcatgttgctcaaatggaaactgtacagaaacaggttactcccttccttctccttggatgcaacactttggcatgttttctctttttttttcctgcagatctaggcagatacatacaaatataaatgtaatttctaaaaaacataaataggatcatactatacttgcttgcattttttgccaaacatcggcacagtaaacatccttgtgc

SEQ ID NO: 29248 - DNA, 755 bp, Macaca Mulatta
gggaatggtccaggagccgctcctctccactcgggaaaccttcagaggagtctcagaaaggacacggctagctgcttttctcagcgccgaagccgcgccatgctcgtcctcagaagcgccctgactcgggcgctggcctcacgtacgctggcgcctcaggtgtgctcatcttttgctacaggacccagacaatacgatggaacattctatgaatttcgtacttattaccttaaaccctcaaagatgaatgagttcctggaaaattttaagaaaaatgctcatcttcggacagctcactctgaattggttggatactggagtgtagaatttggaggcagaatgaataaagtgtttcatatttggaagtatgataattttgctcatcgaactgaagttcggaaagccttggccaaagataaggaatggcaagaacaatttctcattccaaatttggctctcattgataaacaagagagtgagattacttatctggtaccatggtgcaaaatagaaaaacctccaaaagagggagtctatgaactggccacttttcagatgaaacctggtgggccagctctgtggggtgatgcatttaaaagggcagttcatgctcatgtcaatctaggctacacaaaactagttggagtgttccacacagagtatggagcacttaacagagttcatgttctctggtggaacgagagtgcagatagtcgtgcagctgggagacataagtcccatgaggaatcccagaa

SEQ ID NO: 29249 - DNA, 641 bp, Macaca Mulatta
  misc_feature (1)...(641): n = A,T,C or G
aaaggaacaagatgacttccttttctaccaccacactactgccccccattaaggttcttgtggtttacccatctgaaatatgtttccatcacacaatttgttacttcactgaatttcttcaaaaccattgcagaagtgaggtcatccttgaaaagtggcagaaaaagaaaatagcagagatgggtccagtgcagtggcttgccactcaaaagaaggcagcagacaaagttgtcttccttctttccaatgacgtcaacagtgtttgcgatggtacctgtgccaagagtgagggcagtcccagtgagaactctcaagacctcttcccccttgcctttaaccttttctgcagtgatctaagaagccagactcatctgcacaaatatgtggtggtctactttagagagactgataccaaagacaattataatgctctcagtgtctgccccaagtaccacctcatgaaggatgccactgctttctgtgcagaacttctccacgtcaagcagcaggtgtcagcaggaaaaagatcgcaagcctgccacaatggctgctgctccttgtagcccacccatgagaagcaagagaccttanaggcttcctaccccaccaattacaaggaaaaaacgtgtgataatcctgaa

SEQ ID NO: 29250 - DNA, 719 bp, Macaca Mulatta
ggattctagttcaaaccaggttgcctggcccaagccctgtgttcttcagaaggagggaaagatggaacgaggtcattctttgggtgtctccccaagggtagtaactcatagcctcctcactcaccccattcccctaacaagatggggaatatgagcagggcatccctaggctccccagatctcactgggccctgctgtctttccctgcccatcccttgcccgccctccctactgtgcccaggccttcaggcccagccaccactccccaagtcagaggcagtaccagatacgcaccacttttccaggctcttgcagtggagcgaagcccctcaggtccttggaaggggagacaggcccttctgctggtacaaggcgccaggtctggctcagctgacctgcaggaatcaccaggcctggctgttcccagaaatcacacactgttcagcagagtgcaagagtgaacaataattcatgccattaaaattcattgccctgatagtgcagtgaagccatgactggacagagatgaaactctcccagaacagaacctctgcccccaggacagggctggattcacccctcatgtaccagacactgttgccaaaacacttaaggcttcatgtggtgcccagatgttcaaagattcctgcagaatgagggagcgttccctgaggactaaagaggcttccctgggaaccagaggtagacaataataatga

SEQ ID NO: 29251 - DNA, 2012 bp, Macaca Mulatta
  misc_feature (1)...(2012): n = A,T,C or G
gcgccggcggcggggctgtgaggaaaatggctgcgtcttcgagtggtgagaaggagaaagagaggctgggaggcggcttgggagtggcaagtggtaacagcacacgagagcggctactgtctgcgcttgaggatttggaggtcctgtctagnnnnnnnnnnnnnnnnnnnnnnnnnnnnnnnnnnnnnnnnnnnnnnnnnnnnnnnnnnnnnnnnnnnnnnnnnnnnnnnnnnnnnnnnnnnnnnnnnnnnnnnnnnnnnnnnnnnnnnnnnnnnnnnnnnnnnnnnnnnnnnnnnnnnnnnnnnnnnnnnnnnnnnnnnnnnnnnnnnnnnnnnnnnnnnnnnnnnnnnnnnnnnnnnnnnnnnnnnnnnnnnnnnnnnnnnnnnnnnnnnnnnnnnnnnnnnnnnnnnnnnnnnnnnnnnnnnnnnnnnnnnnnnnnnnnnnnnnnnnnnnnnnnnnnnnnnnnnnnnnnnnnnnnnnnnnnnnnnnnnnnnnnnnnnnnnnnnnnnnnnnnnnnnnnnnnnnnnnnnnnnnnnnnnnnnnnnnnnnnnnnnnnnnnnnnnnnnnnnnnnnnnnnnnnnnnnnnnnnnnnnnnnnnnnnnnnnnnnnnnnnnnnnnnnnnnnnnnnnnnnnnnnnnnnnnnnnnnnnnnnnnnnnnnnnnnnnnnnnnnnnnnnnnnnnnnnnnnnnnnnnnnnnnnnnnnnnnnnnnnnnnnnnnnnnnnnnnnnnnnnnnnnnnnnnnnnnnnnnnnnnnnnnnnnnnnnnnnnnnnnnnnnnnnnnnnnnnnnnnnnnnnnnnnnnnnnnnnnnnnnnnnnnnnnnnnnnnnnnnnnnnnnnnnnnnnnnnnnnnnnnnnnnnnnnnnnnnnnnnnnnnnnnnnnnnnnnnnnnnnnnnnnnnnnnnnnnnnnnnnnnnnnnnnnnnnnnnnnnnnnnnnnnnnnnnnnnnnnnnnnnnnnnnnnnnnnnnnnnnnnnnnnnnnnnnnnnnnnnnnnnnnnnnnnnnnnnnnnnnnnnnnnnnnnnnnnnnnnnnnnnnnnnnnnnnnnnnnnnnnnnnnnnnnnnnnnnnnnnnnnnnnnnnnnnnnnnnnnnnnnnnnnnnnnnnnnnnnnnnnnnnnnnnnnnnnnnnnnnnnnnnnnnnnnnnnnnnnnnnnnnnnnnnnnnnnnnnnnnnnnnnnnnnnnnnnnnnnnnnnnnnnnnnnnnnnnnnnnnnnnnnnnnnnnnnnnnnnnnnnnnnnnnnnnnnnnnnnnnnnnnnnnnnnnnnnnnnnnnnnnnnnnnnnnnnnnnnnnnnnnnnnnnnnnnnnnnnnnnnnnnnnnnnnnnnnnnnnnnnnnnnnnnnnnnnnnnnnnnnnnnnnnnnnnnnnnnnnnnnnnnnnnnnnnnnnnnnnnnnnnnnnnnnnnnnnnnnnnnnnnnnnnnnnnnnnnnnnnnnnnnnnnnnnnnnnnnnnnnnnnnnnnnnnnnnnnnnnnnnnnnnnnnnnnnnnnnnnnnnnnnnnnnnnnnnnnnnnnnnnnnnnnnnnnnnnnnnnnnnnnnnnnnnnnnnnnnnnnnnnnnnnnnnnnnnnnnnnnnnnnnnnnnnnnnnnnnnnnnnnnnnnnnnnnnnnnnnnnnnnnnnnnnnnnnnnnnnnnnnnnnnnnnnnnnnnnnnnnnnnnnnnnnnnnnnnnnnnnnnnnnnnnnnnnnnnnnnnnnnnnnnnnnnnnnnnnnnnnnnnnnnnnnnnntttaagtaatatgcttatacaactatttcttgatgtatcagttttagacaatgtatcgtctgattcaaaaggtaatacaacatttaatgtgaaacatttagcgaatacagtaaagcacaaaggagaaaataaaattgttagcattctacccagagataatatcaattcatattttagtgtagatttttttaaagttcacatatactcttttttgtaaaatgagaatatttcctgagatactgctgtatttttcaattgctaatctgtattcttcaaatgaagtgagaattcc

SEQ ID NO: 29252 - DNA, 1862 bp, Macaca Mulatta
  misc_feature (1)...(1862): n = A,T,C or G
tctatgagatcttgaagagaacgacgtgnnnnnnnnnnnnnnnnnnnnnnnnnnnnnnnnnnnnnnnnnnnnnnnnnnnnnnnnnnnnnnnnnnnnnnnnnnnnnnnggagactacgagggtgaaaacgtggagttcaacgacagaaannnnnnnnnnnnnnnnnnnnnnnnnnnnnnnnnnnnnnnnnnnnnnnnnnnnnnnnnnnnnnnnnnnnnnnnnnnnnnnnnnnnnnnnnnnnnnnnnnnnnnnnnnnnnnnnnnnnnnnnnnnnnnnnnnnnnnnnnnnnnnnnnnnnnnnnnnnnnnnnnnnnnnnnnnnnnnnnnnnnnnnnnnnnnnnnnnnnnnnnnnnnnnnnnnnnnnnnnnnnnnnnnnnnnnnnnnnnnnnnnnnnnnnnnnnnnnnnnnnnnnnnnnnnnnnnnnnnnnnnnnnnnnnnnnnnnnnnnnnnnnnnnnnnnnnnnnnnnnnnnnnnnnnnnnnnnnnnnnnnnnnnnnnnnnnnnnnnnnnnnnnnnnnnnnnnnnnnnnnnnnnnnnnnnnnnnnnnnnnnnnnnnnnnnnnnnnnnnnnnnnnnnnnnnnnnnnnnnnnnnnnnnnnnnnnnnnnnnnnnnnnnnnnnnnnnnnnnnnnnnnnnnnnnnnnnnnnnnnnnnnnnnnnnnnnnnngactgacaaagtgaagctgacctggagagatcggttcccagcctacctcaccaacttggtctccatcatcttcatgnnnnnnnnnnnnnnnnnnnnnnnnnnnnnnnnnnnnnnnnnnnnnnnnnnnnnnnnnnnnnnnnnnnnnnnnnnnnnnnnnnnnnnnnnnnnnnnnnnnnnnnnnnnnnnnnnnnnnnnnnnnnnnnnnnnnnnnnnnnnnnnnnnnnnnnnnnnnnnnnnnnnnnnnnnnnnnnnnnnnnnnnnnnnnnnnnnnnnnnnnnnnnnnnnnnnnnnnnnnnnnnnnnnnnnnnnnnnnnnnnnnnnnnnnnnnnnnnnnnnnnnnnnnnnnnnnnnnnnnnnnnnnnnnnnnnnnnnnnnnnnnnnnnnnnnnnggtttgtcggacgcccgggcgactacgtgtacattttccgttccttccgaatggaaganagtgtgcgccaggaggctgcctgatggagctatgcatccagcttagcatcatcatgctggggaaacagttgatccagaacaacctgttcgagattggcannnnnnnnnnnnnnnnnnnnnnnnnnnnnnnnnnnnnnnnnnnnnnnnnnnnnnnnnnnnnnnnnnnnnnnnnnnnnnnnnnnnnnnnnnnnnnnnnnnnnnnnnnnnnnnnnnnnnnnnnnnnnnnnnnnnnnnnnnnnnnnnnnnnnnnnnnnnnnnnnnnnnnnnnnnnnnnnnnnnnnnnnnnnnnnnnnnnnnnnnnnnnnnnnnnnnnnnnnnnnnnnnnnnnnnnnnnnnnnnnnnnnnnnnnnnnnnnnnnnnnnnnnnnnnnnnnnnnnnnnnnnnnnnnnnnnnnnnnnnnnnnnnnnnnnnnnnnnnnnnnnnnnnnnnnnnnnnnnnnnnnnnnnnnnnnnnngccttcgtgatctccttcacgtctgacttcatcccgcgcctggtgtacctctacatgtacagtaagaacgggaccatgcatggcttcgtcaaccataccctctcctccttcaacgtcagcgacttccagaacggcacagcccccaatgaccccctggacctgggctacgaggtgcagatctgcaggtnnnnggtacaaagactaccgagagccaccgtggtcggaaaacaagtacgacatctccaaggacttctgggccgtcctggcagcccggctggcgttcgtcatcgtcttccag

SEQ ID NO: 29253 - DNA, 936 bp, Macaca Mulatta
  misc_feature (1)...(936): n = A,T,C or G
gggctttttcgttcttttagtaggtcgttactggctgtgagtgtctctagagtggtacgcgggtcccggtccgcgccagctccctgcgcgccttgtcgccatgcctcggaaaattgaggaaatcaaggactttctgctcacagcccgacgaaaggatgccaaatctgtcaagatcaagaaaaataaggacaatgtgaagtttaaagttcgatgcagcagatacctttacaccctggtcatcactgacaaagagaaggcagagaaactgaagcagtccctgccccctggtttggcagtgaaggaactgaaatgaaccagacacactgatttgaagtgtattaaaatactaaaaatcnnnnnnnnnnnnnnnnnnnnnnnnnnnnnnncacgagcgaggaccggtgcgccggcggactggacccacaacctacgtacgcgccccacgcgagtggcccccttaggaaaccggaaatttgtgagtaggaaatatctttcgggtgggcactcctgttttttcgcacacactnnnnnnnnnnnnnnnnnnnnnnnnnagaaaccagggctcttnnnnnnnnnnnnnnnnnnnaccgtgggcaaaaaacgccctcttcgtgagaaaaatcttttgtctcaagagaagaaaagcggcgtgcagatttctcccccgcggtagaaaacgccccccgccgaagaaaaacactcccccttccgaaacacccttgnggtttgtgggagagtcccccggccggcgcgtggcggggatcgggccccccttcggcgggctcctaacggaggggcgggggattaaacaagaagatctccctcgctacgcgctcaanatactcccgcccgcccgagtactgtgtgtcngaanagccgtacacggggggtttgcgccctcaacagacggagctcgcccgcgccccaaggggcggg

SEQ ID NO: 29254 - DNA, 855 bp, Macaca Mulatta
ggtatattgtttgtgaattattgagaaatgtaacattcaaatttctaaagttgtctgccaaaggcttattcattctggttttgtttgctgttgggtgtttgcggcagagttaaccatttttccatggtgtctttatactttactggtttgtgaattttatacaattgaaagtcttttttccttgctgctttcttctcttctcaagtttcccccgtttctactttattttttgttctaaccatttctactacagttttctccttatggacccatgctaggttgtacaaactttaaggacttgttaccatttgcagttaccataagtgctttatcttctctatgcacaggcttcaacttgactgttgtatgttagcatattttctatgcagcagttggtcaacttcaactcaaaacactgttttcttatgtttgttacaaagttaattttttgaaagtactctgtagcatgacaatttttagacctgcaggttagctattttagctcaagcttttttgtttggttttttcttcattttcttcacatctgaggtttctttctcttatccacctgaaattattgtgtgcctaaatttgggaaaagatctattctaattcattaaccccagttgaaattttaggtcctgcccctctaattaatcccggccgggaaaaggcaaaattcttttttacaaggggcccccccctttccatgcctggccccagactttgttcctggccctgcgccttcctggcgccgtaccaaggccttagaaccaaactgtcccttcgaccttttaccctccccacttcggtttttagcccccgcgctttacggtgagatcccccctcctgtac

SEQ ID NO: 29255 - DNA, 1016 bp, Macaca Mulatta
  misc_feature (1)...(1016): n = A,T,C or G
ccatcttctacaccgcagccatcctgggccccgctgctggctacctgatcggaggtgccctgctgaacatctacacggaagtgggccgacggnggacggagctgactaccgagagcccgctgtgggtcggtgcctggtgggtcggcttcctgggctccggggctgctgccttcttcaccgccgttcccatccttggttaccctcggcagctgccagncccagcgctacgcggtcatgacagtggcggaaatgcaccagttgaaggacggcagccacgggacggcgagcaacccagacttcgggaaaaccatcagagacctgcctctnnnnnnnnnnnnnnnnnnnnnnnnnnnnnnnnnnnnnnnnnnnnnnnnnnnnnnnnnnnnnnnnnnnnnnnnnnnnnnnnnnnnnnnnnnnnnnnnnnnnnnnnnnnnnnnnnnnnnnnnnnnnnnnnnnnnnnnnnnnnnnnnnnnnnnnnnnnnnnnnnnnnnnnnnnnnnnnnnnnnnnnnnnnnnnnnnnnnnnnnnnnnnnnnnnnnnnnnnnnnnnnnnnnnnnnnnnnnnnnnnnnnnnnnnnnnnnnnnnnnnnnnnnnnnnnnnnnnnnnnnnnnnnnnnnnnnnnnnnnnnnnnnnnnnnnnnnnnnnnnnnnnnnnnnnnnnnnnnnnnnnnnnnnnnnnnnnnnnnnnnnnnnnnnnnnnnnnnnnnnnnnnnnnnnnnnnnnnnnnnnnnnnnnnnnnnnnnnnnnnnnnnnnnnnnnnnnnnnnnnnnnnnnnnnnnnnnnnnnnnnnnnnnnnnnnnnnnnnnnnnnnnnnnnnnnnnnnnnnnnnnnnnnnnnnnnnnnnaggtgtaccgagactgtagctgtatccctcagaatgtttcctctggttttggccatgccactgcagggaaatgcacttcaacttgtcagagaaagcccctccttctggttttcatattcgttgtaattttctttacattcctcagcagcattcctgcactaacggcaactctac

SEQ ID NO: 29256 - DNA, 564 bp, Macaca Mulatta
cccaacccttctgtacttggctgctgttttaaagtttgcccttccccaaattgggatttttatgacagatttaaagctctttcgatcttataatgattaaatcagtactgcagtatttgattaaccaagcttatgcagattttgtgattcttgggacttttgtgaagtaagaaatacctctgttatttatgcatattcttcccgacagtgatttttccagcattattctgccatacacaaatagggcttttataaaatagaaaattaggcattctggtatttatatgctttgtgtgaaaccacggtgtaaaagcacagctggctgccttttactgcttgtgtagtcatgagtccattgtaatcatcacaattccaaaccaaactaccaataaagaaaacagacatccaccagcaagctctgttaggcttccatgttagtgtagcttctctcccacaagctgtcctcctaggacaagaattatcttaccaactatcaatcacactaccttgtatgccagcacctggtaacagtcgagatttttatacattaatctggatctgttt

SEQ ID NO: 29257 - DNA, 214 bp, Macaca Mulatta
  misc_feature (1)...(214): n = A,T,C or G
gatggcggatccagacctgttggaagagtcctcatccctcttggagccaagtgagatgggaagaggcacgcctttaagacttggngcttcgtggctggtgtcattaaccgggagcgtatccctacttttgagcgcatgctttggcgggtatgccggggaaatgtgttcctgcgacaggctgaaatcgagaaccccctggaggatcctgtgactg

SEQ ID NO: 29258 - DNA, 858 bp, Macaca Mulatta
ggggctccccgctggcgcgccggaccgcggtcatttacccgtgctcggggcacgcctggaagaactgctcacactctccacagcgtggtggttctgttgctcacaggacaacttgcctttgctgattttgaagagagttgtgctatgatgtggcaaaagtatccaggaagcaggcagtcaattcctctgggaataaaggtccttttcagcggtgtgttcggtgctgggggctttgcccttgtgtattacctcatacaaaagtttcattccaggagtttatattacaagttggcagtggagcagctgcagagccatcccgaggcacaggaagctctgggccctcctctcaacatccattatctcaagctcaccgatagggaaaacttcgtggacattgctgatgccaagttgaagattcctgtctctggatccaagtcagagggccttctctacgtccactcctccagaggtggcccctttcagaggtggcaccttgacgaggtctttttagagctcaaggatggtcagcagattcctgtgttcaagctcagtggggaaaacggtgacgaagtgaaaaaggagtagagacgacccagaagaaccagcagacccagcgtgcttctagtccatccttccctcatctctaccatatgcccactgggggtggtggcccaatctgagtggcagacactcctgcaaccctagtttttccagccaccaagcgggaatgaattgttatgtggccaccacatggtaaattttggtaataaatcccaaacttgggtcaacaacgaaatgctaatttggtccattttttaaacctgaaatcccgaaaagaaaacccccctatttacaaat

SEQ ID NO: 29259 - DNA, 239 bp, Macaca Mulatta
aagctgaaaatgaaactattttagtagaagaaaagtatagtttctaatcatctataattttaaaatgcaaagcctataaaactttcaagatgttttgcctatttgttttttaatatttataataattttctgtctttagcaagtaactattgttaagccaggtaacttctgtatttgaactgtattttactctcagaccctcatcctgcctagaaatgagtaataaataattactctgt

SEQ ID NO: 29260 - DNA, 75 bp, Macaca Mulatta
tagacatgtcctagataacccaactcctgagatggaagcagcaagacgttccctgtgctttagactggagcaagg

SEQ ID NO: 29261 - DNA, 784 bp, Macaca Mulatta
  misc_feature (1)...(784): n = A,T,C or G
gggagctgcgattgagggccactcgtttgggccagagctgtggttatctccttagctactaaccaagtgaactcgcttatgtagcagttactatgtgccagtaactgggctgtggtgtcatttcccttaatcctctccaaagctctatgaggttcatcggtgtgactgtccttggaattcaaagggatgctgctctctttacaatctgtaagtcgcctgtggtgatcttcactaagcaacaatacaatggttccgccaacatgaagcactctnnnnnnnnnnnnnnnnnntgcggaatcacgagccaagtaaacctgttttctttacaagctgtccagcctccagtactccttcatagcaacagaaaatggacaaagacaacaacaaataataaaggatgattcaagaacatgaaaaaaatttagttttaaaataccagttgttttgaagaaagaaaaactgccctatttttcctacttccaggagaaaaacgggtaaaaatttcctaaacctcaggattatggccccaagatactttcttccaaagggatttatgggccttcaagatgtcttttcatgcatatatttaaactaaagaccagattcattgcgcacttttataaaatgagcatatccttcntcccctattttgtccttggtcnnttcngctgnntatnncttcatgnccccagttatgatattcagattctgtctctacgtatccccatatgtcaatactcatagtaaatctcttaccaaaactttgtttatttccccatctcat

SEQ ID NO: 29262 - DNA, 159 bp, Macaca Mulatta
agggaaacaaattccatggttgaagaatttatgttacttgccaatatttctgttgcaaaaaaaattcacgaggaattttctgaacatgctctgcttcgaaaacatcctgctccacctccgtcaaattatgaaattcttgttaaggcagctaggtcaagg

SEQ ID NO: 29263 - DNA, 676 bp, Macaca Mulatta
gtaaatggaaacataaccctctcttatggatatgggaaaggtctgtggctgtgttaaggggacttttaaatgcagtgactggttcctatcatagataatgataactgcagtcacatctggtgtccaattttcacagtgcactttcttttatttgaggagacaaggtaataaatgtgtaattgcttggggttaaaaagaataaaagccttttctatcttcaagtccagagaggcattcaccctgtctcctcattcctaaagcttctaagtgcatgttttgggatcatttggttctcagctgcatttccgtagggtatgaagcacagcctctacttgctttattaaagtagtaattcctccttcaccaggaagatatcgcagcacattgcaaagtctctgacacctttccctttccagtgtcattaaatgagtaagtgttacacgttttctcttaggagagtagctttaccctcccctccctccccttctactcaacctggtgactcatctctccgattgcaaagagcaagacacgccactccgccttcaacgccaaagcggggatctgctggggcacagtatgcaatttaaggaaaacccccaaaggctacaggcgacctgctgatcaggaaagaatttcgctcttgtcaagtacatcatccttcatgaccactaac

SEQ ID NO: 29264 - DNA, 225 bp, Macaca Mulatta
acggtaagtgtggctccccaaggggatggcgcagggcaggagggccatgggttccccgaccccagactaagggggcactaggggaggggccaagtcatgtgaagagggagccctctcagacagtcgaatgtgctggtcccactaaggaaaccaccccaccctctccaacttcctgcctgaaaatgggccctggagctcacagacagggcaggattgtgcagggaa

SEQ ID NO: 29265 - DNA, 1347 bp, Macaca Mulatta
  misc_feature (1)...(1347): n = A,T,C or G
ctgggtttcatctcctccttgattttgagtagttccctccatgagaactgacttccacctgttcaccaagggaaacaaggtggtcctcacactggaaatgagaaaggatgacagtttttgagactgactgttaacggctcagaggtacccttcattcaaaatgccttttaaagcatttgataccttcaaagaaaaaattctgaaacctgggaaggaaggagtgaagaacgccgtgggagattctttgggaattttacaaagnnnnnnnnnnnnnnnnnnnnnnnnnnnnnnnnnnnnnnnnnnnnnnnnnnnnnnnnnnnnnnnnnnnnnnnnnnnnnnnnnnnnnnnnnnnnnnnnnnnnnnnnnnnnnnnnnnnnnnnnnnnnnnnnnnnnnnnnnnnnnnnnnnnnnnnnnnnnnnnnnnnnnnnnnnnnnnnnnnnnnnnnnnnnnnnnnnnnnnnnnnnnnnnnnnnnnnnnnnnnnnnnnnnnnnnnnnnnnnnnnnnnnnnnnnnnnnnnnnnnnnnnnnnnnnnnnnnnnnnnnnnnnnnnnnnnnnnnnnnnnnnnnnnnnnnnnnnnnnnnnnnnnnnnnnnnnnnnnnnnnnnnnnnnnnnnnnnnnnnnnnnnnnnnnnnnnnnnnnnnnnnnnnnnnnnnnnnnnnnnnnnnnnnnnnnnnnnnnnnnnnnnnnnnnnnnnnnnnnnnnnnnnnnnnnnnnnnnnnnnnnnnnnnnnnnnnnnnnnnnnnnnnnnnnnnnnnnnnnnnnnnnnnnnnnnnnnnnnnnnnnnnnnnnnnnnnnnnnnnnnnnnnnnnnnnnnnnnnnnnnnnnnnnnnnnnnnnnnnnnnnnnnnnnnnnnnnnnnnnnnnnnnnnnnnnnnnnnnnnnnnnnnnnnnnnnnnnnnnnnnnnnnnnnnnnnnnnnnnnnnnnnnnnnnnnnnnnnnnnnnnnnnnnnnnnnnnnnnnnnnnnnnnnnnnnnnnnnnnnnnnnnnnnnnnnnnnnnnnnnnnnnnnnnnnnnnnnnnnnnnnnnnnnnnnnnnnnnnnnnnnnnnnnnnnnnnnnnnnnnnnnnnnnnnnnnnnnnnnnnnnnnnnnnnnnnnnnnnnnnnnnnnnnnnnnnnnnnnnnnnnnnnnnnnnnnnnnnnnnnnnnnnnnnnnnnnnnnnnnnnnnnnnnnnnnnnnnnnnnnnnnnnnnnnnnnnnnnnnnnnnnnnnnnnnaggtgggtctcttgtcagcagtcccacacatggttatgacaatcgttgtacctattggaggacaactggctgattatttaagaagcagacaaattttgaccacaactgctgtcagaaaaatcatgaactgtggagg

SEQ ID NO: 29266 - DNA, 128 bp, Macaca Mulatta
aggagtgggcagacgcctgctgcaggggactccggagcgtccatgcctacatcctggtctacgacatctgctgctttgacagctttgagtacgtcaagaccatccgccagcagatcctggagacgagg

SEQ ID NO: 29267 - DNA, 424 bp, Macaca Mulatta
  misc_feature (1)...(424): n = A,T,C or G
ggacctgacatcagtggatacccaaagcaaggaaagggaaatagaaacctacaagagagtccagatgatagaatctgcctacaagaaatcagcaatttgtcataaaactttggagaatattgaaagaacgaaacacctgaaaacattaccgatggttcctttcaaaaccaaagattctcccggagttttctccaaacttggtgttctcctgaggnaggagagtgacaagaaacttggtgagaaataagctggcagtgatgatgcgtctccttcagaatctgaccatgggtttgttcctcctcttcttcgttctgcgggtccagaacaatgtgctaaatggtgctatccaggaccgcgtgggtctcctttacatgtttgtgggctccaccccgtacacaggcatgctcaatgctgtgaatctgtn

SEQ ID NO: 29268 - DNA, 99 bp, Macaca Mulatta
caggatttctacagtcatagcaactgggtggagctgggtgagcagcagccacaccctcacctcctctggccaagacaggagctccagaacctggcacaa

SEQ ID NO: 29269 - DNA, 3432 bp, Macaca Mulatta
  misc_feature (1)...(3432): n = A,T,C or G
ggcaatgctggctaccggcttcctctccctgccagtttcccggcagtcttgcccatcggggagcagccccccgaagggcagtggcaacatcgagcagaggtacagattgcccgaaagcttcagtgcatagcagaccagttccaccggctccatgtgcagcannnnnnnnnnnnnnnnnnnnnnnnnnnnnnnnnnnnnnnnnnnnnnnnnnnnnnnnnnnnnnnnnnnnnnnnnnnnnnnnnnnnnnnnnnnnnnnnnnnnnnnnnnnnnnnnnnnnnnnnnnnnnnnnnnnnnnnnnnnnnnnnnnnnnnnnnnnnnnnnnnnnnnnnnnnnnnnnnnnnnnnnnnnnnnnnnnnnnnnnnnnnnnnnnnnnnnnnnnnnnnnnnnnnnnnnnnnnnnnnnnnnnnnnnnnnnnnnnnnnnnnnnnnnnnnnnnnnnnnnnnnnnnnnnnnnnnnnnnnnnnnnnnnnnnnnnnnnnnnnnnnnnnnnnnnnnnnnnnnnnnnnnnnnnnnnnnnnnnnnnnnnnnnnnnnnnnnnnnnnnnnnnnnnnnnnnnnnnnnnnnnnnnnnnnnnnnnnnnnnnnnnnnnnnnnnnnnnnnnnnnnnnnnnnnnnnnnnnnnnnnnnnnnnnnnnnnnnnnnnnnnnnnnnnnnnnnnnnnnnnnnnnnnnnnnnnnnnnnnnnnnnnnnnnnnnnnnnnnnnnnnnnnnnnnnnnnnnnnnnnnnnnnnnnnnnnnnnnnnnnnnnnnnnnnnnnnnnnnnnnnnnnnnnnnnnnnnnnnnnnnnnnnnnnnnnnnnnnnnnnnnnnnnnnnnnnnnnnnnnnnnnnnnnnnnnnnnnnnnnnnnnnnnnnnnnnnnnnnnnnnnnnnnnnnnnnnnnnnnnnnnnnnnnnnnnnnnnnnnnnnnnnnnnnnnnnnnnnnnnnnnnnnnnnnnnnnnnnnnnnnnnnnnnnnnnnnnnnnnnnnnnnnnnnnnnnnnnnnnnnnnnnnnnnnnnnnnnnnnnnnnnnnnnnnnnnnnnnnnnnnnnnnnnnnnnnnnnnnnnnnnnnnnnnnnnnnnnnnnnnnnnnnnnnnnnnnnnnnnnnnnnnnnnnnnnnnnnnnnnnnnnnnnnnnnnnnnnnnnnnnnnnnnnnnnnnnnnnnnnnnnnnnnnnnnnnnnnnnnnnnnnnnnnnnnnnnnnnnnnnnnnnnnnnnnnnnnnnnnnnnnnnnnnnnnnnnnnnnnnnnnnnnnnnnnnnnnnnnnnnnnnnnnnnnnnnnnnnnnnnnnnnnnnnnnnnnnnnnnnnnnnnnnnnnnnnnnnnnnnnnnnnnnnnnnnnnnnnnnnnnnnnnnnnnnnnnnnnnnnnnnnnnnnnnnnnnnnnnnnnnnnnnnnnnnnnnnnnnnnnnnnnnnnnnnnnnnnnnnnnnnnnnnnnnnnnnnnnnnnnnnnnnnnnnnnnnnnnnnnnnnnnnnnnnnnnnnnnnnnnnnnnnnnnnnnnnnnnnnnnnnnnnnnnnnnnnnnnnnnnnnnnnnnnnnnnnnnnnnnnnnnnnnnnnnnnnnnnnnnnnnnnnnnnnnnnnnnnnnnnnnnnnnnnnnnnnnnnnnnnnnnnnnnnnnnnnnnnnnnnnnnnnnnnnnnnnnnnnnnnnnnnnnnnnnnnnnnnnnnnnnnnnnnnnnnnnnnnnnnnnnnnnnnnnnnnnnnnnnnnnnnnnnnnnnnnnnnnnnnnnnnnnnnnnnnnnnnnnnnnnnnnnnnnnnnnnnnnnnnnnnnnnnnnnnnnnnnnnnnnnnnnnnnnnnnnnnnnnnnnnnnnnnnnnnnnnnnnnnnnnnnnnnnnnnnnnnnnnnnnnnnnnnnnnnnnnnnnnnnnnnnnnnnnnnnnnnnnnnnnnnnnnnnnnnnnnnnnnnnnnnnnnnnnnnnnnnnnnnnnnnnnnnnnnnnnnnnnnnnnnnnnnnnnnnnnnnnnnnnnnnnnnnnnnnnnnnnnnnnnnnnnnnnnnnnnnnnnnnnnnnnnnnnnnnnnnnnnnnnnnnnnnnnnnnnnnnnnnnnnnnnnnnnnnnnnnnnnnnnnnnnnnnnnnnnnnnnnnnnnnnnnnnnnnnnnnnnnnnnnnnnnnnnnnnnnnnnnnnnnnnnnnnnnnnnnnnnnnnnnnnnnnnnnnnnnnnnnnnnnnnnnnnnnnnnnnnnnnnnnnnnnnnnnnnnnnnnnnnnnnnnnnnnnnnnnnnnnnnnnnnnnnnnnnnnnnnnnnnnnnnnnnnnnnnnnnnnnnnnnnnnnnnnnnnnnnnnnnnnnnnnnnnnnnnnnnnnnnnnnnnnnnnnnnnnnnnnnnnnnnnnnnnnnnnnnnnnnnnnnnnnnnnnnnnnnnnnnnnnnnnnnnnnnnnnnnnnnnnnnnnnnnnnnnnnnnnnnnnnnnnnnnnnnnnnnnnnnnnnnnnnnnnnnnnnnnnnnnnnnnnnnnnnnnnnnnnnnnnnnnnnnnnnnnnnnnnnnnnnnnnnnnnnnnnnnnnnnnnnnnnnnnnnnnnnnnnnnnnnnnnnnnnnnnnnnnnnnnnnnnnnnnnnnnnnnnnnnnnnnnnnnnnnnnnnnnnnnnnnnnnnnnnnnnnnnnnnnnnnnnnnnnnnnnnnnnnnnnnnnnnnnnnnnnnnnnnnnnnnnnnnnnnnnnnnnnnnnnnnnnnnnnnnnnnnnnnnnnnnnnnnnnnnnnnnnnnnnnnnnnnnnnnnnnnnnnnnnnnnnnnnnnnnnnnnnnnnnnnnnnnnnnnnnnnnnnnnnnnnnnnnnnnnnnnnnnnnnnnnnnnnnnnnnnnnnnnnnnnnnnnnnnnnnnnnnnnnnnnnnnnnnnnnnnnnnnnnnnnnnnnnnnnnnnnnnnnnnnnnnnnnnnnnnnnnnnnnnnnnnnnnnnnnnnnnnnnnnnnnnnnnnnnnnnnnnnnnnnnnnnnnnnnnnnnnnnnnnnnnnnnnnnnnnnnnnnnnnnnnnnnnnnnnnnnnnnnnnnnnncggtggaggctttgtggcttgctgagggtgggggttgggagagggcctggaaagctccctcctcgtggaagaaatgcctgggaggcagggaagcctgatattcggggtcaaaacagtcctaccaattcgcggcgcccaagcaggggtttctagaagttggtggacagatctggtgagggaactccccaggccagacgtcggactcctgcagtgagggtggaggactcagcctggcctctgcctggcctgtttcaaagtccgggccactggnctggcagcctcctcttgctcagtctgaggtggaaaaggatcacctcccagtgaggctccctcagcccccggggagcaggtctgtgttcaaagctatgtggcaggcttgtttcaagggccagaggggcccagctgccccgtctctgcccctggcagcccagccccatcgcaggtggctcctgcctgggggttgttcggga

SEQ ID NO: 29270 - DNA, 659 bp, Macaca Mulatta
  misc_feature (1)...(659): n = A,T,C or G
ggtatgtgatcgaatgtcctaactgtggcgtggtctatcgtagtcggcagtactggtttggaaaccaagatcctgtggatacggtggtgcggacagagattgtgcacgtgtggcctggnnnnnnnnnnnnnnnnnnnnnnnnnnnnnnnnnnnnnnnnnnnnnnnnnnnnnnnnnnnnnnnnnnnnnnnnnnnnnnnnnnnnnnnnnnnnnnnnnnnnnnnnnnnnnnnnnnnnnnnnnnnnnnnnnnnnnnnnnnnnnnnnnnnnnnnnnnnnnnnnnnnnnnnnnnnnnnnnnnnnnnnnnnnnnnnnnnnnnnnnnnnnnnnnnnnnnnnnnnnnnnnnnnnnnnnnnnnnnnnnnnnnnnnnnnnnnnnnnnnnnnnnnnnnnnnnnnnnnnnnnnnnnnnnnnnnnnnnnnnnnnnnnnnnnnnnnnnnnnnnnnnnnnnnnnnnnnnnnnnnnnnnnnnnnnnnnnnnnnnnnnnnnnnnnnnnnnnnnnnnnnnnnnnnnnnnnnnnnnnnnnnnnnnnnnnnnnnnnnnnnnnnnnnnnnnnnnnnnnnnnnnnnnnnnnnnnnnnnnnnnnnnggtctggtcaaggacgcggccaggcctgcgtactgggtgcctgaccacgaaatcctgcactgccacaactgccggaa

SEQ ID NO: 29271 - DNA, 179 bp, Macaca Mulatta
gacgtaccccgaaaaaggaaactggttcccttggattatggtgaagatgataaaaatgcagccaaaggcactgtaaacactgaagaaaagcgtaaacacattaagagtctcattgagaaaatccctacagccaaacctgagctcttcgcttatcccctggattggtctattgtggattc

SEQ ID NO: 29272 - DNA, 691 bp, Macaca Mulatta
tccctgccttacaccttcttgcagaagatggacagaaacaaggatggcgtggtgaccattgagtaattccttgagtcttgtcaaaaggtacagctccctgccctcgacattaccctgacctggactcaggcctgatttagtaatgtagggaaaaacttctttgggcagaataccacctccccatctcacccccacatttcaatcctattcctttgtgggaggcttaccccttccctacctcaggtctctctgggcatctccttcctctgtgcctttgaatgtccccatctgtgactcagtgtccctctccctgtctctgataagctccttctctttctgtctcttcaatctgcctcgctcacaccatggccacaggatgagaacatcatgaggtccatgcagctctttgacaatgtcatctagcccccaggagagggggtcagtgtttcctggggggaccatgctctaaccctagtccaggtggacctcacccttctcttcccaggtctatccttgtcctaggcctccctgggggctggagggatccaagagcttggggattcagtagtccagatctctggagctgaaggggccagagagtgggcagagtgcatcttggggggtgttcccaactcccaccagctctcacccgcttcctgcctgacacccagtgttgagagtgcccctcctg

SEQ ID NO: 29273 - DNA, 2937 bp, Macaca Mulatta
  misc_feature (1)...(2937): n = A,T,C or G
agttggttaccacagagaagcgcttcctcaaagacagtttgtacaatgaaggaatcctaatcgtatgggacccatctgtataccattcagatatcccaaagnnnnnnnnnnnnnnnnnnnnnnnnnnnnnnnnnnnnnnnnnnnnnnnnnnnnnnnnnnnnnnnnnnnnnnnnnnnnnnnnnnnnnnnnnnnnnnnnnnnnnnnnnnnnnnnnnnnnnnnnnnnnnnnnnnnnnnnnnnnnnnnnnnnnnnnnnnnnnnnnnnnnnnnnnnnnnnnnnnnnnnnnnnnnnnnnnnnnnnnnnnnnnnnnnnnnnnnnnnnnnnnnnnnnnnnnnnnnnnnnnnnnnnnnnnnnnnnnnnnnnnnnnnnnnnnnnnnnnnnnnnnnnnnnnnnnnnnnnnnnnnnnnnnnnnnnnnnnnnnnnnnnnnnnnnnnnnnnnnnnnnnnnnnnnnnnnnnnnnnnnnnnnnnnnnnnnnnnnnnnnnnnnnnnnnnnnnnnnnnnnnnnnnnnnnnnnnnnnnnnnnnnnnnnnnnnnnnnnnnnnnnnnnnnnnnnnnnnnnnnnnnnnnnnnnnnnnnnnnnnnnnnnnnnnnnnnnnnnnnnnnnnnnnnnnnnnnnnnnnnnnnntaggggcctctgtcagcaagagcactggcggcttcaggagcctgtggtcaagaaatcaggtccagccttctctgtagccaggcagtttatgagcccagagcttcccgccacacacttgcacacatgtctagcattctttccagacagcaacctccccaccttccaccgtggtagatgcaagatctgcctcccccatcagggctgccaaagctgggctttgtttttcccaacagaatgatgccattctcacaaaccaaagctctatattgcttgaagtctgcatctaaatattgatttcatgttttaaagaaattctcccaaattacaattgtgcccaatggagggtggctctggggggcaagtacgtggtacaggggattggaaacatgctccacgcatccagaaaaaaagttgcttctgaggtccatgcccctggaacatgttcctatcactctggctggttaggctggcccttagactgggtgcttgtgagcaaaggggccttggttagcccactttccctctccatgtggagacggaaggtagagaagggtacagtgtctgtcctcgagttgctacagttcagtgagagaggcagacatgtgaacaggcagataggattcagtgtgctcagtgcactggggatctgtagagagatgggcttgctctctgtgcacccaggagggccacgcacttaaactgtgtgtgtggatcagagaaggctttagagcacagcaggcactcagatgagtcttagaggaagagaagatacatggcaagcagattacatctgagccatttgagttgcatttttctttcttcccatatttactttctaagatctacctgaacttagagacccaagatatttttttaggaaacctcctacccatgtctgaggtagcaagtgcagcctcatgacacatacnnnnnnnnnnnnnnnnnnnnnnnnnnnnnnnnnnnnnnnnnnnnnnnnnnnnnnnnnnnnnnnnnnnnnnnnnnnnnnnnnnnnnnnnnnnnnnnnnnnnnnnnnnnnnnnnnnnnnnnnnnnnnnnnnnnnnnnnnnnnnnnnnnnnnnnnnnnnnnnnnnnnnnnnnnnnnnnnnnnnnnnnnnnnnnnnnnnnnnnnnnnnnnnnnnnnnnnnnnnnnnnnnnnnnnnnnnnnnnnnnnnnnnnnnnnnnnnnnnnnnnnnnnnnnnnnnnnnnnnnnnnnnnnnnnnnnnnnnnnnnnnnnnnnnnnnnnnnnnnnnnnnnnnnnnnnnnnnnnnnnnnnnnnncttgcaagtgagcaacatcaggctctctgagcagaggctggcccactgtggttcgcaaacacgctctccagatggttttaccaagtcccctctccctgatagggaatcctgctggaccagcgcagccctggtgtggagaggttaaaagacttgcacaagatcagcaagtcatgctgtagagccagnnnnntagagccagggctctgcactctcaaggctggccccatgtgctcaaggggatctaacatttgggctccaaaccaacgatctcggagctgggatccttatttactgccaaaccctcatcttacgtagctagaaagggccctggagtgagaaggcctggattttcaaactgatgctcccctatgactagctgtgccactgtgggcaaatgctgttcgttgagcctctgtttccacacctgtaaagtggcgatgatgaccctgtctcacagtgctgttgtgaggattacaggaaagcccctgtcctggctctgtacctggcacatagtaggtgctcagttcatgctggtttccttcctgccttcagtagggacctgctctgtgctcagacctcggctgcatgcaccctgctgtgacggaggctagtggggaagaggtcctgttctcagggaattaactgtcttattgggagacaacaattgccctccttggaatacccaagaaaccttgcaaaacggtggacaacacagagcacgccctcctcctcgctgcctgcagctccagtctgattctgcctgggaatgagcagagcacgtgggctgcttcactgctgtataggacaagccctttaccccaatctgggcccatgaattcctggcttggtttatgttctgatttgacacactcatttgaatcttcgaatcatgaccactgagcgcagaagaggtggcattctgacagcaggacatacatgttggtgtggagactgggacgaaagctgggtagaatctagtttttaattattattaatataaaggatcaaattaatttaaatgtgattctgaagtcta

SEQ ID NO: 29274 - DNA, 1730 bp, Macaca Mulatta
  misc_feature (1)...(1730): n = A,T,C or G
atggaggcggcgcgcacggagcgccccgcaggctggccgggggcgccgcttgtccggacggggctcctactcctgtcgacgtgaataaaaaccggcgccgagatcacttgggacgcgacaggcggtcccgggcgcccggcagccccggcttcgtggccaccggcgttgtctccactctcgtcgcgggcagtggcaagccagtggccggaggagctggcgaaggcgcggagagccgccgtgctggggcgccgggccggaccagagctgctgccccagcagggcggcggcagaagcggtgagatgcaggtggaagccggagggacgtcgccggcannnnnnnnnnnnnnnnnnnnnnnnnnnnnnnnnnnnnnnnnnnnnnnnnnnnnnnnnnnnnnnnnnnnnnnnnnnnnnnnnnnnnnnnnnnnnnnnnnnnnnnnnnnnnnnnnnnnnnnnnnnnnnnnnnnnnnnnnnnnnnnnnnnnnnnnnnnnnnnnnnnnnnnnnnnnnnnnnnnnnnnnnnnnnnnnnnnnnnnnnnnnnnnnnnnnnnnnnnnnnnnnnnnnnnnnnnnnnnnnnnnnnnnnnnnnnnnnnnnnnnnnnnnnnnnnnnnnnnnnnnnnnnnnnnnnnggtcatacttatcctgacgaagctatatgacttcaacctgggcagcgtgactgagagttcactttggaggnnnnnnnnnnnnnnnnnnnnnnnnnnnnnnnnnnnnnnnnnnnnnnnnnnnnnnnnnnnnnnnnnnnnnnnnnnnnnnnnnnnnnnnnnnnnnnnnnnnnnnnnnnnnnnnnnnnnnnnnnnnnnnnnnnnnnnnnnnnnnnnnnnnnnnnnnnnnnnnnnnnnnnnnnnnnnnnnnnnnnnnnnnnnnnnnnnnnnnnnnnnnnnnnnnnnnnnnnnnnnnnnnnnnnnnnnnnnnnnnnnnnnnnnnnnnnnngctctacagctccatggattttggaagacggtggcaactcatgcatgaacgcatcacacccaacaggttttattggtnnnnnnnnnnnnnnnnnnnnnnnnnnnnnnnnnnnnnnnnnnnnnnnnnnnnnnnnnnnnnnnnnnnnnnnnnnnnnnnnnnnnnnnnnnnnnnnnnnnnnnnnnnnnnnnnnnnnnnnnnnnnnnnnnnnnnnnnnnnnnnnnnnnnnnnnnnnnnnnnnnnnnnnnnnnnnnnnnnnnnnnnnnnnnnnnnnnnnnnnnnnnnnnnnnnnnnnnnnnnnnnnnnnnnnnnnnnnnnnnnnnnnnnnnnnnnnnnnnnnnnnnnnnnnnnnnnnnnnnnnnnnnnnnnnnnnnnnnnnnnnnnnnnnnnnnnnnnnnnnnnnnnnnnnnnnnnnnnnnnnnnnnnnnnnnnnnnnnnnnnnnnnnnnnnnnnnnnnnnnnnnnnnnnnnnnnnnnnnnnnnnnnnnnnnnnnnnnnnnnnnnnnnnnnnnnnnnnnnnnnnnnnnnnnnnnnnnnnnnnnnnnnnnnnnnnnnnnnnnnnnnnnnnnnnnnnnnnnnnnnnnnnnnnnnnnnnnnnnnnnnnnnnnnnnnnnnnnnnnnnnnnnnnnnnnnnnnnnnnnnnnnnnnnnnnnnnnnnnnnnnnnnnnnnnnnnnnnnncccttctgttccttacatctgcacctgcagctctctgaaaatccatattcctcaggaagaatctctagcaaggagacagccccaggacttgtggtggctacagg

SEQ ID NO: 29275 - DNA, 458 bp, Macaca Mulatta
ccattattaaaacatagtcttgcacactaagtgccttctatctgtcaactccttctgataggtagaaggacttctatgaagttttctttctaatactagcagatgagatatcttacatcttgcatcctgggttgcatttcagaccagtgggtttgtttcttgttttttcttgttgagatttttatttctctttgccttttaaaaaggacaagatgacatttaagagcaagtaattgcatccgtgtaaagcttctcctacagttttaaagaatcttataactttgtaatccttaattcagctttatgtatgtatgaattatataccctgcagaaatgatctgttttcactgatctgaactgagattaaggaaaatctggtaggacttctttaaaaataaggtagatttataaattcatttttctagttttattgtttattattccttttcttaaaagga

SEQ ID NO: 29276 - DNA, 286 bp, Macaca Mulatta
ccttaggaaaagtttcattcagatccttggttgaatatagttaaaggagcatagtattgacctaattcttcatgtaggaaacctgaaatgaacacagtcacagtttgattaaaacattgtcctgtttattgcaacagaaaacttgaatagttttaacaacaggaaacacttgtaggactttctttaacaacatactttttaaatgttttgctattggttacatatttatttagatttataagtgccaataaagcaaatgtttgatgcctcaattcattttgcacgg

SEQ ID NO: 29277 - DNA, 732 bp, Macaca Mulatta
  misc_feature (1)...(732): n = A,T,C or G
ggcaccagcactgttaggaatcagagaccctcgctctgaatacgataggacccagccacctatgcagtattacaatagccaaggggatgccacacataaaggcctgtaccctggtaagacgccagttgggtgtgtgatacagtctcttgaaaagccgcatttgcaggcactcggccagtggcctgggaagtagcctgtgcttgtattgagacggtcccccagcagcaaaccatgttccagtcattccctttcctactttggggattgttgccttttctgcttgtttaaagtaaaacaagcatgtacttgtatgtatgtatgtatgtatgtatgtagctgtacggtggccacaaataaaaagagggctgtatccaaataaatcatttctggctgctcactggcacagttcctttgctccgtcccctcctgccttgagcagtctctgtgttttccacatgcatcagaaccctcagcccggtgttgctttgcacgggctacgtcttctagacaggcccatctcttaacttcaaaccagagattggagatcaatttcatttacattttcatggagaagagtttgaataaatagcagaaggtataatgtgattcttctcaaagtgattattttttaagactaacaaaaagtatggtacataggggttaatatttnttatatccctgttccagaaagctgtggccttccaattttatttgaaaggatcccagccccaa

SEQ ID NO: 29278 - DNA, 1853 bp, Macaca Mulatta
  misc_feature (1)...(1853): n = A,T,C or G
gatcctcagctacaatgccctgcagtgcatcccgcctctggctttccagggactccgctccctgcgcctgctgnnnnnnnnnnnnnnnnnnnnnnnnnnnnnnnnnnnnnnnnnnnnnnnnnnnnnnnnnnnnnnnnnnnnnnnnnnnnnnnnnnnnnnnnnnnnnnnnnnnnnnnnnnnnnnnnnnnnnnnnnnnnnnnnnnnnnnnnnnnnnnnnnnnnnnnnnnnnnnnnnnnnnnnnnnnnnnnnnnnnnnnnnnnnnnnnnnnnnnnnnnnnnnnnnnnnnnnnnnnnnnnnnnnnnnnnnnnnnnnnnnnnnnnnnnnnnnnnnnnnnnnnnnnnnnnnnnnnnnnnnnnnnnnnnnnnnnnnnnnnnnnnnnnnnnnnnnnnnnnnnnnnnnnnnnnnnnnnnnnnnnnnnnnnnnnnnnnnnnnnnnnnnnnnnnnnnnnnnnnnnnnnnnnnnnnnnnnnnnnnnnnnnnnnnnnnnnnnnnnnnnnnnnnnnnnnnnnnnnnnnnnnnnnnnnnnnnnnnnnnnnnnnnnnnnnnnnnnnnnnnnnnnnnnnnnnnnnnnnnnnnnnnnnnnnnnnnnnnnnnnnnnnnnnnnnnnnnnnnnnnnnnnnnnnnnnnnnnnnnnnnnnnnnnnnnnnnnnnnnnnnnnnnnnnnnnnnnnnnnnnnnnnnnnnnnnnnnnnnnnnnnnnnnnnnnnnnnnnnnnnnnnnnnnnnnnnnnnnnnnnnnnnnnnnnnnnnnnnnnnnnnnnnnnnnnnnnnnnnnnnnnnnnnnnnnnnnnnnnnnnnnnnnnnnnnnnnnnnnnnnnnnnnnnnnnnnnnnnnnnnnnnnnnnnnnnnnnnnnnnnnnnnnnnnnnnnnnnnnnnnnnnnnnnnnnnnnnnnnnnnnnnnnnnnnnnnnnnnnnnnnnnnnnnnnnnnnnnnnnnnnnnnnnnnnnnnnnnnnnnnnnnnnnnnnnnnnnnnnnnnnnnnnnnnnnnnnnnnnnnnnnnnnnnnnnnnnnnnnnnnnnnnnnnnnnnnnnnnnnnnnnnnnnnnnnnnnnnnnnnnnnnnnnnnnnnnnnnnnnnnnnnnnnnnnnnnnnnnnnnnnnnnnnnnnnnnnnngggatgcccgtggacgtcaactcagctgccttccgcctgtggcagatcctcaatggcactggcttccatggctgcatccgaaacctatacatcaacaacgagctgcaggacttcaccaagactcagatgaagccgggcgtggtgccaggctgcgaaccctgcctcaagctctactgcctgcatggcatctgccagcccaacgccaccccggggcccatgtgccactgcgaggccggctgggtgggcctgcactgtgaccagcctgctgatggcccctgccatggccacaagtgngtgtgtccatgggcaatgtgtgcccctcgacgctctttcctacagctgccagtgccaggatgggtactcgggggcnnnnnnnnnnnnnnnnnnnnnnnnnnnnnnnnnnnnnnnnnnnnnnnnnnnnnnnnnnnnnnnnnnnnnnnnnnnnnnnnnnnnnnnnnnnnnnnnnnnnnnnnnnnnnnnnnnnnnnnnnnnnnnnnnnnnnnnnnnnnnnnnnnnnnnnnnnnnnnnnnnnnnnnnnnnnnnnnnnnnnnnnnnnnnnnnnnnnnnntgccagaccacgcgccccctgtcatgggtggagtgccggggctcgtgcccaggccagggctgctgccagggctttcggctgaagcggaggaagttcacctttgagtgcagcgatgggacctcttttgccgaggaggtggaaaagcccaccaagtgtggctgtgccctctgcgcata

SEQ ID NO: 29279 - DNA, 1711 bp, Macaca Mulatta
  misc_feature (1)...(1711): n = A,T,C or G
gatggattttgcaaagctgtggttaacgattagaaatcctttatcacctcagcccgtggccccttgtacttcgctcccctccctcaggatccctttctccctctccaggggcatctccccatccaaggatctgcaaagaactgccctgtngtcttctagatgccttcttgagcctgcctgtggccacccacagacacttgtaaggaggaaagaagtcagcctggcagagagactctgaaatgagggattagaggtgtccaaggagcaagagcttcagcctaaagacaagggagcagtccctgaagacgcttctactgagaggtctgccatggcctctcttggcctccaacttgtgggctacatcctaggccttctggggcttttgggaacactggttgccatgctgcttccctagctggaaaacaagttcttnnnnnnnnnnnnnnaaaacaagttcttacgtcggtgccagcattgtgacagcagttggcttctccaagggcctctggatggagtgtgccacacacagcacaggcatcacccagtgtgacatctatagcacccttctgggcctgcccgctgacatccaggctggccaggccatgatggtgacatccagtgcaatctcctccagtggcctgcattatctctgtggcgggcaagaaatgtacagtcttctgccaggaatcccgaagcaaaaacagattggtggtagcaggtggagtgtttttcatccttgcaggccacatgggcttaaatactgtgggatgaaaacttcatgggatcctgcggaacttctactcagcactggtgcttgacagtatgaaatttcacattgcacatgatcattacttgggcattatttcttccctgatatccctgataactggaatcaacctctgctattcctgctcatcccagagaaatcgctccaactactatgatgcctaccaagcccaacctcttgccacaaggagctctccaaggcctggtcaacttcccaaagtcaagagtgagttcaattcctacagcctgacagggtatgtgtgannnnnnnnnnnnnnnnnnnnnnnnnnnnnnnnnnnnnnnnnnnnnnnnnnnnnnnnnnnnnnggccacagagtgagggacattaccactggatcatgtcagaaggtgctgctgatagactgactttggccattggattgagcaaaggcagaaatgggggctagtgtaacagcatgcaggttgaattgccaaggatgctcgccatgccagcctttctgttttcctcaccttgctgctcccctgccctgagtccccaaccctcaacttgaaaccctatccccttaccttaagccaggcctcagaggatccctttgccttctggtttacctgggactccatccccaaacccactaatcacatcccactgactgaccctctgtgatcaaagaccctctttctggctgaggttggctcttagctcattgctggggatgggaaggagaagcagtggcttttgtgggcattgctctaacctacttctcaagcctccctccaaagaaactgattggccctggaacctccatcccactctcgttatgactccacagtgtccagactaatttgtacatgaactgaaataaaaccatcctacggtatccagggaatagaaagcaggatgcaggatgcaggatgggaggacaggaaggcagcccaggacattt

SEQ ID NO: 29280 - DNA, 198 bp, Macaca Mulatta
gacctgatcaaaggcaccatgaagggcggcctgactgtggaggacctcatcatgacgggcatcaactacctggatactcacagcaacttctggaggcagcaaaagccgatctatgctagggagcgggaccggaagctgatgcaagagaaatggctgcgggaccacaaacgccatccctcacagacagcccattacatc

SEQ ID NO: 29281 - DNA, 631 bp, Macaca Mulatta
ctcacataaatgactctctttccctctcttctcaacaggaaaacccagcaccaaacaagaatccatgggacactttcaaaaaccccagtgaatacccgcattacaccacaatcaatgtcttagacacagaggcaaaggatgctttggaactgaggccggcagagtgggagaagtgtctgaatttgcctctggatgtgcaagagggtgattttcaaacagaagtttaacaaaatcaaaatggactgaggtagagacaaaacaatttattgcactgacacttaagacttgggaagcctgacatttctatctggacagtgtgactatcttatgtcaggaccttcatgagccaaatgtcagtggtgttttcatatggtaacttctcactagtcaggctagtggagagatgaccaggtgtacagttctgaccatcctgtgttgtaagtacccgtggaatggatttgtaaggtaatctttatagataaacctcaagcaacgattcatgttgtaaccgcttcatatggtttagttttcaaaaaacttcaccatgaagcacaatgtatattaaatgcagtttttaaagtttataacagtctgtttggccattactacactttttactttataatataaa

SEQ ID NO: 29282 - DNA, 489 bp, Macaca Mulatta
tccctatctccttcctctaagagctacacccagaccagctggttatcagcagaggccccgctgctcctcatgagaacgttggtggaagacgaaggtgatggcagtggaggcagcatcccaggcagcctggagtacctcatcctggagcccccgcttatcagtgcagtggttccactgagccaggtctgaagtgcagtcagaaccatcagggggtggccggatctgacggctgttgacacagcgtcggcagtgcaacctagggaaagaaggcacagctgaagtcactacggaacccatctccctgctgtgtgggtagcttagagataatggttagggcacttccccacctgtcatgtgtgtcactgaggctagcttcatccaggataaacagctccttcaactcgcccagagagaagtggcgctctacatcctgctcctcgtccaccacacaggtgctcagtgccttcttgtggctctgacgctggaaga

SEQ ID NO: 29283 - DNA, 603 bp, Macaca Mulatta
  misc_feature (1)...(603): n = A,T,C or G
aagtgctcttggctgacccctctggtgtgtggtgaggggctttctctaccccgttcctgtttcagacccccccatctcccgcacatggtgtggggggctgggggaggtcccagcagagtgttttattattatcgctttatgtttttggttattggtttttttgtatagaccaaagcnnnnnnnnnnnnnnnnncnnnnnnnnnnnnnnnnnnnnnnnnnnnnnnnnnnnnnnnnnnnnnnnnnnnnnnnnnnnnnnnnnnnnnnnnnnnnnnnnnnnnnnnnnnnnnnnnnnnnnnnnnnnnnnnnnnnnnnnnnnnnnnnnnnnnnnnnnnnnnnnnnnnnnnnnnnnnnnnnnnnnnnnnnnnnnnnnnnnnnnnnnnnnnnnnnnnnnnnnnnnnnnnnnnnnnnnnnnnnnnnnnnnnnnnnnnnnnnnnnnnnnnnnnnnnnnnnnnnnnnnnnnnnnnnnnnnnnnnnnnnnnnnnnnnnnnnnnnnnnnnnnnnnnnnnnnnnnnnnnnnnnnnnnnnnnnnnnnnnnnnnnnnnnnnnnnnnnnnnnnnnnnnnnnnnnnnnnnnnnnnnnnnnnnnnnnnnnnnnnnnnnnnnn

SEQ ID NO: 29284 - DNA, 377 bp, Macaca Mulatta
  misc_feature (1)...(377): n = A,T,C or G
tgacccgagagtgcccatcgccggccccggggcctggggctccgctgagtggatcggtgctggcagaggcggcagtagtgtttgcagtggtgctgagcatccatgcaactgtatgggaccgatactcgtggtgcgccgtggccctcgcagtgcaggccttctacgtccaatacaagtgggaccggctgctacagcagggaagcgccgtcttccagttccgaatgtccgcanacagtggcctactgcccgcctccatggtcatgcctttacttggactagtcatgaaggaacggtgccaggctgctgggaacccgttctttgagcgttttggcattgtggtggcagccactggcatggcagtggccctcttttcatca

SEQ ID NO: 29285 - DNA, 811 bp, Macaca Mulatta
aattataaacaaagctggattcactataactaaactcaaaatgatgatgctttcaaggaaagaagcactggattttcacgtagatcaccaatcaaggcgttttttcaatgagctgatccagtttattacgagtggtcctgttattgccatggagattttaagagatgatgctattttgtgaatggaaaagactgctgggacctgcaaactctggggtggcacgcacagatgcttctggaagcattagagccctctttggaacagatggcataagaaatgcagcgcatggccctgattcttttgcttctgcggccagagaaatggagttgttttttccttcaagtggaggttgtgggccggcaaacactgctaaatttaccaattgtacctgttgcattgttaaaccccatgctgtcagtgaaggactgttgggaaagatcctgatggctatccgagatgcaggttttgaaatttcagctatgcagatgttcaatatggatcgggttaatgttgaagaattctatgaagtttataaaggagtagtgaccgaatatcatgacatggtgacagaaatgtattctggcccttgcgtagcaatggagattcaacagaataatgctacaaagacatttagagaattttgtggacctgttgatcctgaaattgcccggcatttacgccctggaactctcagagcatctttggtaaactaagatccgaatgtgctcctgtctgatctgcagagattgctattaaggttcatattctccgactgggtactacggggggaacaaccaacccgtcgggcttt

SEQ ID NO: 29286 - DNA, 645 bp, Macaca Mulatta
cgggcccagagcctgcctgaaaccgacaaggaccacgagcggccgctgcccgcgctcagctgggcacgttggccccccaagttcgagtcggtgccctgaggggtgggctgtgctcagagcaggggtggggggcccaatcaggctgcctgcagggacgggagggggctgccctctccccgacacaggcgttttcctgctttttccctcccgtgtctgtccagcagtgtccgaccagagcggggagggatcctgcccgaccccgggggggctccctgagctgccacaaggtgagatccgggggtctcggtgcagccgctgctgcctcccacgtgcctgcgactgcaagcccaagtcagggttcatgtttgtgtcatcctgggggcaggcttgcccggagctggagcgtttgggcaaactcgaccaccctcctgcgtccccaggcttcacagcgagctaggcaggccctcaagggggcagccccagcctcgggaccaaacgccgctggcaggcacagcctctcgactgtcttgtggaggcgtgagtggcatttgtgcccgccctccctgtggtcctggatcaccattttggggttggcgctcttacagcaagatggccactttctgggagtgagagcacatccccggt

SEQ ID NO: 29287 - DNA, 952 bp, Macaca Mulatta
  misc_feature (1)...(952): n = A,T,C or G
ggggctctttccttgcctaacgcagccatggctcgtggtcccaagaaagcatctgaagcgggtagcagctccaaagcattggatgctggataaattgaccggtgtgtttgctcctcgtccatccaccggtccccacaagttgagagagtgtctccccctcatcatcttcctaaggaacagacttaagtatgccctgacaggagatgaagtaaagaagatttgcatgcagcggttcattaagatcgatggcaaggtccgaactgatataacctaccctgctggattcatggatgtcatcagcattgacaagacgggagagaatttccgtctgatctatgacaccaagggtcgctttgctgtacatcgtattacacctgaggaggccaagtacaagttatgcaaagtgagaaagatctttgtgggcacaaaaggaatccctcatctggtgactcatgatgcccgcaccatccgctaccccgatcccctcatcaaggtgaatgataccattcagattgatttggagactggcaagattactgatttcattcaagttcgacactggtaacctgtgatggtgatggagtgctactggagaatggtgatccacaaaagctctgattgatgtatgaatgcagacctcacctcatttgagaacgttcaagtcctgaaaagcaaggctacagactnnnnnnnnnnnnnnnnnnnnnnnnnnnnnnnnnngngnnaatcnttttttgacnttggggtttctcaccgtgaaaaaggaatgccacatggggccacaaagctcttttggcccacacttcaaaannnnnnnnnnnnnnnnnnnnnnnnnnnnnnggggcaaggggggcaaaaaaacaccaagggggaaatttctcctcccttccccccccaggggaaaaaaaggggtattccccccccctccaaaccattgtggcgtggaagaaac

SEQ ID NO: 29288 - DNA, 423 bp, Macaca Mulatta
gtggatgacctgcgcctctccctgccgcgcccctgcccctcctcctcactccctgggttgggggctcccttagcccggcccccaagcgcgacggcccagggccggccgcagccccttcccgaacgccggcatccccttccgcttgggctgcccagccctgtcctcgcctgaccccttcctcctggaaatcaaccaggcaggagggtgccgcccccctctcgggtgggggactgtatagaccccgtctccgccccagccccgcggaggagctgcccacctgattcccggacagacctccccaactccgcgcgagacagagaattattcagaggatttaaattaaaaaacgacgtgaaaatttggaataaactgggcctcagccttttcctaggagggggacgtgcctgggagggggaggccgtc

SEQ ID NO: 29289 - DNA, 94 bp, Macaca Mulatta
acttcttcgagcgggatggacagccctactgtgaaaaggactaccacaacctcttctccccacgctgctactactgcaacggccccatcctgga

SEQ ID NO: 29290 - DNA, 1730 bp, Macaca Mulatta
  misc_feature (1)...(1730): n = A,T,C or G
cgaggttcctcgtctcctcgcgaggatgcctcttctcttctgccttgcgaaataatagcggcctagctggtgcccgtgaccacgaaggaaggcagagtcgcgggctgattacgtttcacccaacggttgccggcgccgaattggtttctaacgagaaatttaaaaatgattcgttccaagaaagggtaggatccgcgagaccctccaactgcccaaggaaaacaagtctcgtctggcaaagttatcggcccacgcggtccgcggccaagggccaacggtccttagccccacggtgccgcagcactgcgcgtgcgcgaaccgctgtcaaacgcgctgacnnnnnnnnnnnnnnnnnnnnnnnnnnnnnnnnnnnnnnnnnnnnnnnnnnnnnnnnnnnnnnnnnnnnnnnnnnnnnnnnnnnnnnnnnnnnnnnnnnnnnnnnnnnnnnnnnnnnnnnnnnnnnnnnnnnnnnnnnnnnnnnnnnnnnnnnnnnnnnnnnnnnnnnnnnnnnnnnnnnnnnnnnnnnnnnnnnnnnnnnnnnnnnnnnnnnnnnnnnnnnnnnnnnnnnnnnnnnnnnnnnnnnnnnnnnnnnnnnnnnnnnnnnnnnnnnnnnnnnnnnnnnnnnnnnnnnnnnnnnnnnnnnnnnnnnnnnnnnnnnnnnnnnnnnnnnnnnnnnnnnnnnnnnnnnnnnnnnnnnnnnnnnnnnnnnnnnnnnnnnnnnnnnnnnnnnnnnnnnnnnnnnnnnnnnnnnnnnnnnnnnnnnnnnnnnnnnnnnnnnnnnnnnnnnnnnnnnnnnnnnnnnnnnnnnnnnnnnnnnnnnnnnnnnnnnnnnnnnnnnnnnnnnnnnnnnnnnnnnnnnnnnnnnnnnnnnnnnnnnnnnnnnnnnnnnnnnnnnnnnnnnnnnnncctccagcccagactactttgcacttccagcaaagaatggggtggcagaagtcagcccagccaccgtagagaatccaaggcgagcctcaaagaaggcagttgaggagagcagtgatgaggaactgcagagggacctgcctgcacagaggggagaggagagcagtgaggaggaggaaaagggggacaagaggaagaaacctgtggcaaagaagcaggcaccaggcaacgcctcagtcagtaggaagcaggccagggaagaaagcgaggagagcgaggaagaacccgttcagaggacagcaaagaaggtggagggaaataaaggaactaaaagcctgaaggaaagtgaacagctgagtgaagannnnnnnnnnnnnnnnnnnnnnnnnnnnnnnnnnnnnnnnnnnnnnnnnnnnnnnnnnnnnnnnnnnnnnnnnnnnnnnnnttggaaacccagagccaggagcaatggcgggagaaagtcagctagggaggagaggagctgtaagccgaaaagccaggcagagaggctcatgggagactcagacatcgaggaagagcagaaagaggcagcaggcagtggggatgacagtgggagagatggagaacccccagtgcagaagaggagcaaggacaggacccagcttaaggatgggaaggggttgagtggaagcagcgaggatgaggaagacagtgggaagggggaacccacagctaaaggctctagaaagacggccacactgcgcagcaccagtggtgaggagagtgacttggagagggaagtgagtgacatcgaggcagggggcggcccccagggggagaggaag

SEQ ID NO: 29291 - DNA, 759 bp, Macaca Mulatta
accaggctttccttgaccccacttctggctgtcctgcgggccataggctcttcaggccaagtcagagctgctgttgctgccacttggatggggacctgaaaaagagaacgttgatagccccagctaagacccccaatcagctgtgggacctttttcctcctctgtgctccattcctggaggttcagcctgggagtgcactcagctgtcatctgcagcctctgcctccagcctggcagctctgggagaggcatccgtgtgccagccctgcagtgcctgcccacggtcaggcattgagaactaagcccaaccactctgcactttgttttccactcccattagccctgggccacctcctccagttcttcctcttttactaattagttggtcagtttggagagttgactggcaccatggagggtaggcaggtaggggctgggtgggggactgcccacaggagcatgtacatatggaaaaacagaacaacaatggactttttgtgatataataaatgtcttagtaccagcatcattgtctctccctccggtttccttcttgagcttgtgggtcagggcaccatgttatcaggtgtgcagggcttgggcttgatgtgagcagaggctgagcctacctaccaccaccaccccctccccaaccccgctagatgctaggcctggggtcaggattccttcaccactgctgaccctggcctgccacagggtgcacccttgtcatcacagtgtgcccccggggcttgggcc

SEQ ID NO: 29292 - DNA, 827 bp, Macaca Mulatta
acttatgagtgaggggatgagaggatttggggctcctcctggggacttccgtatcactggtgcctgtggtccctccccaggcagcaattctgacgtcatggtgagtgactgccgaagtaaggagcagatgagtgattgttcacatacccaaacttctccggtgtctggcttctggatattctctcaatgctgcttcctggatttctgcaatgaccctcaacacagagggcactatatttcttagtgtgactgcaacaacctttggtgtaaaattctaccagtttccagccaccttcctgacttctttctgggcttggccaggacttctagtccctcataccagccctccttggctccctccggtcagtggaccccagccttggctcttcctcttggttggcacccttcagcacccttactcccactctgcacccccagccccaccgcccaccaggtttcctctcttgtccttagtccctggatgtttctcccaaataaatttgtgtgcaaactgtttagtatgtctctttcttctggtggaggtaaaggctgagggaggtgcacctgcctgactgccctaccatggggcaggtaaggggcccccagctctgctgaggtctgctcctgtcctgccttggtatgtgattcgttctagacacaaaaaggggaaaaggaaatgaaagccctcctatggtgaacgccagaaagttagtgggtatcctcggcagtgctgtcagaccggagctgtgtaggggctggaggggtttagagggctatgttggtgggaggggggctgcaaaaggaccaggctaaggtaggaggaggtg

SEQ ID NO: 29293 - DNA, 3531 bp, Macaca Mulatta
  misc_feature (1)...(3531): n = A,T,C or G
tgccctgtcgaaccatacatgacagtcagcagcgagttccccgcggccaggctctccaacggcaagtatcccaaggctccggaagggggcgaaggtgcccagccagtgcccgggcatgcccggaagacagtggttcaagacagaaaagacggcagctcacctccactgttggagaagcagaccgttaccaaagatgtcacagataagccactagacttgtcttctaaagtggtggatgtagatgcttccaaagctgaccacatgaaaaagatggctcccacagtcctggttcacagcagggctggaagtggcttagtgctctccggaagtgagattccgaaagaaacactatctcctccaggaaatggttgtgctatctatagatctgaaatcatcagcactgctccctcatcctgggtggtgcccgggccaagtcctaacgaagagaacaatggcaaaagcatgtcactgaaaaacaaggcattggactgggcaataccacagcagcggagttcatcatgtccgcgcatgggcggcacggatgccgtcattactaacgtttcagggtcagtgtcgagtgcaggccgcccagcctctgcgtcacccgcccccaatgccaatgccgatggcaccaaaaccagcaggagctccgtagacaccacaccatccgttattcagcacgtgggccagcccccggccactcctgccaagcacagtagcagcaccagcagcaagggcgccaaagccagcaacccagaaccgagtttcaaagcaaacgagaacggccttccaccaagctctatatttctgtctccaaatgaggcattcaggtnnnnnnnnnnnnnnnnnnnnnnnnnnnnnnnnnnnnnnnnnnnnnnnnnnnnnnnnnnnnnnnnnnnnnnnnnnnnnnnnnnnnnnnnnnnnnnnnnnnnnnnnnnnnnnnnnnnnnnnnnnnnnnnnnnnnnnnnnnnnnnnnnnnnnnnnnnnnnnnnnnnnnnnnnnnnnnnnnnnnnnnnnnnnnnnnnnnnnnnnnnnnnnnnnnnnnnnnnnnnnnnnnnnnnnnnnnnnnnnnnnnnnnnnnnnnnnnnnnnnnnnnnnnnnnnnnnnnnnnnnnnnnnnnnnnnnnnnnnnnnnnnnnnnnnnnnnnnnnnnnnnnnnnnnnnnnnnnnnnnnnnnnnnnnnnnnnnnnnnnnnnnnnnnnnnnnnnnnnnnnnnnnnnnnnnnnnnnnnnnnnnnnnnnnnnnnnnnnnnnnnnnnnnnnnnnnnnnnnnnnnnnnnnnnnnnnnnnnnnnnnnnnnnnnnnnnnnnnnnnnnnnnnnnnnnnnnnnnnnnnnnnnnnnnnnnnnnnnnnnnnnnnnnnnnnnnnnnnnnnnnnnnnnnnnnnnnnnnnnnnnnnnnnnnnnnnnnnnnnnnnnnnnnnnnnnnnnnnnnnnnnnnnnnnnnnnnnnnnnnnnnnnnnnnnnnnnnnnnnnnnnnnnnnnnnnnnnnnnnnnnnnnnnnnnnnnnnnnnnnnnnnnnnnnnnnnnnnnnnnnnnnnnnnnnnnnnnnnnnnnnnnnnnnnnnnnnnnnnnnnnnnnnnnnnnnnnnnnnnnnnnnnnnnnnnnnnnnnnnnnnnnnnnnnnnnnnnnnnnnnnnnnnnnnnnnnnnnnnnnnnnnnnnnnnnnnnnnnnnnnnnnnnnnnnnnnnnnnnnnnnnnnnnnnnnnnnnnnnnnnnnnnnnnnnnnnnnnnnnnnnnnnnnnnnnnnnnnnnnnnnnnnnnnnnnnnnnnnnnnnnnnnnnnnnnnnnnnnnnnnnnnnnnnnnnnnnnnnnnnnnnnnnnnnnnnnnnnnnnnnnnnnnnnnnnnnnnnnnnnnnnnnnnnnnnnnnnnnnnnnnnnnnnnnnnnnnnnnnnnnnnnnnnnnnnnnnnnnnnnnnnnnnnnnnnnnnnnnnnnnnnnnnnnnnnnnnnnnnnnnnnnnnnnnnnnnnnnnnnnnnnnnnnnnnnnnnnnnnnnnnnnnnnnnnnnnnnnnnnnnnnnnnnnnnnnnnnnnnnnnnnnnnnnnnnnnnnnnnnnnnnnnnnnnnnnnnnnnnnnnnnnnnnnnnnnnnnnnnnnnnnnnnnnnnnnnnnnnnnnnnnnnnnnnnnnnnnnnnnnnnnnnnnnnnnnnnnnnnnnnnnnnnnnnnnnnnnnnnnnnnnnnnnnnnnnnnnnnnnnnnnnnnnnnnnnnnnnnnnnnnnnnnnnnnnnnnnnnnnnnnnnnnnnnnnnnnnnnnnnnnnnnnnnnnnnnnnnnnnnnnnnnnnnnnnnnnnnnnnnnnnnnnnnnnnnnnnnnnnnnnnnnnnnnnnnnnnnnnnnnnnnnnnnnnnnnnnnnnnnnnnnnnnnnnnnnnnnnnnnnnnnnnnnnnnnnnnnnngggctccatcctaaaaaacaacgccacttgttgcaccttagagaacggtgggagcagcaggtgtcagcagcagacggcaaacctggccggcaaagcaggaaggaagtgacccaggccactcagcctgaggccattcctcaggggactaacatcactgaagagaaacctggcaggaaaagggcagaggccaaaggcaacagaagctggtcggaagaggctctcaaacccagtgacaatgaacaaggnnggcttgcctatgttctccggctctccgcccatgaagagtctttcatccaccagtgcaggcggcaaaaagcaggctcagccaagctgcgcaccagcctccaggccgcctgccaaacagcagaaaattaaagaaaaccagaagacagatgtgctgtgtgcagacgaagaagaggattgccaggctgcctccctgctgcagaaatacaccgacaacagtgagaagccatccgggaagagactgtgcaaaaccaaacacttgatccctcaggagcccaggcggggattgccactgacaggggaatactacgtggagaatgccgatggcaaggtnnnnnnnnnnnnnnnnnnnnnnnnnnnnnnnnnnnnnnnnnnnnnnnnnnnnnnnnnnnnnnnnnnnnnnnnnnnnnnnnnnnnnnnnnnnnnnnnnnnnnnnnnnnnnnnnnnnnnnnnnnnnnnnnnnnnnnnnnnnnnnnnnnnnnnnnnnnnnnnnnnnnnnnnnnnnnnnnnnnnnnnnnnnnnnnnnnnnnnnnnnnnnnnnnnnnnnnnnnnnnnnnnnnnnnnnnnnnnnnnnnnnnnnnnnnnnnnnnnnnnnnnnnnnnnnnnnnnnnnnnnnnnnnnnnnnnnnnnnnnnnnnnnnnnnnnnnnnnnnnnnnnnnnnnnnnnnnnnnnnnnnnnnnnnnnnnnnnnnnnnnnnnnnnnnnnnnnnnnnnnnnnnnnnnnnnnnnnnnnnnnnnnnnnnnnnnnnnnnggcctctgcacgatgctgttgagaacgatcacttggaaattgtccgactacttctctcttacggtgctgaccccaccttggctacgtactcaggtagaaccatcatgaaaatgacccacagtgaacttatggaaaagttcttaacag

SEQ ID NO: 29294 - DNA, 717 bp, Macaca Mulatta
  misc_feature (1)...(717): n = A,T,C or G
ggcataagtaaacctagcaaaaccttgttctatttttcaatcagaaagcaattataaatacgtattacaaacaagtggatgtttttaatgaccaattgagtaagaacatccctgtcttaactggcctaaatttcttctggtagtgtcagttcaactttcagaagtgccacttaaggaagtttgattttttgtttttataatgcactgtttttaatcnnnnnnnnnnnnnnnnnnnnnnnnnnnnnnnnnnnnnnnnnnnnnnnnnnnnnntttaaaagcacaatcactaaactttatttgtaaaccattgtaactattaaccttttttgtcttattgaaaaaaaatgttgagaagcgtttttaacctgttttgttaatgctctatgtttgtatttggaatatttgaatgatgacagatggtgaagtcacgtgcatactttattgtgggccgtgaaccaaatggttctcacttttcccggacttaaagaaaaaaagaggtttaagtttgttgtggccaatatcgaaacttacaagatttccttcaaatctctaatagaggcattacgtgctttcaattgccaaatgatgccctccgactagtagatttctatgatcctctttttgtcattttatgaaatatcgttgaatttataattgggtgctattttnnnnnnnnnnnnnnnnnntactttttatttcaaagggttagggtatcca

SEQ ID NO: 29295 - DNA, 584 bp, Macaca Mulatta
tggctcctcgccgggagaaggtgggcttcgagtcacgtgacccaggccctacgtgagggggcgcggtcgggtacccggtaggaggctgcggagaagagaggactgtgggggcgttcgcgtggcttctttgctgggaccccagccctgctgtacagtgggggaaactgaggcctgagtgggcctgtgccggccacctctgtcccctgtccctctgcaggaccacagaggaccatgaaggtgcttctcctcacagggctgggggccctgttcttcgcctattattgggatgacaacttcgacccagccagcctccagggagcgcgagtactgctgacaggggccagcgctggtgtcggtgaggagctggcctatcactacgcgcgtctgggctcccacctggtgctcactgcccacactgaggccctcctgcagaaggagggctggactatctcgtgctgaaccacatcggcggcgtcccggccggcacgcgagcccgcaccccccaggcgacgcgctggctcatgcaggtaaactttctgagctacgtgcaactgacgtcgcgggcgctgcccagcctgacggac

SEQ ID NO: 29296 - DNA, 422 bp, Macaca Mulatta
  misc_feature (1)...(422): n = A,T,C or G
tgaccttgaaggaaggggaaaagaaaaattattgcaatgccaaaattgaagaccaagggccctgattttggtagattttgtgggaaagaaatcgcgtggttcatcaaaggtttaccccaacccttctcaatatggaccaaagaatcaccagtgtaaaacnnnnnnnnnnnnnnnnnnnnnnnnnnnnnnnnnnnnnnnnnnnnnnnnnnnnnnnnnnnnnnnnnnnnnnnnnnnnnnnnnnnnnnnnnnnnnnnnnnnnnnnnnnnnagatctatccaataaaaaagagagaggaccgcaaacgcctagctctcatcatatgcaatacaaagtttgatcatctgccaccaaggactggggctgactttgacatcctggggatgaaagggctgcttcagggcctgggctacaatgtggttgac

SEQ ID NO: 29297 - DNA, 425 bp, Macaca Mulatta
ccactctgccatctgaagctcctactacacaggttccccccagcttacctcgaaacagcaccatgatgcaggcagtgaagaccacgcctagacagaggtctccactcctgaatcagccagtccctgagctaagccatgccggtctgattgccagccagagccccttccgggccccattgaacgtggcaaacacagctggcacatccctcccaagcgttgatcttctccagaaactcaggttgaccccacagcatgaccaaatacagacacaaccacttgggaaaggtgcaatggtagccagcttttctccggcagctggtcagctggccacacctgagagcttcatagagccttcctctaagacagcagcagcgagagcggcagcctcagcctccctgagcaacatggtgcttgctccccttcag

SEQ ID NO: 29298 - DNA, 288 bp, Macaca Mulatta
tctagacaaactgaaaggcaataaatcctatgcgaacatggacctctctccggtggtagagtgcatggaccacgctctaacaagtctcttccctaagactcattatgctgctggaaaagatgccaaaattttctggatacctctgtctcacatgccagcagttttgcaagactttttgttgttgaaacagaaaacagagctggctaatcccaaggcagtgtgactcagccaaccacgggtgcctgctccaggctatgagattggccgatttcaagagcacatctcctt

SEQ ID NO: 29299 - DNA, 217 bp, Macaca Mulatta
tcaatcacctctcgcagccctttggcaaagtggagatcagccccgatggtgaggaagccctgtgtggtctacaggggagcctcatttattcattcagttactgaggccagcgtttagagatcaagagacagagtctttgtctttcagggactcaatctaatggataattccatgtcaaggtgctaaaatgaggttgtaggagtgtagactatgggtg

SEQ ID NO: 29300 - DNA, 121 bp, Macaca Mulatta
aaaattacgtttagttgatatcaaagaatttcataatcgccaggatgcattagagctgtcaagttttcagaacattatcatgacacacatggaatctgccaaagagactctgcttaaaatg

SEQ ID NO: 29301 - DNA, 407 bp, Macaca Mulatta
atgatgctgagtccggaccaagccgcagattcggaccatcccagctcggcgcactcggatccggagtccctgggcggcacggacaccaaggtgctgggcagcgtgtcggacctggagccggtggaggaggccgagggcgacggcaagggcggcagccgggccgcgctctacccgcatccgcagcagctgagccgcgaggagaagcgccgccgccggcgcgccaccgccaagtaccgctcggcccacgccacccgcgagcgcatccgcgtggaagccttcaacttggccttcgccgagctccgcaaattgctgcccacgctgcccccggacaagaagctctccaagatcgagatcctgcgcctggccatctgctacatctcctatctcaaccatgtcctggacgtgta

SEQ ID NO: 29302 - DNA, 121 bp, Macaca Mulatta
cagctggccctgctgcacacacctccactctcagacatctttgtcttcacggatgcctcccctaaggatgcctttctcaccaaccaggtggaatccctgactcaggaacggcgctgccggg

SEQ ID NO: 29303 - DNA, 4514 bp, Macaca Mulatta
  misc_feature (1)...(4514): n = A,T,C or G
tgcccaaatctgggtttacaaaaccagttcagagtgaaaattctgacagtgacagcaatatggtagagaaaccatatggaagaaagnnnnnnnnnnnnnnnnnnnnnnnnnnnnnnnnnnnnnnnnnnnnnnnnnnnnnnnnnnnnnnnnnnnnnnnnnnnnnnnnnnnnnnnnnnnnnnnnnnnnnnnnnnnnnnnnnnnnnnnnnnnnnnnnnnnnnnnnnnnnnnnnnnnnnnnnnnnnnnnnnnnnnnnnnnnnnnnnnnnnnnnnnnnnnnnnnnnnnnnnnnnnnnnnnnnnnnnnnnnnnnnnnnnnnnnnnnnnnnnnnnnnnnnnnnnnnnnnnnnnnnnnnnnnnnnnnnnnnnnnnnnnnnnnnnnnnnnnnnnnnnnnnnnnnnnnnnnnnnnnnnnnnnnnnnnnnnnnnnnnnnnnnnnnnnnnnnnnnnnnnnnnnnnnnnnnnnnnnnnnnnnnnnnnnnnnnnnnnnnnnnnnnnnnnnnnnnnnnnnnnnnnnnnnnnnnnnnnnnnnnnnnnnnnnnnnnnnnnnnnnnnnnnnnnnnnnnnnnnnnnnnnnnnnnnnnnnnnnnnnnnnnnnnnnnnnnnnnnnnnnnnnnnnnnnnnnnnnnnnnnnnnnnnnnnnnnnnnnnnnnnnnnnnnnnnnnnnnnnnnnnnnnnnnnnnnnnnnnnnnnnnnnnnnnnnnnnnnnnnnnnnnnnnnnnnnnnnnnnnnnnnnnnnnnnnnnnnnnnnnnnnnnnnnnnnnnnnnnnnnnnnnnnnnnnnnnnnnnnnnnnnnnnnnnnnnnnnnnnnnnnnnnnnnnnnnnnnnnnnnnnnnnnnnnnnnnnnnnnnnnnnnnnnnnnnnnnnnnnnnnnnnnnnnnnnnnnnnnnnnnnnnnnnnnnnnnnnnnnnnnnnnnnnnnnnnnnnnnnnnnnnnnnnnnnnnnnnnnnnnnnnnnnnnnnnnnnnnnnnnnnnnnnnnnnnnnnnnnnnnnnnnnnnnnnnnnnnnnnnnnnnnnnnnnnnnnnnnnnnnnnnnnnnnnnnnnnnnnnnnnnnnnnnnnnnnnnnnnnnnnnnnnnnnnnnnnnnnnnnnnnnnnnnnnnnnnnnnnnnnnnnnnnnnnnnnnnnnnnnnnnnnnnnnnnnnnnnnnnnnnnnnnnnnnnnnnnnnnnnnnnnnnnnnnnnnnnnnnnnnnnnnnnnnnnnnnnnnnnnnnnnnnnnnnnnnnnnnnnnnnnnnnnnnnnnnnnnnnnnnnnnnnnnnnnnnnnnnnnnnnnnnnnnnnnnnnnnnnnnnnnnnnnnnnnnnnnnnnnnnnnnnnnnnnnnnnnnnnnnnnnnnnnnnnnnnnnnnnnnnnnnnnnnnnnnnnnnnnnnnnnnnnnnnnnnnnnnnnnnnnnnnnnnnnnnnnnnnnnnnnnnnnnnnnnnnnnnnnnnnnnnnnnnnnnnnnnnnnnnnnnnnnnnnnnnnnnnnnnnnnnnnnnnnnnnnnnnnnnnnnnnnnnnnnnnnnnnnnnnnnnnnnnnnnnnnnnnnnnnnnnnnnnnnnnnnnnnnnnnnnnnnnnnnnnnnnnnnnnnnnnnnnnnnnnnnnnnnnnnnnnnnnnnnnnnnnnnnnnnnnnnnnnnnnnnnnnnnnnnnnnnnnnnnnnnnnnnnnnnnnnnnnnnnnnnnnnnnnnnnnnnnnnnnnnnnnnnnnnnnnnnnnnnnnnnnnnnnnnnnnnnnnnnnnnnnnnnnnnnnnnnnnnnnnnnnnnnnnnnnnnnnnnnnnnnnnnnnnnnnnnnnnnnnnnnnnnnnnnnnnnnnnnnnnnnnnnnnnnnnnnnnnnnnnnnnnnnnnnnnnnnnnnnnnnnnnnnnnnnnnnnnnnnnnnnnnnnnnnnnnnnnnnnnnnnnnnnnnnnnnnnnnnnnnnnnnnnnnnnnnnnnnnnnnnnnnnnnnnnnnnnnnnnnnnnnnnnnnnnnnnnnnnnnnnnnnnnnnnnnnnnnnnnnnnnnnnnnnnnnnnnnnnnnnnnnnnnnnnnnnnnnnnnnnnnnnnnnnnnnnnnnnnnnnnnnnnnnnnnnnnnnnnnnnnnnnnnnnnnnnnnnnnnnnnnnnnnnnnnnnnnnnnnnnnnnnnnnnnnnnnnnnnnnnnnnnnnnnnnnnnnnnnnnnnnnnnnnnnnnnnnnnnnnnnnnnnnnnnnnnnnnnnnnnnnnnnnnnnnnnnnnnnnnnnnnnnnnnnnnnnnnnnnnnnnnnnnnnnnnnnnnnnnnnnnnnnnnnnnnnnnnnnnnnnnnnnnnnnnnnnnnnnnnnnnnnnnnnnnnnnnnnnnnnnnnnnnnnnnnnnnnnnnnnnnnnnnnnnnnnnnnnnnnnnnnnnnnnnnnnnnnnnnnnnnnnnnnnnnnnnnnnnnnnnnnnnnnnnnnnnnnnnnnnnnnnnnnnnnnnnnnnnnnnnnnnnnnnnnnnnnnnnnnnnnnnnnnnnnnnnnnnnnnnnnnnnnnnnnnnnnnnnnnnnnnnnnnnnnnnnnnnnnnnnnnnnnnnnnnnnnnnnnnnnnnnnnnnnnnnnnnnnnnnnnnnnnnnnnnnnnnnnnnnnnnnnnnnnnnnnnnnnnnnnnnnnnnnnnnnnnnnnnnnnnnnnnnnnnnnnnnnnnnnnnnnnnnnnnnnnnnnnnnnnnnnnnnnnnnnnnnnnnnnnnnnnnnnnnnnnnnnnnnnnnnnnnnnnnnnnnnnnnnnnnnnnnnnnnnnnnnnnnnnnnnnnnnnnnnnnnnnnnnnnnnnnnnnnnnnnnnnnnnnnnnnnnnnnnnnnnnnnnnnnnnnnnnnnnnnnnnnnnnnnnnnnnnnnnnnnnnnnnnnnnnnnnnnnnnnnnnnnnnnnnnnnnnnnnnnnnnnnnnnnnnnnnnnnnnnnnnnnnnnnnnnnnnnnnnnnnnnnnnnnnnnnnnnnnnnnnnnnnnnnnnnnnnnnnnnnnnnnnnnnnnnnnnnnnnnnnnnnnnnnnnnnnnnnnnnnnnnnnnnnnnnnnnnnnnnnnnnnnnnnnnnnnnnnnnnnnnnnnnnnnnnnnnnnnnnnnnnnnnnnnnnnnnnnnnnnnnnnnnnnnnnnnnnnnnnnnnnnnnnnnnnnnnnnnnnnnnnnnnnnnnnnnnnnnnnnnnnnnnnnnnnnnnnnnnnnnnnnnnnnnnnnnnnnnnnnnnnnnnnnnnnnnnnnnnnnnnnnnnnnnnnnnnnnnnnnnnnnnnnnnnnnnnnnnnnnnnnnnnnnnnnnnnnnnnnnnnnnnnnnnnnnnnnnnnnnnnnnnnnnnnnnnnnnnnnnnnnnnnnnnnnnnnnnnnnnnnnnnnnnnnnnnnnnnnnnnnnnnnnnnnnnnnnnnnnnnnnnnnnnnnnnnnnnnnnnnnnnnnnnnnnnnnnnnnnnnnnnnnnnnnnnnnnnnnnnnnnnnnnnnnnnnnnnnnnnnnnnnnnnnnnnnnnnnnnnnnnnnnnnnnnnnnnnnnnnnnnnnnnnnnnnnnnnnnnnnnnnnnnnnnnnnnnnnnnnnnnnnnnnnnnnnnnnnnnnnnnnnnnnnnnnnnnnnnnnnnnnnnnnnnnnnnnnnnnnnnnnnnnnnnnnnnnnnnnnnnnnnnnnnnnnnnnnnnnnnnnnnnnnnnnnnnnnnnnnnnnnnnnnnnnnnnnnnnnnnnnnnnnnnnnnnnnnnnnnnnnnnnnnnnnnnnnnnnnnnnnnnnnnnnnnnnnnnnnnnnnnnnnnnnnnnnnnnnnnnnnnnnnnnnnnnnnnnnnnnnnnnnnnnnnnnnnnnnnnnnnnnnnnnnnnnnnnnnnnnnnnnnnnnnnnnnnnnnnnnnnnnnnnnnnnnnnnnnnnngagcggattaaaccaccatatgcaaacagactttcaacatcccatcttaggtcatcttctgtagaagatgttaaactaattataagcgaggggagacctactgtagaagttcgaagatgtagcatgccttctgtcatttgtgaacatacaaaacaattccagacaatatcagaagagagcaatcaaggtagcttattaactgtgccaagagatactagtccttctcccaaacctgaggtattctcaaatgtgcctgaaagagacctttcaaatgtgtctaacatacattccggttttgcaatttctccaactggagcttcaagcagcaaatatgtttcagctgatagaaatgtcatcaaaaatactgccccagtgggcactgtaatggacagtccagtgcatttagagccatctagtcaggttggtgtgatccagaataagtcatgggagatgcctgttgatagactagagacattaagcactagagactttatctgcccaaattctaacatacccgatcaagaatcctctcttcagagtttttgtaattctgaaaataaaatactgaaagaaaatgctgattttttatccctgccccagactgaactgccaggaaactcttgcgctcaggatccagcatcctttatgccttcacagcagccttgctctttccccagccaatcactttcagatgctgaatcgatt

SEQ ID NO: 29304 - DNA, 144 bp, Macaca Mulatta
ttggtcctgagaaaagggtgccagcaatgcctggatcgcctgtggaagtgaagatacagtccagatcctcacctcccaccatgccacccctcccaccaataaatcctggaggaccgagaccagtgtccttcactcctactgcat

SEQ ID NO: 29305 - DNA, 806 bp, Macaca Mulatta
  misc_feature (1)...(806): n = A,T,C or G
caggtgaaggagcttggcgctgtcatctataactgcagccacctggcccaagacctggagaagaccttccagacctactgggtgctgggggtgcccaaggctgtcctccccaaaacctggcctcagaacttctcatctcacatcaaccgtttccagcccttccagggcctctttgatggggtgcccaccactgcctacttctcagnnnnnnnnnnnnnnnnnnnnnnnnnnnnnnnnnnnnnnnnnnnnnnnnnnnnnnnnnnnnnnnnnnnnnnnnnnnnnnnnnnnnnnnnnnnnnnnnnnnnnnnnnnnnnnnnnnnnnnnnnnnnnnnnnnnnnnnnnnnnnnnnnnnnnnnnnnnnnnnnnnnnnnnnnnnnnnnnnnnnnnnnnnnnnnnnnnnnnnnnnnnnnnnnnnnnnnnnnnnnnnnnnnnnnnnnnnnnnnnnnnnnnnnnnnnnnnnnnnnnnnnnnnnnnnnnnnnnnnnnnnnnnnnnnnnnnnnnnnnnnnnnnnnnnnnnnnnnnnnnnnnnnnnnnnnnnnnnnnnnnnnnnnnnnnnnnnnnnnnnnnnnnnnnnnnnnnnnnnnnnnnnnnnnnnnnnnnnnnnnaggcacctccaactggtcggaggattacttcagcagcacgacgggggtgggcctggtggtcacccagagccccggcgcgcagcccgcgggggccacggtacaggagcagctgcggcagctctttgagcgggactggagttcgcgctacgccgtcggcctggacggacaggctccgggccaggactgcgtttggcagggctg

SEQ ID NO: 29306 - DNA, 351 bp, Macaca Mulatta
ccagtgtggtgggcttcctgctgggactgagaaggctcatgcagggcatccgtaatgttggtttcgctgagagctgcctcctggtctctccaccactgtagttctctcattgccaaaccatcagctgcttttaaaataagatctctttgtagccatcctgttacgtttgtaaacgatctaattaaatggcatcagcactttaaccaatgacatttgcatagagagaaatgatctgtttgacagtaagtttattggtggttcttatacagtatctttaaaagtgccttagggaaccctgtccctcctaacaagtgtatctcgattaataataacctgccagtcacagatcat

SEQ ID NO: 29307 - DNA, 1192 bp, Macaca Mulatta
  misc_feature (1)...(1192): n = A,T,C or G
acagaaaactcgaagatctacngttggaaacagtagcactttgaaaactttttaggccagttttaatttaatggccctactgatattcacatctaaggtgactaacaatgacaaaggccttacgaactgtacggacaatacagaagattattcttatcctcattgcatttctatgcatatacgaaaaaacattttaaagccaagaaaatatctgtcaaaccgtttctgttggagcgatgtcaactcatgcgtttaatttagcatcagtagaaaattgctgtaggtaaatctcacatttatctgcaacaaaatatagatttaatttttagcttaaactttctttctgccttatgttagtggacctcagttatccatctgtaaatttctttttatttggctaaaataatctaaaagaataattcggatggccaattagaaatgctcttttcagttggtgcatttaaagctttcctttaatattttcacctgctcattatgatgcctccttttagttcaatatctttccagctcacacttgtttttaatcattaaatatttttttcctggttttggagactaaactgagaaacttttttttaaacttaagcattgtcattgctatttttttaaattaggctttcttaggattttaagaacaatgaaagttagcttcacaccttcaaatgatcttgaatgagggaaaaatcagtttgattccaagtatatttcttgccttacatggtcttttctttgacagtctgtacacctttattattaggtttagaattatttatgtaccagatattatagttttaaacattttaatattctctgatctttagaattatttatgttcaaattttagttgggaactttgtttcctacttaagctcaggactttataccctcagaattgagtgcctttgagttacacatgctaatagaaatttcatagtaaatgtaaataaggtcagaggatctaatatagaacctgatgatgaagcattaatgtaaaaatggaacttatttttgtcaaaaatgagatgtacacttgtcgtgatttatatatgttgaccttttgtgtttattactgttttgagaatagccatgttcattttctttccagttagagtaagtacttctgtggntaatgtatatttttattatggtttttaaaatgggaatcattttt

SEQ ID NO: 29308 - DNA, 741 bp, Macaca Mulatta
acttggcatacaaaatatttaagtgaaggagaagtctaacgctgaactgacaatgaagggaaattgtttatgtgttatgaacatccaagtctttcttcttttttaagttgtcaaagaagcttccacaaaattagaaaggacaacagttctgagctgtaatttcgccttaaactctggacactctatatgtagtgcatttttaaacttgaaatatataatattcagccagcttaaacccatacaatgtatgtacaatacaatgtacaattatgtctcttgagcatcaatcttgttactgctgattcttgtaaatctttttgcttctactttcatcttaaactaatacgtgccagatataactgtcttgtttcagtgagagacgccctatttctatgtcatttttaatgtatctatttgtacaattttaaagttcttattttagtatacatacaaatatcagtattctgacatgtaagaaaatgttacggcatcacacttatattttatgaacattgtactgttgctttaatatgagcttcaatataagaagcaacctttgaaataaaaaaaaagattcttttttaattctgggtttgattcttaacattgaaaaaaacgttaagtatttctaatgatccatttatatttctaatttaattgtgatcttttaataccctatttatgatctgttgtagtctgtctgatgcttttatggttattaaaatcaatatgttttacaat

SEQ ID NO: 29309 - DNA, 1112 bp, Macaca Mulatta
  misc_feature (1)...(1112): n = A,T,C or G
gacattcggagaggagttgtcaataaccaacagatagactggtcgttcaagttggatggagttcttcacgatgcctcccaggacttggtttatgagacagttgcaaaggatgtggtttctcaggccctcaatggctataatgnnnnnnnnnnnnnnnnnnnnnnnnnnnnnnnnnnnnnnnnnnnnnnnnnnnnnnnnnnnnnnnnnnnnnnnnnnnnnnnnnnnnnnnnnnnnnnnnnnnnnnnnnnnnnnnnnnnnnnnnnnnnnnnnnnnnnnnnnnnnnnnnnnnnnnnnnnnnnnnnnnnnnnnnnnnnnnnnnnnnnnnnnnnnnnnnnnnnnnnnnnnnnnnnnnnnnnnnnnnnnnnnnnnnnnnnnnnnnnnnnnnnnnnnnnnnnnnnnnnnnnnnnnnnnnnnnnnnnnnnnnnnnnnnnnnnnnnnnnnnnnnnnnnnnnnnnnnnnnnnnnnnnnnnnnnnnnnnnnnnnnnnnnnnnnnnnnnnnnnnnnnnnnnnnnnnnnnnnnnnnnnnnnnnnnnnnnnnnnnnnnnnnnnnnnnnnnnnnnnnnnnnnnnnnnnnnnnnnnnnnnnnnnnnnnnnnnnnnnnnnnnnnnnnnnnnnnnnnnnnnnnnnnnnnnnnnnnnnnnnnnnnnnnnnnnnnnnnnnnnnnnnnnnnnnnnnnnnnnnnnnnnnnnnnnnnnnnnnnnnnnnnnnnnnnnnnnnnnnnnnnnnnnnnnnnnnnnnnnnnnnnnnnnnnnnnnnnnnnnnnnnnnnnnnnnnnnnnnnnnnnnnnnnnnnnnnnnnnnnnnnnnnnnnnnnnnnnnnnnnnnnnnnnnnnnnnnnnnnnnnnnnnnnnnnnnnnnnnnnnnnnnnnnnnnnnnnnnnnnnnnnnnnnnnnnnnnnnnnnnnnnnnnnnnnnnnnnnnnnnnnnnnnnnnnnnnnnnnnnnnnnnnnnnnnnnnnnnnnnnnnnnnnnnnnnnnnnnnnnnnnnnnnnnnnnnnnnnnnnnnnnnnnngaccaaccgcacctttgtgacctatgaagccatggatgaaatccagattgctgagatcaactcccaggtgcggaggtacctggaggggacgctggacgagatc

SEQ ID NO: 29310 - DNA, 3639 bp, Macaca Mulatta
  misc_feature (1)...(3639): n = A,T,C or G
agtcttctgaactgtttttctggacttccaaatctcaagtgataagaccagcagaagcaggtatannnnnnnnnnnnnnnnnnnnnnnnnnnnnnnnnnnnnnnnnnnnnnnnnnnnnnnnnnnnnnnnnnnnnnnnnnnnnnnnnnnnnnnnnnnnnnnnnnnnnnnnnnnnnnnnnnnnnnnnnnnnnnnnnnnnnnnnnnnnnnnnnnnnnnnnnnnnnnnnnnnnnnnnnnnnnnnnnnnnnnnnnnnnnnnnnnnnnnnnnnnnnnnnnnnnnnnnnnnnnnnnnnnnnnnnnnnnnnnnnnnnnnnnnnnnnnnnnnnnnnnnnnnnnnnnnnnnnnnnnnnnnnnnnnnnnnnnnnnnnnnnnnnnnnnnnnnnnnnnnnnnnnnnnnnnnnnnnnnnnnnnnnnnnnnnnnnnnnnnnnnnnnnnnnnnnnnnnnnnnnnnnnnnnntcagaggaagaaaaagtggcttttgttaactggataaacaaagccctggagaatgaccctgactgtaagcatctcatacccatgaatcccaatgatgatagtcttttcaagtcacttgcagatggcatccttctttgnnnnnnnnnnnnnnnnnnnnnnnnnnnnnnnnnnnnnnnnnnnnnnnnnnnnnnnnnnnnnnnnnnnnnnnnnnnnnnnnnnaaaatttaaacctagccctgaattctgcctccgccattggttgtacagtggtcaacatcggtgcatcagatctcaaagaaggaaaacctcacttggtcttgggacttctctggcagatcatcaaagttggcctttttgctgatattgagatttccaggaatgaagnagctctgattgcattgttaaatgaaggtgaggaactagaggagctgatgaagctttctcctgaggaattactgctgcgatgggtgaactaccatctgaccaacgcaggatggcataccatcagcaacttcagccaagacattaagnnnnnnnnnnnnnnnnnnnnnnnnnnnnnnnnnnnnnnnnnnnnnnnnnnnnnnnnnnnnnnnnnnnnnnnnnnnnnnnnnnnnnnnnnnnnnnnnnnnnnnnnnnnnnnnnnnnnnnnnnnnnnnnnnnnnnnnnnnnnnnnnnnnnnnnnnnnnnnnnnnnnnnnnnnnnnnnnnnnnnnnnnnnnnnnnnnnnnnnnnnnnnnnnnnnnnnnnnnnnnnnnnnnnnnnnnnnnnnnnnnnnnnnnnnnnnnnnnnnnnnnnnnnnnnnnnnnnnnnnnnnnnnnnnnnnnnnnnnnnnnnnnnnnnnnnnnnnnnnnnnnnnnnnnnnnnnnnnnnnnnnnnnnnnnnnnnnnnnnnnnnnnnnnnnnnnnnnnnnnnnnnnnnnnnnnnnnnnnnnnnnnnnnnnnnnnnnnnnnnnnnnnnnnnnnnnnnnnnnnnnnnnnnnnnnnnnnnnnnnnnnnnnnnnnnnnnnnnnnnagattgaaaactgtaactatgcagtggacttggggaagaacaaggccaaattctcccttggttggcattgctgggcaggacctaaatgaagngaattcaacacttacctnggcattggtatggcagctgatgagaaggtnnnnnnnnnnnnnnnnnnnnnnnnnnnnnnnnnnnnnnnnnnnnnnnnnnnnnnnnnnnnnnnnnnnnnnnnnnnnnnnnnnnnnnnnnnnnnnnnnnnnnnnnnnnnnnnnnnnnnnnggataaatctataagcacaagtttacctgttctagatttaatagnnnnnnnnnnnnnnnnnnnnnnnnnnnnnnnnnnnnnnnnnnnnnnnnnnnnnnnnnnnnnnnnnnnnnnnnnnnnnnnnnnnnnnnnnnnnnnnnnnnnnnnnnnnnnnnnnnnnnnnnnnnnnnnnnnnnnnnnnnnnnnnnnnnnnnnnnnnnnnnnnnnnnnnnnnnnnnnnnnnnnnnnnnnnnnnnnnnnnnnnnnnnnnnnnnnnnnnnnnnnnnnnnnnnnnnnnnnnnnnnnnnnnnnnnnnnnnnnnnnnnnnnnnnnnnnnnnnnnnnnnnnnnnnnnnnnnnnnnnnnnnnnnnnnnnnnnnnnnnnnnnnnnnnnnnnnnnnnnnnnnnnnnnnnnnnnnnnnnnnnnnnnnnnnnnnnnnnnnnnnnnnnnnnnnnnnnnnnnnnnnnnnnnnnnnnnnnnnnnnnnnnnnnnnnnnnnnnnnnnnnnnnnnnnnnnnnnnnnnnnnnnnnnnnnnnnnnnnnnnnnnnnnnnnnnnnnnnnnnnnnnnnnnnnnnnnnnnnnnnnnnnnnnnnnnnnnnnnnnnnnnnnnnnnnnnnnnnnnnnnnnnnnnnnnnnnnnnnnnnnnnnnnnntgtgttaattttgatcataaatgcattcatactcataatccagtttaatcctnttatntgcttcctccaactatttaaagtggtccaaaaacacttttctgtaagtttctatactgtctaaaaccttctggtgacaagaattgtttattaatatcaaactttttatatatgagaactaattcttgaataaaccccaaagttcactctcttgtttaagtagcagcagctttttacttaaaatttaattttaactacattgataccttacatatcctagtttggtaatacagctttaactatgtcatccaacacatatatgttggtaggatgttattagagatacatgtgtgcatatatatttttttgcacctgtatcacccagcttttcataagtggtatgtataattggtcattcagccaaccatcagtatttttcccccacaacatgtgtaacacttttcagtttgtggatattggatacattaagatttctttttataagtattcattttgaatgtgcatatagttatttgactccttccaaatacttgtagccaaacattggctagaacaccccaagatatgttgacactatcctgttagcttcatattatacttgctagtttaggtctctatagaagccctatataatttagaatatgcccactgagtatctttattagaaagtaacataaagctatattaatgtagagtattttcatttgttttttggtaaacccgttacaaattggcaatgtttgnnnnnnnnnnnnnnnnnnnnnnnnnnnnnnnnnnnnnnnnnnnnnnnntaaatttttagcattaatccaattctgctgctaacaactgaagccagaaatctacttcatccatcttccactcttagtgcagtgagcaatactgttgtgcaacaaaaatgtcactttatcccagtgtgaatgagtagtctaaattccccttctaccattgatttaaacatacatgttggtaagactgagactgcccatgtgtttagatagaattttttaaatgaaatgatcagatggaattttgaaatatattctcctacaaaagagatttctttcccttttatattttgatgattgttttcttatatgaagattaagatatgttcttgctcttttataagattatttaaattatgtttccctctgatttttttttcactattgtatttactaagttattggatttacatgaaatctggcacttttagggtgttctttttctcacagagtatatttaataaaaatgctgtgtatat

SEQ ID NO: 29311 - DNA, 733 bp, Macaca Mulatta
  misc_feature (1)...(733): n = A,T,C or G
ggcagaaactccgctgagcagaacttgccgccagaatgctcctcctgttgctgggtatcatcgtcctccacgtcgcggtgctggtgctgctgttcgtctccacgatcgtcagnnnnnnnnnnnnnnnnnnnnnnnnnnnnnnnnnnnnnnnnnnnnnnnnnnnnnnnnnnnnnnnnnnnnnnnnnnnnnnnnnnnnnnnnnnnnnnnnnnnnnnnnnnnnnnnnnnnnnnnnnnnnnnnnnnnnnnnnnnnnnnnnnnnnnnnnnnnnnnnnnnnnnnnnnnnnnnnnnnnnnnnnnnnnnnnnnnnnnnnnnnnnnnnnnnnnnnnnnnnnnnnnnnnnnnnnnnnnnnnnggtctgtgtgtgatgagtgctgcggccatctacacggtgaggcacccagaatggcacctcaactcggattactcctacggctttgcctacatcctggcctgggtggccttccccctggcccttctcagcggtgtcatctacgtgatcttgcggaaacgcgaatgaggcgcccagacagtctgtttgaggctttgagcgtacacagggaagggaggaagggaannnnnnnnnnnnnnnnnnnnnnngagctagcggaaaatcccaaactcaaaccaaaccaaacagaaagcagtggaggtgggggttgctgttgattgagatgtatataatatctccggtttataaaacctatttataacgactatttacatatatgtacat

SEQ ID NO: 29312 - DNA, 453 bp, Macaca Mulatta
  misc_feature (1)...(453): n = A,T,C or G
ggggaagagcagcagcaggggaaggagggaccccgggtcatttatgacgagaagaaaggcaccgtctacatctactcctacttccacttcgtgttcttcctggcttccctgtatgtgatgatgaccgtcaccaactggttcaattacgaaagtgccaacatcgagagcttcttcagcggaagctggtccatcttctgggtcaagatggcctcctgctggatatgcgtgctgttgtacctgtgtacgctggtcgctcccctctgctgccctacccgggagttctctgtgtgacgatatcagcggtcccctgggctttgtgggcctacagcctggaaagtgccatcttttgaacagtgtccccgggggttaagcagggactggtgccctgtgcctgagtgggtctgaaaaggctgtgagtnnnnnnnnnnnnnnnnnnnnnnnnnnnnnnnnnnn

SEQ ID NO: 29313 - DNA, 1025 bp, Macaca Mulatta
  misc_feature (1)...(1025): n = A,T,C or G
gtccattctcacaatgatttcctcctggccattctcacgcgttgtcagattttggtttctacaccagnnnnnnnnnnnnnnnnnnnnnnnnnnnnnnnnnnnnnnnnnnnnnnnnnnnnnnnnnnnnnnnnnnnnnnnnnnnnnnnnnnnnnnnnnnnnnnnnnnnnnnnnnnnnnnnnnnnnnnnnnnnnnnnnnnnnnnnnnnnnnnnnnnnnnnnnnnnnnnnnnnnnnnnnnnnnnnnnnnnnnnnnnnnnnnnnnnnnnnnnnnnnnnnnnnnnnnnnnnnnnnnnnnnnnnnnnnnnnnnnnnnnnnnnnnnnnnnnnnnnnnnnnnnnnnnnnnnnnnnnnnnnnnnnnnnnnnnnnnnnnnnnnnnnnnnnnnnnnnnnnnnnnnnnnnnnnnnnnnnnnnnnnnnnnnnnnnnnnnnnnnnnnnnnnnnnnnnnnnnnnnnnnnnnnnnnnnnnnnnnnnnnnnnnnnnnnnnnnnnnnnnnnnnnnnnnnnnnnnnnnnnnnnnnnnnnnnnnnnnnnnnnnnnnnnnnnnnnnnnnnnnnnnnnnnnnnnnnnnnnnnnnnnnnnnnnnnnnnnnnnnnnnnnnnnnnnnnnnnnnnnnnnnnnnnnnnnnnnnnnnnnnnnnnnnnnnnnnnnnnnnnnnnnnnnnnnnnnnnnnnnnnnnnnnnnnnnnnnnnncaggtacacagggaagtcattcctacacatactgtctatgcccttaatattgaaaggatcatcacgaaactctggcatccaaatcatgaagagctgcagcaagacaaagttcaccgccagcgcttggcagccaaggaggggcttttgctgtgctaaattaggatttgagggtgtgggaccctcaccaaattcattgattactgcaaattgaatgtttttggggtccacatttcaaggctgaagtgtatagtgtatatataacctttcctatggaaatgtgacattgagtacattttgtgttgctattgtgaagccattaatataaatctttggtaatg

SEQ ID NO: 29314 - DNA, 414 bp, Macaca Mulatta
  misc_feature (1)...(414): n = A,T,C or G
aagaccctacacaaatgcacaaattcagattaaacaaggaaaagatggaaaggnaggagggatctgtaggcctttctgtccagcgctctgtttttggagaaagaaatttcaatatacacagctccatttcacatgagagccctgcagtgaaannnnnnnnnnnnnnnnnnnnnnnnnnnnnnnnnnnnnnnnnnnnnnnnnnnnnnnnnnnnnnnnnnnnnnnnnnnnnnnnnnnnnnnnnnnnnnnnnnnnnnnnnnnnnnnnnnnnnnnnnnnnnnnnnnnnnnnnnnnnnnnnnnnnnnnnnnnnnnnnnnnnnnnnnnnnnnnnaaggcgtcagcaggttgcccctagggcaggtacaccaggattcagagcaccagaagtcttgacaaagtgccccaatcaaactacag

SEQ ID NO: 29315 - DNA, 661 bp, Macaca Mulatta
agccctgcgcccaggccctcctccctgcccatcctgccttctggacccctctacccaggcctctttgacatccgtggctccccaactggaggggcaggaggctcagctgaccccttcgccccagtctttgtgccgccacacccggggatatccggagggctcgggggagccttgtcaggggcctcgcgctccctctcaccgacccgcctgctctcgctgcccccggacaagccgtttggcgctaaacctctggggttctggaccaagttcgacgtggctgattggctagagtggctgggtttgggggagcaccgagcccagttcctggaccatgagatcgatggctcccacctgcccgccttgaccaaggaggactatgtagatctaggtgtgaccagggtgggccaccgcatgaacatcgaccgggctctcaaattcttcctggagaggtgatggctggcctggacggaccagccccgtccacagaactcttgagcctgctggcctcttgacctctgacccctgactgtcattctctcccccgggccagggactctgttcaaactgcgccctgccctcgtctcccaaggccagaggtcactaggtggcccaatccaggccggacatttgcacctcactgaaggggggcagctgacacaag

SEQ ID NO: 29316 - DNA, 4517 bp, Macaca Mulatta
  misc_feature (1)...(4517): n = A,T,C or G
agggaaccctggaggatcagatcatccaagccaacccgctgctagaggcctttggaaatgccaagactgtgaggaatgacaactcctcaagatttnnnnnnnnnnnnnnnnnnnnnnnnnnnnnnnnnnnnnnnnnnnnnnnnnnnnnnnnnnnnnnnnnnnnnnnnnnnnnnnnnnnnnnnnnnnnnnnnnnnnnnnnnnnnnnnnnnnnnnnnnnnnnnnnnnnnnnnnnnnnnnnnnnnnnnnnnnnnnnnnnnnnnnnnnnnnnnnnnnnnnnnnnnnnnnnnnnnnnnnnnnnnngagccaaagagaggtcacggtggccagtatcaatgacagtgaaggactgttggcgacagannnnnnnnnnnnnnnnnnnnnnnnnnnnnnnnnnnnnnnnnnnnnnnnnnnnnnnnnnnnnnnnnnnnnnnnnnnnnnnnnnnnnnnnnnnnnnnnnnnnnnnnnnnnnnnnnnnnnnnnnnnnnnnnnnnnnnnnnnnnnnnnnnnnnnnnnnnnnnnnnnnnnnnnnnnnnnnnnnnnnnnnnnnnnnnnnnnnnnnnnnnnnnnnnnnnnnnnnnnnnnnnnnnnnnnnnnnnnnnnnnnnnnnnnnnnnnnnnnnnnnnnnnnnnnnnnnnnnnnnnnnnnnnnnnnnnnnnnnnnnnnnnnnnnnnnnnnnnnnnnnnnnnnnnnnnnnnnnnnnnnnnnnnnnnnnnnnnnnnnnnnnnnnnnnnnnnnnnnnnnnnnnnnnnnnnnnnnnnnnnnnnnnnnnnnnnnnnnnnnnnnnnnnnnnnnnnnnnnnnnnnnnnnnnnnnnnnnnnnnnnnnnnnnnnnnnnnnnnnnnnnnnnnnnnnnnnnnnnnnnnnnnnnnnnnnnnnnnnnnnnnnnnnnnnnnnnnnnnnnnnnnnnnnnnnnnnnnnnnnnnnnnnnnnnnnnnnnngcctatgggcatcttctccatcctggaagaggagtgcatgttccccaaggcaacagacacctccttcaagaacaagctgtatgaccagcatcttggaaaatccaacaacttccagaagcccaagcctgccaaaggcaagcctgaggctcacttctcgctggtgcactacgccggcaccgtggactacaacattgccggctggctcgacaagaacaaggaccccctgaacgagactgtggtgnggctgtaccagaagtcttcgctgaagcttctctccttccttttttccactatgctggtgcagacacaggnnnnnnnnnnnnnnnnnnnnnnnnnnnnnnnnnnnnnnnnnnnnnnnnnnnnnnnnnnnnnnnnnnnnnnnnnnnnnnnnnnnnnnnnnnnnnnnnnnnnnnnnnnnnnnnnnnnnnnnnnnnnnnnnnnnnnnnnnnnnnnnnnnnnnnnnnnnnnnnnnnnnnnnnnnnnnnnnnnnnnnnnnnnnnnnnnnnnnnnnnnnnnnnnnnnnnnnnnnnnnnnnnnnnnnnnnnnnnnnnnnnnnnnnnnnnnnnnnnnnnnnnnnnnnnnnnnnnnnnnnnnnnnnnnnnnnnnnnnnnnnnnnnnnnnnnnnnnnnnnnnnnnnnnnnnnnnnnnnnnnnnnnnnnnnnnnnnnnnnnnnnnnnnnnnnnnnnnnnnnnnnnnnnnnnnnnnnnnnnnnnnnnnnnnnnnnnnnnnnnnnnnnnnnnnnnnnnnnnnnnnnnnnnnnnnnnnnnnnnnnnnnnnnnnnnnnnnnnnnnnnnnnnnnnnnnnnnnnnnnnnnnnnnnnnnnnnnnnnnnnnnnnnnnnnnnnnnnnnagggactccatcttctgcatccagtacaacatccgctcttttatgaatgtcaagcactggccctggatgaacctgttcttcaaaatcaagcccctactgaagagtgcagaggctgagaaggagatggccaccatgaaggaagacttcgagaggaccaaggaagaactggcccgatccgagnnnnnnnnnnnnnnnnnnnnnnnnnnnnnnnnnnnnnnnnnnnnnnnnnnnnnnnnnnnnnnnnnnnnnnnnnnnnnnnnnnnnnnnnnnnnnnnnnnnnnnnnnnnnnnnnnnnnnnnnnnnnnnnnnnnnnnnnnnnnnnnnnnnnnnnnnnnnnnnnnnnnnnnnnnnnnnnnnnnnnnnnnnnnnnnnnnnnnnnnnnnnnnnnnnnnnnnnnnnnnnnnnnnnnnnnnnnnnnnnnnnnnnnnnnnnnnnnnnnnnnnnnnnnnnnnnnnnnnnnnnnnnnnnnnnnnnnnnnnnnnnnnnnnnnnnnnnnnnggtaaagaatctctccgaacaaatgacagcacttgaagaaaacatttccaaattgaccaaagaaaagaagtcgctacaggaggcccatcagcaaacactggatgaccttcaggttgaataagataaagtcaatggtctaatcaaaataaatgccaagcttgaacagcaaacagatgatttgagggttccttagagcaggaaaaaaaactgcgggcggacctggaaagggcgaagannnnnnnnnnnnnnnnnnnnnnnnnnnnnnnnnnnnnnnnnnnnnnnnnnnnnnnnnnnnnnnnnnnnnnnnnnnnnnnnnnnnnnnnnnnnnnnnnnnnnnnnnnnnnnnnnnnnnnnnnnnnnnnnnnnnnnnnnnnnnnnnnnnnnnnnnnnnnnnnnnnnnnnnnnnnnnnnnnnnnnnnnnnnnnnnnnnnnnnnnnnnnnnnnnnnnnnnnnnnnnnnnnnnnnnnnnnnnnnnnnnnnnnnnnnnnnnnnnnnnnnnnnnnnnnnnnnnnnnnnnnnnnnnnnnnnnnnnnnnnnnnnnnnnnnnnnnnnnnnnnnnnnnnnnnnnnnnnnnnnnnnnnnnnnnnnnnnnnnnnnnnnnnnnnnnnnnnnnnnnnnnnnnnnnnnnnnnnnnnnnnnnnnnnnnnnnnnnnnnnnnnnnnnnnnnnnnnnnnnnnnnnnnnnnnnnnnnnnnnnnnnnnnnnnnnnnnnnnnnnnnnnnnnnnnnnnnnnnnnnnnnnnnnnnnnnnnnnnnnnnnnnnnnnnnnnnnnnnnnnnnnnnnnnnnnnnnnnnnnnnnnnnnnnnnnnnnnnnnnnnnnnnnnnnnnnnnnnnnnnnnnnnnnnnnnnnnnnnnnnnnnnnnnnnnnnnnnnnnnnnnnnnnnnnnnnnnnnnnnnnnnnnnnnnnnnnnnnnnnnnnnnnnnnnnnnnnnnnnnnnnnnnnnnnnnnnnnnnnnnnnnnnnnnnnnnnnnnnnnnnnnnnnnnnnnnnnnnnnnnnnnnnnnnnnnnnnnnnnnnnnnnnnnnnnnnnnnnnnnnnnnnnnnnnnnnaggccaagaacgccctggcacacgccctgcagtcctcccgccacgactgtgacctgctgcgggaacagtatgaggaggaacaggaagctaaggccgagctgcagagggtgctgtccaaggccaacagtgaggttgctcagtggaggaccaaatacgagacggacgccatccagcgcacagaggagctggaggaggccaannnnnnnnnnnnnnnnnnnnnnnnnnnnnnnnnnnnnnnnnnnnnnnnnnnnnnnnnnnnnnnnnnnnnnnnnnnnnnnnnnnnnnnnnnnnnnnnnnnnnnnnnnnnnnnnnnnnnnnnnnnnnnnnnnnnnnnnnnnnnnnnnnnnnnnnnnnnnnnnnnnnnnnnnnnnnnnnnnnnnnnnnnnnnnnnnnnnnnnnnnnnnnnnnnnnnnnnnnnnnnnnnnnnnnnnnnnnnnnnnnnnnnnnnnnnnnnnnnnnnnnnnnnnnnnnnnnnnnnnnnnnnnnnnnnnnnnnnnnnnnnnnnnnnnnnnnnnnnnnnnnnnnnnnnnnnnnnnnnnnnnnnnnnnnnnnnnnnnnnnnnnnnnnnnnnnnnnnnnnnnnnnnnnnnnnnnnnnnnnnnnnnnnnnnnnnnnnnnnnnnnnnnnnnnnnnnnnnnnnnnnnnnnnnnnnnnnnnnnnnnnnnnnnnnnnnnnnnnnnnnnnnnnnnnnnnnnnnnnnnnnnnnnnnnnnnnnnnnnnnnnnnnnnnnnnnnnnnnnnnnnnnnnnnnnnnnnnnnnnnnnnnnnnnnnnnnnnnnnnnnnnnnnnnnnnnnnnnnnnnnnnnnnnnnnnnnnnnnnnnnnnnnnnnnnnnnnnnnnnnnnnnnnnnnnnnnnnnnnnnnnnnnnnnnnnnnnnnnnnnnnnnnnnnnnnnnnnnnnnnnnnnnnnnnnnnnnnnnnnnnnnnnnnnnnnnnnnnnnnnnnnnnnnnnnnnnnnnnnnnnnnnnnnnnnnnnnnnnnnnaggactcccagctgcacctggacgatgccctgaggagcaatgaggacctcaaggagcagctggccatcgtggagcgcaggaatggcctcctgttggaggagctggaggaaatgaaggtggccctggagcaaacggagcggacccgcaggctgtcggagcaggagctgctggacgccagcgaccgcgtgcagctcctgcactccca

SEQ ID NO: 29317 - DNA, 454 bp, Macaca Mulatta
agccattatacttgcccacgaatctttgagaacattataaagacctttgtgcctcttcttgcaaggtgttttctcagctgttatctcaagacatggatataaaaaattcaccatctagccttaattctccttcctcctacaactgcagtcaatccatcttacccctggagcacggctctatatacataccttcctcctatgtagagagccaccatgaatatccagccatgccattctatagccctgctgtgatgaattacagcagtcccagcaatgtcactaacttggaaggtgggcctggtcggcagaccgcaagcccaaatgtgttgtggccaacacctggacacctttctcctttagcagtccatcgccagttatcacatctatatgcagaacctcaaaagagtccctggtgtgaagcaagatcactagaacacaccttacctgtaaacag

SEQ ID NO: 29318 - DNA, 602 bp, Macaca Mulatta
  misc_feature (1)...(602): n = A,T,C or G
gggatggcaaggcaataaatgtgttcataagtgccaaccgactaattcatcaaaccaacttaatacttcagaccttcaaaactgtggcctgaaagttgtatatgttaagagatgtacttctcagtggcagtattgaactgcctttatctgtaaattttaaagtttgactgtataaattatcagtccctcctgaagggatctaatccaggatgttgaatgggattattgccatcttacaccatatttttgtaaaatgtagcttaatcataatctcacactgaagattttgcatcacttttgctattatcattcttttaagaattataagccaaaaaaattttacgcctaaatgtgtcattatataacatttcctttaaaaaaattgtaaattattggtggttggtttccgaacatttttaactttgaaaaccgaaatgcttgccagannnnnnnnnnnnnnnnnnnnnnnttgggtgggccaaatattccaataaaataagtttaacattcggtttaaaacatttttcctttaccnnnnnnnnnnnnnnnnnnnnnnnnnnnnnnnnnnnnnnnnnnccctcattataaaaataaaaaggggg

SEQ ID NO: 29319 - DNA, 230 bp, Macaca Mulatta
agtggatatgaccttggatgccaacacagccaacaacttcctcctcatttctgatgacctcaggagcgtccgaagtgggcgcatcagacagaatcggcaagactttgccgagagatttgacttgtccatttgtgtcctgggctcctctcgctttacctgtggccgccactactaggaggtagacgtgggaacaagcacagaatgggacctgggaatctgcaggaatctgt

SEQ ID NO: 29320 - DNA, 594 bp, Macaca Mulatta
  misc_feature (1)...(594): n = A,T,C or G
gtggatactgaaagatgtatagctttttgattagagcaatggagtgcataaattagaaacttctaangtgcactgngttttcaagagagatatatatataaaatgcatttattctgtcaggttaaaatataaagtatgatctttatgattgatttttttccctctaattatagaaagttaaataatgtattaccatgaaaaatgtttctaatattaaatagaacatatcagttgcagagttcctaatgtgtatttttaaagcacatatctgaataaattgcctagatagaaaaaaattatcacatgagtaaaatttagtgttcaaaacattgagacactcttcacctattgtatgaccaaataaaggttatgctgcttgtttttcttttgtgccttttttttaccctgaattgagataagcagtttgacttactagattacaactttggcagttcaaagtctttgttgaagactttgaagaaaaagatttggaaaaattgttgacttttggccgggcatgatggctcacannnnnnnnnnnnnnatnnnnnnnnnnnnnnnngnnnnnnnnnnnnnnnnntagatcatcgagac

SEQ ID NO: 29321 - DNA, 2428 bp, Macaca Mulatta
  misc_feature (1)...(2428): n = A,T,C or G
aggttttacacatccataagtagacctttttggagcctcaccagccaattcaatggcgtcctcttctactgtgcctctgggatttcactatgaaacaaagtatgttgttctcagctacttgggactcctctctcaagagaagctgcaagagcaacatctttcctcaccccaagnnggggttcaactagatatagcttcacaatctctggatcaagaaattttattaaaagttaaaactgaaattgaagaagagctaaaatctctggacaaagaaatttctgaagnnnnnnnnnnnnnnnnnnnnnnnnnnnnnnnnnnnnnnnnnnnnnnnnnnnnnnnnnnnnnnnnnnnnnnnnnnnnnnnnnnnnnnnnnnnnnnnnnnnnnnnnnnnnnnnnnnnnnnnnnnnnnnnnnnnnnnnnnnnnnnnnnnnnnnnnnnnnnnnnnnnnnnnnnnnnnnnnnnnnnnnnnnnnnnnnnnnnnnnnnnnnnnnnnnnnnnnnnnnnnnnnnnnnnnnnnnnnnnnnnnnnnnnnnnnnnnnnnnnnnnnnnnnnnnnnnnnnnnnnnnnnnnnnnnnnnnnnnnnnnnnnnnnnnnnnnnnnnnnnnnnnnnnnnnnnnnnnnnnnnnnnnnnnnnnnnnnnnnnnnnnnnnnnnnnnnnnnnnnnnnnnnnnnnnnnnnnnnnnnnnnnnnnnnnnnnnnnnnnnnnnnnnnnnnnnnnnnnnnnnnnnnnnnnnnnnnnnnnnnnnnnnnnnnnnnnnnnnnnnnnnnnnnnnnnnnnnnnnnnnnnnnnnnnnnnnnnnnnnnnnnnnnnnnnnnnnnnnnnnnnnnnnnnnnnnnnnnnnnnnnnnnnnnnnnnnnnnnnnnnnnnnnnnnnnnnnnnnnnnnnnnnnnnnnnnnnnnnnnnnnnnnnnnnnnnnnnnnnnnnnnnnnnnnnnnnnnnnnnnnnnnnnnnnnnnnnnnnnnnnnnnnnnnnnnnnnnnnnnnnnnnnnnnnnnnnnnnnnnnnnnnnnnnnnnnnnnnnnnnnnnnnnnnnnnnnnnnnnnnnnnnnnnnnnnnnnnnnnnnnnnnnnnnnnnnnnnnnnnnnnnnnnnnnnnnnnnnnnnnnnnnnnnnnnnnnnnnnnnnnnnnnnnnnnnnnnnnnnnnnnnnnnnnnnnnnnnnnnnnnnnnnnnnnnnnnnnnnnnnnnnnnnnnnnnnnnnnnnnnnnnnnnnnnnnnnnnnnnnnnnnnnnnnnnnnnnnnnnnnnnnnnnnnnnnnnnnnnnnnnnnnnnnnnnnnnnnnnnnnnnnnnnnnnnnnnnnnnnnnnnnnnnnnnnnnnnnnnnnnnnnnnnnnnnnnnnnnnnnnnnnnnnnnnnnnnnnnnnnnnnnnnnnnnnnnnnnnnnnnnnnnnnnnnnnnnnnnnnnnnnnnnnnnnnnnnnnnnnnnnnnnnnnnnnnnnnnnnnnnnnnnnnnnnnnnnnnnnnnnnnnnnnnnnnnnnnnnnnnnnnnnnnnnnnnnnnnnnnnnnnnnnnnnnnnnnnnnnnnnnnnnnnnnnnnnnnnnnnnnnnnnnnnnnnnnnnnnnnnnnnnnnnnnnnnnnnnnnnnnnnnnnnnnnnnnnnnnnnnnnnnnnnnnnnnnnnnnnnnnnnnnnnnnnnnnnnnnnnnnnnnnnnnnnnnnnnnnnnnnnnnnnnnnnnnnnnnnnnnnnnnnnnnnnnnnnnnnnnnnnnnnnnnnnnnnnnnnnnnnnnnnnnnnnnnnnnnnnnnnnnnnnnnnnnnnnnnnnnnnnnnnnnnnnnnnnnnnnnnnnnnnnnnnnnnnnnnnnnnnnnnnnnnnnnnnnnnnnnnnnnnnnnnnnnnnnntccacccactagatgccagtggcacacccctcccagagatgacaaccgaaaatgtctgtagacattgccacatgttccttgtgaacatcccctgtggagacccactgctttagcggaagagggtttacttaggaggaattgggatagaaatccccagctgagagagcttagctgtgggctcctcagctactgacttgttagctcttaatccccttagaatttcatctttcctgatgagcaggctnnnnnnnnnnnnnnnnnnnnnnnnnnncctcatcctggagtgtgagggtgctcgcccgtactctcagctgcctctcagggactgcactgttcctcttcacccccaggttcctgctaaaatcccannnnnnnnnnnnnnnnnnnnnnnnnnntgtcaagtccccaaagcttcctgcagctccaccttgtaaaaatgctgcctttaggaatctttgaaatatgtatacagagaaaataacatgaaagagacctggggtccccacttgtgagtgcaattgcaagtcagtctgcctagagagacacatttgtcttgtgtcaaggcaggaggaaaacccggatgaccttct

SEQ ID NO: 29322 - DNA, 173 bp, Macaca Mulatta
ttcactgattaccaaagctatgtcatccatggctgcctggagaataatccaactttggaaagatcgatagctttatttaatggaatctctaagtgggtccaattgatggttcttagcaaaccaaccccccagcaaagggcagaagtcatcacaaagtttatcaatgttgcaaa

SEQ ID NO: 29323 - DNA, 407 bp, Macaca Mulatta
  misc_feature (1)...(407): n = A,T,C or G
ggtttaagtctagtgcagcgtttaaggcctgatttcaaacggaagtattcttcaatgttcgaagacgatactgtgacagaatacatctaccactgtaatgtacagactccaannnnnnnnnnnnnnnnnnnnnnnnnnnnnnnnnnnnnnnnnnnnnnnnnnnnnnnnnnnnnnnnnnnnnnnnnnnnnnnnnnnnnnnnnnnnnnnnnnnnnnnnnnnnnnnnnnnnnnnnnnnnnnnnnnnnnnnnnnnnnnnnnnnnnnnnnnnnnnnnnnnnnnnnnnnnnnnnnnnnnnnnnnnctattcttggggcaggacattatgtatatgcagatcaaccagaagaattcaaccagaaagtaaaggagatctgcgacactgtgaactgaacacactgaagctctgatg

SEQ ID NO: 29324 - DNA, 777 bp, Macaca Mulatta
  misc_feature (1)...(777): n = A,T,C or G
atggatggcatcattgaacagaagagcatgctggtgcacagtaaaatcagtgatgctggcaagaggaatggcttaattaacaccagaaacttgatggccgagagcagagatggtctggtgtctgtttacccagcgccccagtaccagagccaccgggtgggggccagcacagtgccggccagcctggacagcagcaggagtgagccggtgcagcagctgctggaccccaacaccctgcagcagtcggtggagtcccgctacaggcccaacatcatcctctattcagagggtgtgctgcgttcctggggggacggtgtgaccaccgactgctgcgagaccaccttcatcgaggaccgatcgcccaccaaagacagcctcgagtaccccgatgggaagttcatcgacctctcagctgatgacataaaaatccataccctgtcctacgatgnnnnnnnnnnnnnnnnnnnnnnnnnnnnngagcgactactcgagcgacacagagagtgaggacaatttcctcatgatgcccccgcnnnnnnnnnnnnnnnnnnnnnnnnnnnnnnnnnnnnnnnnnnnnnnnnnnnnnnnnnnnnnnnnnnnnnnnnnnnnnnnnnagaccaacaaaagccgtagccaaggggggatttgcaccagcccagcaccagctcccgggggggccctgttccgggcagtgctgtacatcaccattgggactggcgtctatgtgggcgtggccgtgaccctcatcgcctacctctccaagaacaaccacctgtg

SEQ ID NO: 29325 - DNA, 192 bp, Macaca Mulatta
tttccgcatatgcttctgtccagcgatccctcctgccctgtgttggggggttaggagggggtgttcccggggacctgctggggtctccttcatcaaaccacagctgctgggagctgagtttggcttggagactgacacttcgtgagagcccacccctaggccgggtgcatcttttgtgattgctggagctaa

SEQ ID NO: 29326 - DNA, 810 bp, Macaca Mulatta
  misc_feature (1)...(810): n = A,T,C or G
gggaatatgtcaacaaagatagggaacgagggagagtgatggtgcagatggctttatcttatatatgcaaaggagccaatctcagaagcacaaagaaaaaagtgtgcataccttattttgtagagataaagatgatgtctttttgttgtctgttcattttgtatgtgtctgagataaggaatagagaggaaacatccatcaggctaatttaactacnnnnnnnnnnnnnnnnnnggaaacataacctctagatgggacagcagaggagagttagtggaggccacacaatattatgggctgctgtgttttactgttctaaaatcaatatggatggaatatgtatatgttaagtgatcatttcacatcttaggaatgcctactcattttattttattctagtgatgttcaattcactatttaatttattatattttctcttctgtggcacttatacaaaatatctcttcacctacttagttctacagggttttaactttggaacaacatgaataaaatcattgaaaaggcaaatattctttagcaacatgaatataataaagcttaaagttgtacactttaatcacatacattttcttttcctgtggttttcttttggcttcttaaaaaatccggtagtggttagtgggtagtaaagaaatttgaaagtacttttccccccttgnnnnnnnnnnnnnnnnnnnnnnnnnnnnttccctccccaaaataactcccagggggggcaattggtttttattaacacaaatttttctcccccccgggggtggatttgaaaaggaaggggagggaaaa

SEQ ID NO: 29327 - DNA, 958 bp, Macaca Mulatta
  misc_feature (1)...(958): n = A,T,C or G
gggcttcttttcctgcaattgctctatcacttcttccctgtcaagtcccgcccttgcagctacctccaactgcagaggaaccggttgcctaaaaggagccggcaaaagcgcctacgtggagtccagaggagcggaagtagtcagatttgactgagagccgtaaagcgcggctggctctcgttttccggataacgactacagctccgactgtcagtgccggccttcctcgtgtgaggggatctgccggacccttgcaaattcaatttctttcccattccgggcccttccctatcgtcgcccccttcaccttggatcatgttcaagaaatttgatgaaaaagaaaatgtgtccaactgcatccagttgaaaacttctgttattaagggtattaagaatcaattgatagagcaatttccaggtattgaaccatggcttaatcaaatcatgcctaagaaagatcctgtcaaaatagtccgatgccatgaacatatagaaattcttacagtaaatggagaattactcttttttagacaaagagaagggcctttttatccaaccctaagattacttcacaaatatccttttatcctgccacaccagcaagttgataaaggagccatcaaatttgtactcagtggagcaaatatcatgtgtccaggcttaacttctcctggagctaagctttaccctgctgcagtagataccattgttgctatcatggcagaaggaaaacagcatgctctatgtgttggagtcatgaagatgtctgcagaagacattgagaaagtcaacaaaggaattggcattggaaatatccattatttaaatgatgggctgtggcatatgaagacatataaatgagcctcagaaggaatgcacttgggctaaatatggatattnggctggatctgtggtttgtggtcggtgtgtgacagcatgaagataaatgccctgtggt

SEQ ID NO: 29328 - DNA, 551 bp, Macaca Mulatta
acctaactaccataatgaatgctgcatattaagagaaaccacaagaaggttatatgtttggttgtctaatattcttggatttgatatgaaccaacacatagtccttgttgtcattgacagaaccccagtttgtatgtacattattcatattcctctctgttgtgttttggggggaaaagacattttagccttttttaaaagttactgatttaatttcatgttatttggttgcatgaggttgcccttaaccactaaggattatcaagatttttgcgcagacttatacatgtctaggatccttttatcaaggcagttatgatcatcattttcctgccttgaccccaccatcaccaaacactcagttaaatataaattaacattttttagatgaccactcaacataatgcttaagaatggaatttcctctctttgacagacccaggaattaattcctaaatacataatgttggtatattgaagacgaaattaaaattgtccttcagttttgaggccatgtgtaaagtttaaccatattgtaaaatatctattcc

SEQ ID NO: 29329 - DNA, 476 bp, Macaca Mulatta
  misc_feature (1)...(476): n = A,T,C or G
ttgtgtgctctacctcatcagctgcttcacccagctcatcgacctgtccacgacgctctcggatgtggctggctacacgcacagnnnnnnnnnnnnnnnnnnnnnnnnnnnnnnnnnnnnnnnnnnnnnnnnnnnnnnnnnnnnnnnnnnnnnnnnnnnnnnnnnnnnnnnnnnnnnnnnnnnnnnnnnnnnnnnnnnnnnnnnnnnnnnnnnnnnnnnnnnnnnnnnnnnnnnnnnnnnnnnnnnnnnnnnnnnnnnnnnnnnnnnnnnnnnnnnnnnnnnnnnnnnnnnnnnnnnnnnnnnnnnnnnnnnnnnnnnnnnnnnnnnnnnnnnnnnnnnnnnnnnnnnnnnnnnnnnnnnnnnnnnnnnnnnnnnnnnnnnngctcagtgcagatgctgacggactttgggccccatggggtgctattcctgccacaaaagccattcttttttgacgggacccttcgggagcaggt

SEQ ID NO: 29330 - DNA, 2477 bp, Macaca Mulatta
  misc_feature (1)...(2477): n = A,T,C or G
aagggaccagtaattctctatctacttgtacaaaatctggtccatctcccctttcctctccaaatgggaagttaacagtagcaagtcctaagcgtgggcaaaagagggaagaaggatggaaagaagttgtaagaaggtntcaaagaaagtatctgttccatcaactgtgatatccagagtgattggaagaggaggctgtaatatcaacgctattcgggagtttactggtgcacacatagatatcgataaacagaaagacaagactggagaccggataatcactataaggcannnnnnnnnnnnnnnnnnnnnnnnnnnnnnnnnnnnnnnnnnnnnnnnnnnnnnnnnnnnnnnnnnnnnnnnnnnnnnnnnnnnnnnnnnnnnnnnnnnnnnnnnnnnnnnnnnnnnnnnnnnnnnnnnnnnnnnnnnnnnnnnnnnnnnnnnnnnnnnnnnnnnnnnnnnnnnnnnnnnnnnnnnnnnnnnnnnnnnnnnnnnnnnnnnnnnnnnnnnnnnnnnnnnnnnnnnnnnnnnnnnnnnnnnnnnnnnnnnnnnnnnnnnnnnnnnnnnnnnnnnnnnnnnnnnnnnnnnnnnnnnnnnnnnnnnnnnnnnnnnnnnnnnnnnnnnnnnnnnnnnnnnnnnnnnnnnnnnnnnnnnnnnnnnnnnnnnnnnnnnnnnnnnnnnnnnnnnnnnnnnnnnnnnnnnnnnnnnnnnnnnnnnnnnnnnnnnnnnnnnnnnnnnnnnnnnnnnnnnnnnnnnnnnnnnnnnnnnnnnnnnnnnnnnnnnnnnnnnnnnnnnnnnnnnnnnnnnnnnnnnnnnnnnnnnnnnnnnnnnnnnnnnnnnnnnnnnnnnnnnnnnnnnnnnnnnnnnnnnnnnnnnnnnnnnnnnnnnnnnnnnnnnnnnnnnnnnnnnnnnnnnnnnnnnnnnnnnnnnnnnnnnnnnnnnnnnnnnnnnnnnnnnnnnnnnnnnnnnnnnnnnnnnnnnnnnnnnnnnnnnnnnnnnnnnnnnnnnnnnnnnnnnnnnnnnnnnnnnnnnnnnnnnnnnnnnnnnnnnnnnnnnnnnnnnnnnnnnnnnnnnnnnnnnnnnnnnnnnnnnnnnnnnnnnnnnnnnnnnnnnnnnnnnnnnnnnnnnnnnnnnnnnnnnnnnnnnnnnnnnnnnnnnnnnnnnnnnnnnnnnnnnnnnnnnnnnnnnnnnnnnnnnnnnnnnnnnnnnnnnnnnnnnnnnnnnnnnnnnnnnnnnnnnnnnnnnnnnnnnnnnnnnnnnnnnnnnnnnnnnnnnnnnnnnnnnnnnnnnnnnnnnnnnnnnnnnnnnnnnnnnnnnnnnnnnnnnnnnnnnnnnnnnnnnnnnnnnnnnnnnnnnnnnnnnnnnnnnnnnnnnnnnnnnnnnnnnnnnnnnnnnnnnnnnnnnnnnnnnnnnnnnnnnnnnnnnnnnnnnnnnnnnnnnnnnnnnnnnnnnnnnnnnnnnnnnnnnnnnnnnnnnnnnnnnnnnnnnnnnnnnnnnnnnnnnnnnnnnnnnnnnnnnnnnnnnnnnnnnnnnnnnnnnnnnnnnnnnnnnnnnnnnnnnnnnnnnnnnnnnnnnnnnnnnnnnnnnnnnnnnnnnnnnnnnnnnnnnnnnnnnnnnnnnnnnnnnnnnnnnnnnnnnnnnnnnnnnnnnnnnnnnnnnnnnnnnnnnnnnnnnnnnnnnnnnnnnnnnnnnnnnnnnnnnnnnnnnnnnnnnnnnnnnnnnnnnnnnnnnnnnnnnnnnnnnnnnnnnnnnnnnnnnnnnnnnnnnnnnnnnnnnnnnnnnnnnnnnnnnnnnnnnnnnnnnnnnnnnnnnnnnnnnnnnnnnnnnnnnnnnnnnnnnnnnnnnnnnnnnnnnnnnnnnnnnnnnnnnnnnnnnnnnnnnnnnnnnnnnnnnnnnnnnnnnnnnnnnnnnnnnnnnnnnnnnnnnnnnnnnnnnnnnnnnnnnnnnnnnnnnnnnnnnnnnnnnnnnnnnnnnnnnnnnnnnnnnnnnnnnnnnnnnnnnnnnnnnnnnnnnnnnnnnnnnnnnnnnnnnnnnnnnnnnnnnnnnnnnnnnnnnnnnnnnnnnnnnnnnnnnnnnnnnnnnnnnnnnnnnnnnnnnnnnnnnnnnnnnnnnnnnnnnnnnnnnnnnnnnnnnnnnnnnnnnnnnnnnnnnnnnnnnnnnnnnnnnnnnnnnnnnnnnnnnnnnnnnnnnnnnnnnnnnnnnnnnnnnnnnnnnnnnnnnnnnnnnnnnnnnnnnnnnnnnnnnnnnnnnnnnnnnnnnnnnnnnnnnnnnnnnnnnnnnnnnnnnnnnnnnnnnnnnnnnnnnnnnnnnnnnnnnnnnnnnnnnnnnnnnnnnnnnnnnnnnnnnnnnnnnnnnnnnnnnnnnnnnnnnagacaaagtagactggtgtaaccctgggatgggaaatcctatgatccacagaccgatgtctgacccaggagtattttcgcaacatcaggcaatggagcgagagagta

SEQ ID NO: 29331 - DNA, 990 bp, Macaca Mulatta
ggggctctctctcaccccgctgcttctaggttctgggaagatggcgaaggtctcagagctttacgatgtcacttgggaagaaatgcgagataaaatgagaaaatggagagaagaaaactcacgaaatagtgagcaaattgtagaagttggagaagaattaattaatgaatatgcttctaagctgggagatgatatttggatcatatatgaacaggtgatgattgcagcactagactatggtcgagatgacttggcattgttttgtcttcaagagctaagaagacagttccctggcagtcacagagtcaagcgattaacaggcatgagatttgaagccatggaaagatatgatgatgctgtacagctatatttttttattttacaagaagatccaactaacactgctgcaagaaagcgtaagattgccattcgaaaagcccaggggaaaaatgttgaggccattcgggaactgaatgagtatctggaacaatttgttggagaccaagaagcctggcatgaacttgcagaactttacgtcaatgaacatgactatgcaaaagcagccttttgtttagaggaactaatgatgactaatccacacaaccacttatactgtcagcagtatgctgaagttaaatatacccaaggtggacttgaaaacctcgaactttcaagaaagtattttgcacaggcattgaagctgaacaacagaaatatggagagctttgtttgggctttatatgtcggccagtcatattgcttctaatcccaaagcaagtgcaaaaacgaaaaaggacaacatgaaatatgctaggtggggcgctagtccaattaaccgagcttatcagtttgcaggtccaagtaagaaaggaaacccaaatattcctcttaaggctgtccaaaaactgtttggaaaccatttgcaaattaccccagtcttaaaggttttccaaaaacttcttttgacatttaaaatttcccccacctggc

SEQ ID NO: 29332 - DNA, 4748 bp, Macaca Mulatta
  misc_feature (1)...(4748): n = A,T,C or G
agggaacaccttcagcactctggccggactggtcttcgagtggacgattgtgaaggactccgaggcggacaggttctcagactcccacaatgcactgcnnnnnnnnnnnnnnnnnnnnnnnnnnnnnnnnnnnnnnnnnnnnnnnnnnnnnnnnnnnnnnnnnnnnnnnnnnnnnnnnnnnnnnnnnnnnnnnnnnnnnnnnnnnnnnnnnnnnnnnnnnnnnnnnnnnnnnnnnnnnnnnnnnnnnnnnnnnnnnnnnnnnnnnnnnnnnnnnnnnnnnnnnnnnnnnnnnnnnnnnnnnnnnnnnnnnnnnnnnnnnnnnnnnnnnnnnnnnnnnnnnnnnnnnnnnnnnnnnnnnnnnnnnnnnnnnnnnnnnnnnnnnnnnnnnnnnnnnnnnnnnnnnnnnnnnnnnnnnnnnnnnnnnnnnnnnnnnnnnnnnnnnnnnnnnnnnnnnnnnnnnnnnnnnnnnnnnnnnnnnnnnnnnnnnnnnnnnnnnnnnnnnnnnnnnnnnnnnnnnnnnnnnnnnnnnnnnnnnnnnnnnnnnnnnnnnnnnnnnnnnnnngtattcgcatgcaaggtgcttctaggttacccaacagcaccatctacgtggtcgaacctggatacctnnnnnnnnnnnnnnnnnnnnnnnnnnnnnnnnnnnnnnnnnnnnnnnnnnnnnnnnnnnnnnnnnnnnnnnnnnnnnnnnnnnnnnnnnnnnnnnnnnnnnnnnnnnnnaacatccgaattgaaactgtgcttcctgctgagttctttgaggtgctctcatcctcccagaatggttcgtaccatcatgtcagggcactaaagaggggacagacggccattgacgcggccctcacctctgtggtagaccaggcaagnnnnnnnnnnnnnnnnnnnnnnnnnnnnnnnnnnnnnnnnnnnnnnnnnnnnnnnnnnnnnnnnnnnnnnnnnnnnnnnnnnnnnnnnnnnnnnnnnnnnnnnnnnnnnnnnnnnnnnnnnnnnnnnnnggcccatggtggcagtgggaacttcagctggtcttcgtcaagctacctggttgccacagttactgtcaagggcgtaatgaccacaggcagtgacaccgggctcagtgtgatccaggcacacgatgtgcagaacccactccatttcggtgagatgaaggtnnnnnnnnnnnnnnnnnnnnnnnnnnnnnnnnnnnnnnnnnnnnnnnnnnnnnnnnnnnnnnnnnnnnnnnnnnnnnnnnnnnnnnnnnnnnnnnnnnnnnnnnnnnnnnnnnnnnnnnnnnnnnnnnnnnnnnnnnnnnnnnnnnnnnnnnnnnnnnnnnnnnnnnnnnnnnnnnnnnnnnnnnnnnnnnnncagggaggctgccgccgggctctgagcactgtagcggagtccgggtaaaggccgaggcccagggctctaccacgctccttgtgagctacagacatggccacgtgcacctgagtgccaaaatcaccattgctgcctacctgcctctcaagnnnnnnnnnnnnnnnnnnnnnnnnnnnnnnnnnnnnnnnnnnnnnnnnnnnnnnnnnnnnnnnnnnnnnnnnnnnnnnnnnnnnnnnnnnnnnnnnnnnnnnnnnnnnnnnnnnnnnnnnnnnnnnnnnnnnnnnnnnnnnnnnnnnnnnnnnnnnnnnnnnnnnnnnnnnnnnnnnnnnnnnnnnnnnnnnnnnnnnnnnnnnnnnnnnnnnnnnnncaggtcatcgccctgtcggtggggaacaagcccagcctcaccaaccccttccctgcggtggagcctgctgtggtgaagtttgtctgcgccccaccgtccaggctcacccttgcgcctgtctacaccagcccccagctagacctgtcctgtccgctgctgcagcagaacaagcaggtggnnnnnnnnnnnnnnnnnnnnnnnnnnnnnnnnnnnnnnnnnnnnnnnnnnnnnnnnnnnnnnnnnnnnnnnnnnnnnnnnnnnnnnnnnnnnnnnnnnnnnnnnnnnnnnnnnnnnnnnnnnnnnnnnnnnnnnnnnnnnnnnnnnnnnnnnnnnnnnnnnnnnnnnnnnnnnnnnnnnnnnnnnnnnnnnnnnnnnnnnnnnnnnnnnnnnnnnnnnnnnnnnnnnnnnnnnnnnnnnnnnnnnnnnnnnnnnnnnnnnnnnnnnnnnnnnnnnnnnnnnnnnnnnnnnnnnnnnnnnnnnnnnnnnnnnnnnnnnnnnnnnnnnnnnnnnnnnnnnnnnnnnnnnnnnnnnnnnnnnnnnnnnnnnnnnnnnnnnnnnnnnnnnnnnnnnnnnnnnnnaggcggagctccgtgtcagggaaggctcaggttacttctttctcaacaccccctcaacagatgttgtcaaggtggcctaccaggaggccaggggtgtcgccatggtnnnnnnnnnnnnnnnnnnnnnnnnnnnnnnnnnnnnnnnnnnnnnnnnnnnnnnnnnnnnnnnnnnnnnnnnnnnnnnnnnnnnnnnnnnnnnnnnnnnnnnnnnnnnnnnnnnnnnnnnnnnnnnnnnnnnnnnnnnnnnnnnnnnnnnnnnnnnnnnnnnnnnnnnnnnnnnnnnnnnnnnnnnnnnnnnnnnnnnnnnnnnnnnnnnnnnnnnnnnnnnnnnnnnnnnnnnnnnnnnnnnnnnnnnnnnnnnnnnnnnnnnnnnnnnnnnnnnnnnnnnnnnnnnnnnnnnnnnnnnnnnnnnnnnnnnnnnnnnnnnnnnnnnnnnnnnnnnnnnnnnnnnnnnnnnnnnnnnnnnnnnnnnnnnnnnnnnnnnnnnnnnnnnnnnnnnnnnnnnnnnnnnnnnnnnnnnnnnnnnnnnnnnnnnnnnnnnnnnnnnnnnnnnnnnnnnnnnnnnnnnnnnnnnnnnnnnnnnnnnnnnnnnnnnnnnnnnnnnnnnnnnnnnnnnnnnnnnnnnnnnnnnnnnnnnnnnnnnnnnnnnnnnnnnnnnnnnnnnnnnnnnnnnnnnnnnnnnnnnnnnnnnnnnnnnnnnnnnnnnnnnnnnnnnnnnnnnnnnnnnnnnnnnnnnnnnnnnnnnnnnnnnnnnnnnnnnnnnnnnnnnnnnnnnnnnnnnnnnnnnnnnnnnnnnnnnnnnnnnnnnnnnnnnnnnnnnnnnnnnnnnnnnnnnnnnnnnnnnnnnnnnnnnnnnnnnnnnnnnnnnnnnnnnnnnnnnnnnnnnnnnnnnnnnnnnnnnnnnnnnnnnnnnnnnnnnnnnnnnnnnnnnnnnnnnnnnnnnnnnnnnnnnnnnnnnnnnnnnnnnnnnnnnnnnnnnnnnnnnnnnnnnnnnnnnnnnnnnnnnnnnnnnnnnnnnnnnnnnnnnnnnnnnnnnnnnnnnnnnnnnnnnnnnnnnnnnnnnnnnnnnnnnnnnnnnnnnnnnnnnnnnnnnnnnnnnnnnnnnnnnnaggtgtttgagaagctgcagctgctcaaccctgaaatagaagcagaacaaatattaatgtcgcccaactcgtatataaagctgcagacaaacaggnnnnnnnnnnnnnnnnnnnnnnnnnnnnnnnnnnnnnnnnnnnnnnnnnnnnnnnnnnnnnnnnnnnnnnnnnnnnnnnnnnnnnnnnnnnnnnnnnnnnnnnnnnnnnnnnnnnnnnnnnnnnnnnnnnnnnnnnnnnnnnnnnnnnnnnnnnnnnnnnnnnnnnnnnnnnnnnnnnnnnnnnnnnnnnnnnnnnnnnnnnnnnnnnnnnnnnnnnnnnnnnnnnnnnnnnnnnnnnnnnnnnnnnnnnnnnnnnnnnnnnnnnnnnnnnnnnnnnnnnnnnnnnnnnnnnnnnnnnnnnnnnnnnnnnnnnnnnnnnnnnnnnnnnnnnnnnnnnnnnnnnnnnnnnnnnnnnnnnnnnnnnnnnnnnnnnnnnnnnnnnnnnnnnnnnnnnnnnnnnnnnnnnnnnnnnnnnnnnnnnnnnnnnnnnnnnnnnnnnnnnnnnnnnnnnnnnnnnnnnnnnnnnnnnnnnnnnnnnnnnnnnnnnnnnnnnnnnnnnnnnnnnnnnnnnnnnnnnnnnnnnnnnnnnnnnnnnnnnnnnnnnnnnnnnnnnnnnnnnnnnnnnnnnnnnnnnnnnnnnnnnnnnnnnnnnnnnnnnnnnnnnnnnnnnnnnnnnnnnnnnnnnnnnnnnnnnnnnnnnnnnnnnnnnnnnnnnnnnnnnnnnnnnnnnnnnnnnnnnnnnnnnnnnnnnnnnnnnnnnnnnnnnnnnnnnnnnnnnnnnnnnnnnnnnnnnnnnnnnnnnnnnnnnnnnnnnnnnnnnnnnnnnnnnnnnnnnnnnnnnnnnnnnnnnnnnnnnnnnnnnnnnnnnnnnnnnnnnnnnnnnnnnnnnnnnnnnnnnnnnnnnnnnnnnnnnnnnnnnnnnnnnnnnnnnnnnnnnnnnnnnnnnnnnnnnnnnnnnnnnnnnnnnnnnnnnnnnnnnnnnnnnnnnnnnnnnnnnnnnnnnnnnnnnnnnnnnnnnnnnnnnnnnnnnnnnnnnnnnggccagtacttctgctcaatcacaatgcacaggctgacagacaagcagcggaagcacctgagcatgaagaagacagctctggtggtcactgcctccctctccagcagccacttctccacagagcaggtgggagccgaggtgcccttcagcccaggtctcttcgccgaccaggctgaaatccttttgagcaaccactacaccagctccgaggtcagggtctttggtgccccggaggttctggagaacttggaggtg

SEQ ID NO: 29333 - DNA, 545 bp, Macaca Mulatta
  misc_feature (1)...(545): n = A,T,C or G
gggaagggatcctggccttctactcccaggaggtacgagacctgttccagatgaagctttttgtggatacagatgcggacacccggctctcccgcagagacaaagaagtatgctgatgtgatcatccctagaggtgcagacaatctagtggccatcaacctcatcgtgcagcacatccaggacatcctgaatggagggccctccaaacggcagaccaatggctgtctcaacggctacaccccttcacgcaagaggcaggcatcggagtccagcagcaggccgcattgacccgtctccatcggaccccagcccctatctccaggagacagaggaggggtcaggaggcattgctcatctgtacatactgtttcctatgacattactgtatttaagaaaacaccatggagatgaaatgcctnnnnnnnnnnnnnnnnnnnnnnngtacttcggaacgacaaaatgaaacggaacttgaccctgagcttaaataacaaaactgtgccaactngnnnanaaannnnnnnannaanaaaanaaaacatgtc

SEQ ID NO: 29334 - DNA, 805 bp, Macaca Mulatta
gggctcttttccgtggcgcctcggaggcgttcagctgcttcaagatgaagccactggctgccagaaactcattgaagtggacgatgaacgcaaacttcgtactttttatgagaagcgtatggccacagaagttgctgctgacgctctgggtgaagaatggaagggttatgtggtccgaatcagtggtgggaacgacaaacaaggtttccccatgaagcagggtgtcttgacccatggccgtgtccgcctgctactgagtaaggggcattcctgttacagaccaaggagaacgggagaaagaaagagaaaatcagttcgtggttgcattgtggatgccaatctgagcgttctcaacttggttattgtaaaaaaaggagagaaggatattcctggactgactgatactacagttcctcgccgcctgggccccaaaagagctagcagaatccgcaaacttttcaatctctctaaagaagatgacgtccgccagtatgttgtaagaaagcccttaaacaaagaagggaacaaacctaggaccaaagcccccaagaatcagcgccttgttaatccccgggtcctggcagtacaaacggggggcgtattgctcctgaagaaacccccgtgcctcagaaaaaacaaaggaaaaagggcttcccgaaatactgccaaaacctttttgggccccccaaaaattgcacgggaggggttttcaggaacaacccgcccctcggggaagcagaacttgggccgaacaaacaaccgtccgaaactttatcacctcctcccctgtgccgaacgcgttcca

SEQ ID NO: 29335 - DNA, 445 bp, Macaca Mulatta
tctcagccggcaaggcggtcccacagctgtcctcccacagcagcctcaggaggaggctgggtgcctgttctgtggcagcttcagcccagggatatccagctgtcgaggaacacctttataaaatgttgccagagcagcaacacttcccgctgagcacagccccgggaaatctggtaccaagtgagcaaggcggccgggcccacccaagcccgccatgcgcctgggcccgcctggctctgcaggggaggctgctacggctgcccacttcccagcacagtctgtggcgcttgaacccctcagtcctgttcccttcctggctaatagggagacccttctcaggcacccactgtttcaacttgaccctcccaccccctgctcctccacacacccctgcgtcctgctagcctaccctgtcagcctttcaataaacgtgatgcacaaatgt

SEQ ID NO: 29336 - DNA, 565 bp, Macaca Mulatta
  misc_feature (1)...(565): n = A,T,C or G
aggctggcatagtaaccacaggtggttatcaaaggaaaagaccaataggctggagaatataattatgcttggccccctcagatgcttatacctacaaagcagatttaaaaatcaataactcaaaactttcagaagtacttgagtctacaaaatgttcaaagcagttacctaaataaggttatttaatgtaacagattatatacttaaagtgatctgagcgatcattgataacatatggcttaaatttgctgctgcctgaaaagtatattaactagattagaagacaccatatactccaataaaatgaaatatgttctattctcaacgtataaactttaattgtactccctatcaaatattttgaaatttccattacagcattactttgcatagtttttctaattaaatggttagtacagatganatctttatagatgagtacttgaaaactaagtgccaccagttttcaaacccttattaagaaatatatcctgaatcatatatttagttactttctatagtgattgtatggatttaaaagaataattaaaatgtgaagttgaaa

SEQ ID NO: 29337 - DNA, 899 bp, Macaca Mulatta
  misc_feature (1)...(899): n = A,T,C or G
ggatgaaaatcagggccggcttcaggtgtacatgaataaagtgatggatgatatcatggcctctaacctgaactcagcagttcaagtagttggactaaaatttctaacaaacatgactattactaatgactaccagcacctgcttgtcaattccattgcaaactttttccgtttgctatctcagggaggtggaaaaatcaaggttgagattttgaaaatactttcaaattttgctgaaaatccagatatgttgaagaaacttctcagtacccaagtgcccgcatcatttagttccctctataattcttatgtgttatcaaaaaatccttattaatgcccctactctttttgaaaattatccatgacaatctccgaaccaaaagtggttaaactattacaaaaatccaaaagagggatccccttttattactttaagccccaaattttgggagggggtggggtcagcaaaaaatttcaaagctatatctacaattacccctgacacccctaagccgaaaaggtaaacagtttaaaacccccaggtaaccccacattccgtataaaggccacgtatatttcccccccccaccattaaaaaacaccccctcttaaaaattgcggccccgctgtgcaaagctcttacgcaaccccatacttaaaaattaccgccccgttttacttcacgtcctcaattaatgtacttgtatcgcgcaaaacgcctttatattacccccctaaattcgcctccggaatttaacaccacattgacntctaccgcacactatcataaataagaaccatcagcaaactatagagagcnagcgagcagaacgccggtgcgtacgccatctatacaaaattatccttcagcataattatatcatgtctaactcaccccg

SEQ ID NO: 29338 - DNA, 610 bp, Macaca Mulatta
  misc_feature (1)...(610): n = A,T,C or G
aggagaagcatctgcagcatctggcaaatttttctgcagaggtgagggagcgtaagacagggactcagcaggagcttgagggggtgtttcagaaacttggaaacctgaagcagcaggcagaacaggagcaggacaagctgcagaggtanaggtaccagactttcctccagcttctgtataccctgcagggtaagctgttgttccctgaggctgaagctgaggcagagaatcttccagatgataaaccccagcagctgactcgaccccaggagcaaagtacaggagacactatggggagagatgctggtgtgtccttcaaggncaaggctgtcagcctacaacctgctggagatgcaaatttgccatgacttcctggaggacaacagcatggagaaagatcctagaataggtcagacccaacttaggccttggtgtccctggatgcagtatggaaagagggaaagcctctctgtgcatctgagctctgctacccatggagcagatggatggtgggaacaggaaagagcttatgttacagtttaacacctcattcccttgctcagcccacccagagctaacccctgtcttcttccccaggcctctgacttcc

SEQ ID NO: 29339 - DNA, 559 bp, Macaca Mulatta
ggggttatttgctgcggtggaccgtgggcagccagggtcggtgaaggatcccaagatggctgggcgaaaacttgctctaaaaaccattgactgggtagcttttgcggagatcataccccagaaccaaaaggccattgctagttccctgaagtcctggcatgagaccctcacctccaggttggctgctttacctgagactccaccagctatcgactgggcttactacaaggccaatggggccaatttagataaatatattaaaacttgtgttagtgttggaggggctatttatgatgctcaattatttgctggagctttgtctaaagccttaaaaggaaataacaaacaaggtgtttgctttcagtgtggtaaacctagacatttcaaaaaagaatgtcataaaaattgaacacttttatccctcaaggcagaaagctgccttcagaggtgtacaaatattgtggtaaaggtcgacattggacaaataaatgtcattccaaactgataaaatggaaatttactgtctctctctggaagggacgcagtggcaatatattta

SEQ ID NO: 29340 - DNA, 665 bp, Macaca Mulatta
  misc_feature (1)...(665): n = A,T,C or G
atgtgcaacccaaacctgcccctgaatccagtagcctagcggattcccataccccagaaacaggggagaaggtagtagcaggagaggtaaacccacccaatggccctgtgggggaccagctgagcctcttgtttggggatgtgacatccctgaaaagctttgactcattgacaggttgtggtgacattatagcagaacaggacatggacagtatgacagacagcatggcctctgggggccagagagcttaccgagatgggaccaagcgaagttcctgcctggtgacctaccagggaggtggggaggagatggccttgccagatgatgannnnnnnnnnnnnnnnnnnnnnnnnnnnnnnnnnnnnnnnnnnnnnnnnnnnnnnnnnnnnnnnnnnnnnnnnnngatgacttagaatatctgtgggcaactgctcagatgtatccaaggcccaatatgaacctgggctaccatcccaccacatccccaggccaccacggctacatgctccttgacccagttaggtcttatcctggcctagcccctggggaacttttgactcctcagagtgaccagcaagaatccgcccccaatagtgatgaaggttattatgactccaccacacctggatttgaggatgattcaggtgaggccctggggcttgtcc

SEQ ID NO: 29341 - DNA, 4655 bp, Macaca Mulatta
  misc_feature (1)...(4655): n = A,T,C or G
gcctgtgtgtgcctgggttctctctctctccctgagtgtgccagccatggaggtgttttcctgtctcagaccaaggacctctccccagctgcatggggtggggagggagaactgcagggagcatgggaggggaagctgagatgggcctgctcaccagaaggtgctgagcctgtccctgtcctgagaggtgccaggcctgcaggcagtgactcaggagctgcggaggagaggcctccagggttcttctcagggagtcccagcattgccactctcctttgaaatctccctggttgaacttacacatacactnnnnnnnnnnnnnnnnnnnnnnnnnnnnnnnnnnnnnnnnnnnnnnnnnnnnnnnnnnnnnnnnnnnnnnnnnnnnnnnnnnnncattcccaccccttcctgccagagggtaggtgtctggagagggtaggtgtctggagtgagggcgctggccccacccacacggcctctgtcatgggaaccctcccacagcagcccagtcagtggggaaggaggaaggggctgcgatgctcacagccggcagcctacacctggggagactcttcagcagagtaccttgcggcctcactcctgcacttctcctgcactttataaggtgctttcagaactcattgtgtgcccagctctgagcccccagctaattgccccacccagggcctctgggacttcctggtgcttctgcttcccgtgctgccagcaacttctggaaacgtccctgtccccggtgctgaagtcctggaatccatgctgggaagttgctcagcccatctggctctcagccctcctaagaacatgagcagcacttccagcccagctcctgtcccagagcaagcgtccccctccacactcacagtactggatcaagcttggggagggcggagagggcaccgtcatcacttttcttctggacatggacctctgaattgttggggagttccctccccctctccatccactcttcctccgcctcacagcccagagcattgttatttaagcataaacacttaaaaaaataaactaaaatccatccctgctttcacacacacacaccctttcttgtgttacttaaagtaggagagagtctctctttcctgtctcctcactcccagccccaaaagagaccacagtgaaaggtttggttgggactgagcccaccggccccatcctgtgctgagggaatagctacaactactgctgcaggccctctttttgggcaaaaataccatcatactgtagatacctgtgtacaacttcctattctcagtgaactgtctcctctacacccctttcagccagttcattcagttctatgccattctacagtctcactatttctatatttccattacgattccgccaaaaatcatcactatttatttgtttgnnnnnnnnnnnnnnnnnnnnnnnnnnnnnnnngagacggagtttccctctnnnnnnnnnnnnnnnnnnnnnnnnnnacaatctcggctcaccgcatctgcctcccgnnnnnnnnnnnnnnnnnnnnnnnnnnnnnnnnnnnnactgggattacagccatgtgccaccgatccccgctannnnnnnnnnnnnnnnnnnnnnnnnnnnnctccatgttggtcaggctggtctggaactcccgacctcaggtttttcacctgcctcagccttccaaagtgggtgggattgcaggcgtcagccaccgcgccaggccaaaccatcacttttcatgagcagggatgcacccactggcactactgcacctcccacccttcccccaccaggtccaccctttcctcaccccacatcgcccccacctcaattctgcaaccacagggacttcttccccgtcctctcccctcccagagccaagtttgtttatctgtttacaaccactatttaccgtcagcgagtcttccgtcagagcatttggagagactgggggtgtcacagtgaaccacgacctccaggccagtgggagagtcagtcacacaaaatgcacagggtcccactgtgagtccagcacccaccacccccacgcgccaccccacaaccccgggtagaggagtctgaacctgcatgcagcccagccccgtgctttttgcgtcctggtatttgttccttcctggtgcctgtcactcaagcacactagtgactatcgccagagggaaagagagttagaggaagcgagactggagaggaggacggactctgcgcggaaattcttttgcgttcctatgggccagggcgtccgggtgcgcgcattcctctccgccccggattgggcgaagcctcccggctcacactcgctcgcccgcgtgttccctgatcccgctggagctgacgcgcgtccagcgcgtgccaggccggggcgggggtgcgggctgactttctccctcactagggacgctcgggcgccccaaagaaaagggtggcgctgcgcccggggtggaagagccgacagcgcccgaccccaacgggccggccccctcgcccagcgtcgcgaccgccctgcttcctggcgagctggatgggcgggagtggagcggcgggtgaagggtggagacgtcccggcccccgccccgtgtgcgcccccagcggaggccaagccgccctgttcgggactcccctgcggttgcaggtcgcgccccgggcttcgcgtcagccaatgagcaccgcgctgccgggcgtgcccccgtgcccggagcataaaccctggcgcgctggctgcccggcactcttctggtccccacagactcagaaagaacccaccatggtgctgtctcctgccgacaagagcaacgtcaaggccgcctggggtaaggtcggcgggcacgctggcgagtatggtgcggaggccctggagaggtgaggctccctcccctgctccgacccgggctcctcgcccggcttcacccaccggccacccgcaaccgtcctggccccggacccaaaccccacccctcactctgcttctccccgcaggatgttcctgtccttccccaccaccaagacctacttcccccacttcgacctgagccacggctctgcccaggttaagggccacggcaagaaggtggccgacgcgctgaccctcgccgtggggcacgtggacgacatgccccacgcgctgtccgcgctgagcgacctgcacgcgcacaagcttcgggtggacccggtcaacttcaaggtgagcggcgagccgggagcgatctggggtcgaggggcgagatggcgccttcctcgcagggcagagcatcccgcgggttgcgggaggtgcagcgcaggcggcggctgcgggccctcggccccactgaccctcttctctgcacagctcctgagccactgcctgctggtgactctggccgctcacctccccgccgagttcacccctgcggtgcacgcctccctggacaagttcctggcttctgtgagcaccgtgctgacctccaaataccgttaagctggagcctcggtggccatgcttcttgccccttgggcgtcccgccaggccctcctcccctccttgcaccggcccttgcgtggtctttgaataaagtctgagtgggcggcagcctgtgtgtgcctgggttctctctctccctgaatgtgccagccatcggggtattttcctgtttctgaccaaggacctctccgcagctgcatggggctggggagggagaactgcagggagcatgggaggggaagctgaggtgggcctgctcacgagaaggtgctgagcctgtccctgtcctgagaggtgccaggcctgcaggcagtgacttaggagctgcggaggagaggcctccagggttcttctcagggagtcccagcattgccaccctcctttgaaatctccctggttgaacttacnnnnnnnnnnnnnnnnnnnnnnnnnnnnnnnnnnnnnnnnnnnnnnnnnnnnnnnnnnnnnnnnnnnnnnnnnnnnnnnnnnnnnnnnnnncattcccaccccttcctgccagagggtaggtgtctggagtgagggcgctggccctacccacacggcctctgtcatgggaaccctcccacagcagcccagtcagtggggaaggaggaaggggctgcgatgctcacagccggcagcctacacctggggagactcttcagcagagtaccttgcggcctcactcctgcacttctcctgcactttataaggtgctttcagaactcattgtgtgcccagctctgagcccccagctaattgccccacccagggcctctgggacttcctggtgcttctgcttcccgtgctgccagcaacttctggaaacgtccctgtccccggtgctgaagtcctggaatccatgctgggaagttgctcagcccatctggctctcagccctcctaagaacatgagcagcacttccagcccagctcctgtcccagagcaagcgtccccctccacactcacagaactggatcaagcttggggagggcggagagggcaccgtcatcacttctcttctggacatggacctctgaattgttggggagttccctccccctctccatccactcttcctccgcctcacagcccagagcattgttatttaagcataaacacttaaaaaaataaactacggtcggcgggcgagtcgactgtccttgcgcgtggatcc

SEQ ID NO: 29342 - DNA, 290 bp, Macaca Mulatta
ggaagggtatcaagactacgaacctgaagcctaagaaatatctttgctcccagtttcttgagatctgctgacagacgttccatcttgtacaagtgctcagttccaatgtgcccagtcatgacatttctcaaagtttttacagtatattttgaagtcttccatcagcagtgattgaagtatctgtacctgcccccattcagcatttcggtgcttccctttcactgaagtgaatacatggtagcagggtctttgtgtgctgtggattttgtggcttcgatctatgatgttaa

SEQ ID NO: 29343 - DNA, 687 bp, Macaca Mulatta
gacgaggcgagatctgcgaagcattagctgccgcttctgcgctgctccacactcttgtgaaatactggttctattttctttattccttttgcgctccccaatccccacctttgtgttagagtttactgtgttaccctgtaattaaaaacaaagaataggtaacatattgtgccagtgttgcaacgttttaaactgctaacagaccttaaaataccccgttcagaaaacctgggtcctcagtgctatgtttaaagtagctgcagggatggagtggcgttttcctattgctgtatgtattgtacatagtggagtagttagttacctgataacggtctcattatttgggcctcttagaccttacctctcaactccctcaagagtaccagtctctgaagttataatgctttggtctctacattaggggcaagatccggtctaaaagaagtctcctttgagaagggccaagaggctctttcctgagtgtgtgctttcggtttgttggtgtgcctgtgttgctgggctgtgctgatgctcgaagcagatggttttgactgtctacttgctctttcctgtataatgaatagatgagtgaaagcagttttctttttctctttagtacatatgtattgggattcctgtgtcttacagctctccctctccaaataatacacagaatcctgccacttt

SEQ ID NO: 29344 - DNA, 1283 bp, Macaca Mulatta
  misc_feature (1)...(1283): n = A,T,C or G
ggggaaatgataaaaccaagtgtaattcttaggcggagaattgaagaaatgggggatgaattacagaagacagagcggtcatttaaaaaccagattgctacccatgagaagaaagctcatgaaaactggctcaaagctcgtgctgcagaaagagctatagctgaagagaaaagggaagctgccaacttgagacacaaattattagaattaacacaaaagatggcaatgctgcaagaagaacctgtgattgtaaaaccaatgccaggcagaccaaatacacaaaaccctccacggagaggtcctctgagccagaatggctcttttggcccatcccctgtgagtggtggtgaatgctcccctccattgacagtggagccacccgtgagacctctctctgctacgctcagtcggagagatatgcctagaagtgaatttggatcagtggacgggcctctacctcatcctcgatggtcagctgaggcatctgggaaaccctctccttctgatccaggatctggtacagctgccatgatgaacagcagctcaagaggctcttcccctaacagggtaatcgatgaaggcaaggttaatatggctccaaaagggccccctcctttctcaggagtccctctcatgagcacccctatgggaggccctataccaccacccattcgatatggaccaccacctcagctctgcggacctttcgggcctcggccacttcctccaccctttggccctggtatgcgtccaccactaggcttaagagaatttgcaccaggcgttccaccaggaaaacgggacctgcctctccaccctcgggaatttttacctggacacacaccatttagacctttaggtccacttggcccaagagagtactttattcctggtgcccgattaccacccccaacccatggtccccaggattacccaccaccacctgctgcaagagacttaccgccatcaggctctagagatgatcctcctcctgcctctcagagcactagccaggactgttcacaggctttaaaacagagcccataactatgacctctgacattttgttggagagaaagtgtactgtgcattattcattacagtaaaagatttcattggcttcaaaatacaaaagtttatttttaaaggtctgtttgttagaactggcgcttgcctcggcagtgtgcattttttggacccaaaacaattcaaaaaatggtcattttcttcccnnnnnnnnnnnnnnnnnntttttttaaggcctagaaagccgttcctttaaa

SEQ ID NO: 29345 - DNA, 767 bp, Macaca Mulatta
atataatgtatctcttcatctctacaagtttattttcaaaaatgacacatccccagactgaaatgggcacttagcggacacttgtggaccacaagacatgtctgggaacatgttctgaacaagacagttttcaaataaaaatttttcttaaacaggtccatatacggacttcaccccttggacaacagaagaacagaagcttttggaacaagctttgaaaacatacccagtaaatacacctgaaagatgggaaaaaatagcagaagcagtgcctggcaggacaaagaaggactgcatgaaacgatataaggttgcagacttaagagtttatagattgttgtattttaaatttaacgtgggttatatatagctcacattttatgtctattaagtagttaataatatagtgcttatttcaacaccagtagttatggggccaatattattaggaataaatgagcaaccttagaaactttctaggccctggcaggcagtgaaatcggtatacttagtactgtcttagttgtttgaattctttataccaaacactagattaaaatgtctgtttttaaattctgacaacttcctttctcccttcctaggaacttgtcgagatggtaaaagcaaagaaagctgctcaagaacaagtgctgaatgcaagcagagccaagaaatgacttaatgacaatctttgttgtatgtgcatttttataataaaactgaaaatactgtaaacattttcattcttaaaattatacttatggtcc

SEQ ID NO: 29346 - DNA, 906 bp, Macaca Mulatta
  misc_feature (1)...(906): n = A,T,C or G
gggttgcttctatgcccagcagtatgatatgactctgacctcatttgaacgtgccctttctttggctgaaaatgaagaagaggcagctgatgtctggtacaacttgggacatgtagctgtgggaataggagataccaatttggcccatcagtgcttcaggctggctctggtcaacaacaacaaccacgccgaggcctacaacaacctggctgtgctggagatgcggaagggccacgttgaacaggcaagggcactattacaaactgcatcatctctagcaccccatatgtatgaaccgcattttaattttgcaacaatctctgataagattggagatctgcagagaagctatgttgctgcgcagaagtctgaagcagcatttccagaccatgtggacacacaacatttaattaaacaattaaggcagcattttgctatgctctgattgttcctgagaccacatatgttcttatgaagaggcattatgcaggggaagagtacagcggagagaaggaatagctagagaagtaatannnnnnnnnnnnnnnnnnnnnnnnnnnnnnnnnnnnnnnnnnnnnnnnnnnnnnnnnnnnnnnnnnnnnnnnnnnnnnnnnnnnnnnnnnnnnnnnnnnnnnnnnnnnnnnnnnnnnnnnnnnnnnnnnnnnnnnnnnnnnnnnnnnnnnnnnnnnnnnnnnnnnnnnnnnnnnnnnnnnnnnnnnnnnnnnnnnnnnnnnnnnnnnnnnnnnnnnnnnnnnnnnnnnnnnnnnnnnnnnnnnnnnnnnnnnnnnnnnnnnnnnnnnnnnnnnnnnnnnnnnnnnnnnnnnnnnnnnnnnnnnnnnnnnnnnnnnnnnnnnnnnnnnnnnnnnnnnnnnnnnnnnnnnnnnnnnnnnnnnnnnnnnnnnnnnn

SEQ ID NO: 29347 - DNA, 281 bp, Macaca Mulatta
aggatcagccaccccaacattgttgctctggaggatgtccacgagagcccttcccacctctacctggccatggaactgtgaggagggcctgggcaggctgtgggagccggggaggggctgagcagtgagtggggctgaaggccaggctgagtgcctgggtcagccaaacccctggcacccccagggtgacgggtggcgagctgtttgatcgcatcatggagcgcggctcctacacagagaaggatgccagccatctggtgggtcaggtcctcggcgccgtc

SEQ ID NO: 29348 - DNA, 235 bp, Macaca Mulatta
  misc_feature (1)...(235): n = A,T,C or G
agaaaggaggtgcactattcaacacagcaatgaccaaagcaacccctgctgtacggacagcatataaatttnnnnnnnnnnnnnnnnnnnnnnnnnnnnnnnnnnnnnnnnnnnnnnnnnnnnnnaggaaaatgatgaagattatggaacctgttctagttctgtacaatatacaccagtttacaaattacacaatgaaaagggaggaaactcagaaaagcgtaagcttgctcag

SEQ ID NO: 29349 - DNA, 631 bp, Macaca Mulatta
ctgttacaaaaggtcacataatcaaaatgactgtatagagaataatagtgatggttatgatgatcaatatgagcaagccaagtggaataatttctgtcagatttattaaatctggtgagttaaaaatatcaagtgagagagtatagttatctgggcaaatatttttttccttataacctcccattattattctgtcactaacgagaaatagggtttcacttgaacttcttatattacagcaagtgggccaattttttacgaaggaaggtcagcagagttgtaacgggtttgaagaaacaaagaaggaaacgaaagaggaagtctaaaatgttacagagagcagcaagaggagatgaggaacatggtgaagagtagcaagagaccaaaggtaattgacaataggatttaaagttgaagtgctcaatctctgattcttgttagctttatatttctaccatcatcttggtttgactgaaacatttttttaagcacacaaatgttgggatcacaggaggggcagcttctgaacaaatatttatcactagagatattgagatggtaggaaaatggataagaaatgtgccaaattgttttgagtgccacattatatggtatacacaggtcagctttt

SEQ ID NO: 29350 - DNA, 237 bp, Macaca Mulatta
  misc_feature (1)...(237): n = A,T,C or G
caggtggccctgaatgattgcctgctcagcaaaataaaggcccattgtggaagccagaacttgcatttgaaggaggatgggaaggatgggctgaggagggcccatcagcagcagccggagagggaggtggccatggagacttggagcggtcccgtttcttccagagcnagagcgctgtggaataagggaggagcgtcctgcttcccggctgccctgttgcttcggagtcacaggatg

SEQ ID NO: 29351 - DNA, 759 bp, Macaca Mulatta
  misc_feature (1)...(759): n = A,T,C or G
aaataatnnntttttgagntttgnatggagnattatgagttcttaccattccctttacttatcatattctgagcgtcatacctaggaagaccttcatgagttatcagcccgccagattcccttggtacaactaaataacatgaataccacatctcattttgttactcagtgctggaggacctcaattgttcccactggtataatggaagactaggctttccttacctaggttcacagccactgacatgggtgaatggccctggaaaactaataataatttgataattgttatgaattgcattgttctccttctgcttaattttgaaaagatggaaatgaaaatacatcctgctttatactttatgccgttaaataattgaacattcttttatctgatcattgtaaatcgctccaaagaattggaattatagatcccttaagcagtaactaccgatgaatcctctaatggtgtgggacactgtgccaggggctgcagaaaatcccagctatcagggaacttcggtatggcaggggcaggagtaaaccaacacatattcaaactgcatggcgaaatataaagtgctgagggggttggaagaaggagaaatagttacacctgttgactttacaagtgtctgcctgccttccctgcctttcccctttctttccccgacctctctccctcctcccacaaacatttatacctctgaagtttcaggtactgatcctcattctgggagtgagatagtttctataaca

SEQ ID NO: 29352 - DNA, 5424 bp, Macaca Mulatta
  misc_feature (1)...(5424): n = A,T,C or G
agaggtggtagcccagtggtgcacacagggggacttgctggcagtcgctgggatggaacggcagacccagcttggtgagcttcccaatggcccccttctgaagagtgccatggtcaagttctacaatgttcgtggggagcacatcttcacactggacactctcgtgcannnnnnnnnnnnnnnnnnnnnnnnnnnnnnnnnnnnnnnnnnnnnnnnnnnnnnnnnnnnnnnnnnnnnnnnnnnnnnnnnnnnnnnnnnnnnnnnnnnnnnnnnnnnnnnnnnnnnnnnnnnnnnnnnnnnnnnnnnnnnnnnnnnnnnnnnnnnnnnnnnnnnnnnnnnnnnnnnnnnnnnnnnnnnnnnnnnnnnnnnnnnnnnnnnnnnnnnnnnnnnnnnnnnnnnnnnnnnnnnnnnnnnnnnnnnnnnnnnnnnnnnnnnnnnnnnnnnnnnnnnnnnnnnnnnnnnnnnnnnnnnnnnnnnnnnnnnnnnnnnnnnnnnnnnnnnnnnnnnnnnnnnnnnnnnnnnnnnnnnnnnnnnnnnnnnnnnnnnnnnnnnnnnnnnnnnnnnnnnnnnnnnnnnnnnnnnnnnnnnnnnnnnnnnnnnnnnnnnnnnnnnnnnnnnnnnnnnnnnnnnnnnnnnnnnnnnnnnnnnnnnnnnnnnnnnnnnnnnnnnnnnnnnnnnnnnnnnnnnnnnnnnnnnnnnnnnnnnnnnnnnnnnnnnnnnnnnnnnnnnnnnnnnnnnnnnnnnnnnnnnnnnnnnnnnnnnnnnnnnnnnnnnnnnnnnnnnnnnnnnnnnnnnnnnnnnnnnnnnnnnnnnnnnnnnnnnnnnnnnnnnnnnnnnnnnnnnnnnnnnnnnnnnnnnnnnnnnnnnnnnnnnnnnnnnnnnnnnnnnnnnnnnnnnnnnnnnnnnnnnnnnnnnagcacaactatcttgctcaggtcacgtctaatatctggggaaccaaatttaagattgtgggcttggctgctttnnnnnnnnnnnnnnnnnnnnnnnnnnnnnnnnnnnnnnnnnnnnnnnnnnnnnnnnnnnnnnnnnnnnnnnnnnnnnnnnnnnnnnnnnnnnnnnnnnnnnnnnnnnnnnnnnnnnnnnnnnnnnnnnnnnnnnnnnnnnnnnnnnnnnnnnnnnnnnnnnnncagtgacgggagcatctggtgtccctgagaacagcccaccttgtacggtgaacatccctattgcaccgatccacagctcggctcaggctatgtcccccacgcagagcatagggctggtgcagtccctgctggccaatcagaatgtgcagctagatgtcctgaccaaccagacgacagctgtaggagcagcagaacatgcaggtgacagtgccacccagtacccagtctccaaccggtactccaatcctggacaggtgattttcggaagcgtggaaatgggccgcatcattcagaacccccctccactgtccctgcctcccccgccgcaggggctcatgcagctgtccannnnnnnnnnnnnnnnnnnnnnnnnnnnnnnnnnnnnnnnnnnnnnnnnnnnnnnnnnnnnnnnnnnnnnnnnnnnnnnnnnnnnnnnnnnnnnnnnnnnnnnnnnnnnnnnnnnnnnnnnnnnnnnnnnnnnnnnnnnnnnnnnnnnnnnnnnnnnnnnnnnnnnnnnnnnnnnnnnnnnnnnnnnnnnnnnnnnnnnnnnnnnnnnnnnnnnnnnnnnnnnnnnnnnnnnnnnnnnnnnnnnnnnnnnnnnnnnnnnnnnnnnnnnnnnnnnnnnnnnnnnnnnnnnnnnnnnnnnnnnnnnnnnnnnnnnnnnnnnnnnnnnnnnnnnnnnnnnnnnnnnnnnnnnnnnnnnnnnnnnnnnnnnnnnnnnnnnnnnnnnnnnnnnnnnnnnnnnnnnnnnnnnnnnnnnnnnnnnnnnnnnnnnnnnnnnnnnnnnnnnnnnnnnnnnnnnnnnnnnnnnnnnnnnnnnnnnnnnnnnnnnnnnnnnnnnnnnnnnnnnnnnnnnnnnnnnnnnnnnnnnnnnnnnnnnnnnnnnnnnnnnnnnnnnnnnnnnnnnnnnnnnnnnnnnnnnnnnnnnnnnnnnnnnnnnnnnnnnnnnnnnnnnnnnnnnnnnnnnnnnnnnnnnnnnnnnnnnnnnnnnnnnnnnnnnnnnnnnnnnnnnnnnnnnnnnnnnnnnnnnnnnnnnnnnnnnnnnnnnnnnnnnnnnnnnnnnnnnnnnnnnnnnnnnnnnnnnnnnnctgtacacctgcagtcagtgcagtggcacggggcccagctcacagcctggagcctccctggcccatactgccagcacctccccattggcctcccagtcctcctacagcctcctgagcccacccgacagcgcccgtgaccgcaccgactacgtcaactccgccttcacagaggacgaggccctgtcccagcactgtcagcttgagaagcccctgaggcacccttccctgcctgaagctgctgtcaccctgaaacggccacccccttaccagtgggaccccatgctgggtgaggacgtttgggttcctcaagaaaggacagcacagacttcagggcccaaccccttaaaactgtcccctctgatgctgagtcagggccagcacctggatgtgtcccgactgcccttcatctcccccaagtctcctgccagccccactgccactttccaaacaggctatgggatgggagtgccatatcccggaagctataacaacccccctttgcctggagtgcaggctccctgctctcccaaagataccctgtccccgacacagtttgcacaacaggagcctgctgtggtccttcagccagtgtacccgcctagcctctcctattgcaccctgccccccatgtacccaggaagcagcacatgatctagtttacagctgccacctgtcgccttgcacccatggaatcgtacagcgcctgcccgccnnnnnnnnnnnnnnnnnnnnnnnnnnnnnnnnnnnnnnnnnnnnnnnnnnnnnnnnnnnnnnnnnnnnnnnnnnnnnnnnnnnnnnnnnnnnnnnnnnnnnnnnnnnnnnnnnnnnnnnnnnnnnnnnnnnnnnnnnnnnnnnnnnnnnnnnnnnnnnnnnnnnnnnnnnnnnnnnnnnnnnnnnnnnnnnnnnnnnnnnnnnnnnnnnnnnnnnnnnnnnnnnnnnnnnnnnnnnnnnnnnnnnnnnnnnnnnnnnnnnnnnnnnnnnnnnnnnnnnnnnnnnnnnnnnnnnnnnnnnnnnnnnnnnnnnnnnnnnnnnnnnnnnnnnnnnnnnnnnnnnnnnnnnnnnnnnnnnnnnnnnnnnnnnnnnnnnnnnnnnnnnnnnnnnnnnnnnnnnnnnnnnnnnnnnnnnnnnnnnnnnnnnnnnnnnnnnnnnnnnnnnnnnnnnnnnnnnnnnnnnnnnnnnnnnnnnnnnnnnnnnnnnnnnnnnnnnnnnnnnnnnnnnnnnnnnnnnnnnnnnnnnnnnnnnnnnnnnnnnnnnnnnnnnnnnnnnnnnnnnnnnnnnnnnnnnnnnnnnnnnnnnnnnnnnnnnnnnnnnnnnnnnnnnnnnnnnnnnnnnnnnnnnnnnnnnnnnnnnnnnnnnnnnnnnnnnnnnnnnnnnnnnnnnnnnnnnnnnnnnnnnnnnnnnnnnnnnnnnnnnnnnnnnnnnnnnnnnnnnnnnnnnnnnnnnnnnnnnnnnnnnnnnnnnnnnnnnnnnnnnnnnnnnnnnnnnnnnnnnnnnnnnnnnnnnnnnnnnnnnnnnnnnnnnnnnnnnnnnnnnnnnnnnnnnnnnnnnnnnnnnnnnnnnnnnnnnnnnnnnnnnnnnnnnnnnnnnnnnnnnnnnnnnnnnnnnnnnnnnnnnnnnnnnnnnnnnnnnnnnnnnnnnnnnnnnnnnnnnnnnnnnnnnnnnnnnnnnnnnnnnnnnnnnnnnnnnnnnnnnnnnnnnnnnnnnnnnnnnnnnnnnnnnnnnnnnnnnnnnnnnnnnnnnnnnnnnnnnnnnnnnnnnnnnnnnnnnnnnnnnnnnnnnnnnnnnnnnnnnnnnnnnnnnnnnnnnnnnnnnnnnnnnnnnnnnnnnnnnnnnnnnnnnnnnnnnnnnnnnnnnnnnnnnnnnnnnnnnnnnnnnnnnnnnnnnnnnnnnnnnnnnnnnnnnnnnnnnnnnnnnnnnnnnnnnnnnnnnnnnnnnnnnnnnnnnnnnnnnnnnnnnnnnnnnnnnnnnnnnnnnnnnnnnnnnnnnnnnnnnnnnnnnnnnnnnnnnnnnnnnnnnnnnnnnnnnnnnnnnnnnnnnnnnnnnnnnnnnnnnnnnnnnnnnnnnnnnnnnnnnnnnnnnnnnnnnnnnnnnnnnnnnnnnnnnnnnnnnnnnnnnnnnnnnnnnnnnnnnnnnnnnnnnnnnnnnnnnnnnnnnnnnnnnnnnnnnnnnnnnnnnnnnnnnnnnnnnnnnnnnnnnnnnnnnnnnnnnnnnnnnnnnnnnnnnnnnnnnnnnnnnnnnnnnnnnnnnnnnnnnnnnnnnnnnnnnnnnnnnnnnnnnnnnnnnnnnnnnnnnnnnnnnnnnnnnnnnnnnnnnnnnnnnnnnnnnnnnnnnnnnnnnnnnnnnnnnnnnnnnnnnnnnnnnnnnnnnnnnnnnnnnnnnnnnnnnnnnnnnnnnnnnnnnnnnnnnnnnnnnnnnnnnnnnnnnnnnnnnnnnnnnnnnnnnnnnnnnnnnnnnnnnnnnnnnnnnnnnnnnnnnnnnnnnnnnnnnnnnnnnnnnnnnnnnnnnnnnnnnnnnnnnnnnnnnnnnnnnnnnnnnnnnnnnnnnnnnnnnnnnnnnnnnnnnnnnnnnnnnnnnnnnnnnnnnnnnnnnnnnnnnnnnnnnnnnnnnnnnnnnnnnnnnnnnnnnnnnnnnnnnnnnnnnnnnnnnnnnnnnnnnnnnnnnnnnnnnnnnnnnnnnnnnnnnnnnnnnnnnnnnnnnnnnnnnnnnnnnnnnnnnnnnnnnnnnnnnnnnnnnnnnnnnnnnnnnnnnnnnnnnnnnnnnnnnnnnnnnnnnnnnnnnnnnnnnnnnnnnnnnnnnnnnnnnnnnnnnnnnnnnnnnnnnnnnnnnnnnnnnnnnnnnnnnnnnnnnnnnnnnnnnnnnnnnnnnnnnnnnnnnnnnnnnnnnnnnnnnnnnnnnnnnnnnnnnnnnnnnnnnnnnnnnnnnnnnnnnnnnnnnnnnnnnnnnnnnnnnnnnnnnnnnnnnnnnnnnnnnnnnnnnnnnnnnnnnnnnnnnnnnnnnnnnnnnnnnnnnnnnnnnnnnnnnnnnnnnnncttacctgagatgttgtttaggatcaggcccctctcctggacctgctgagcaggagcctgcacaggaactatctgctggcgttgggttccaaatttggattttatttggaagcacacgagtagaatatgctacagaaaagtattttcaaatttaaa

SEQ ID NO: 29353 - DNA, 1299 bp, Macaca Mulatta
  misc_feature (1)...(1299): n = A,T,C or G
atgtgatgaatgtgagaaaacctttagtnnnnnnnnnnnnnnnnnnnnnnnnnnnnnnnnnnnnnnnnnnnnnnnnnnnnnnnnnnnnnnnnnnnnnnnnnnnnnnnnnnnnnnnnnnnnnnnnnnnnnnnnnnnnnnnnnnnnnnnnnnnnnnnnnnnnnnnnnnnnnnnnnnnnnnnnnnnnnnnnnnnnnnnnnnnnnnnnnnnnnnnnnnnnnnnnnnnnnnnnnnnnnnnnnnnnnnnnnnnnnnnnnnnnnnnnnnnnnnnnnnnnnnnnnnnnnnnnnnnnnnnnnnnnnnnnnnnnnnnnnnnnnnnnnnnnnnnnnnnnnnnnnnnnnnnnnnnnnnnnnnnnnnnnnnnnnnnnnnnnnnnnnnnnnnnnnnnnnnnnnnnnnnnnnnnnnnnnnnnnnnnnnnnnnnnnnnnnnnnnnnnnnnnnnnnnnnnnnnnnnnnnnnnnnnnnnnnnnnnnnnnnnnnnnnnnnnnnnnnnnnnnnnnnnnnnnnnnnnnnnnnnnnnnnnnnnnnnnnnnnnnnnnnnnnnnnnnnnnnnnnnnnnnnnnnnnnnnnnnnnnnnnnnnnnnnnnnnnnnnnnnnnnnnnnnnnnnnnnnnnnnnnnnnnnnnnnnnnnnnnnnnnnnnnnnnnnnnnnnnnnnnnnnnnngagaaaccttaccagtgtgttcagtgcagcagaagttttagccaactctctgaacttactattcatgaggaagtccattgtggggaagacagttaaaatgtgatgaatgtgagaaaacctttagtatatacttcaactctattcagtaccagagacaccataccaggaaaaaatctaatgaatgctgttcattattgatgagtatgaaaaagttttttaatcagtggtaagctcttatgctgcattaaaaccacactggagccaggcgtggtggctcacggctgtaatcccaacactttgggaggcagaggtggaagcatcacttgagcccaggagtttgaggctacagtgagctatgatcccaccattgcactccagcctgggcaacagagcaagaccctgtctattnnnnnnnnnnnnnnnnnnnnnnnnnnnnnnnnnnnnnnnnnttaattcagtttttataatgaaagtttaactcagagctcagacattactaaaattaagaaaaattctccagcctggccaacatggtgaaagcctgtctctaccnnnnnnnnnnnnnaattagctgagtatggtggcaggcacctgtagtcccagctattcaggaggctgaggcatgagaatcactggaacct

SEQ ID NO: 29354 - DNA, 349 bp, Macaca Mulatta
  misc_feature (1)...(349): n = A,T,C or G
gtggtgaccctggtatacctgcccaaggaaaaagagaaggcaaaagttttatataccagtcagaagtttcattcagctgcaattctcctttcatattagtgggatcaagcaccagaatatgtcaagcagatggcacttggagtggttcgtcacctcactgcatagnnnnnnnnnnnnnnnnnnnnnnnnnnnnnnnnnnnnnnnnnnnnnnnnnnnnnnnnnnnnnnnnnnnnnnnnnnnnnggaagtgttgtacagttccatggcaaaaaaggacaccttctccaaggctgtgcaacacgcacttgcctccctgatcttacatggagtggaattcagcctgaatgcat

SEQ ID NO: 29355 - DNA, 955 bp, Macaca Mulatta
  misc_feature (1)...(955): n = A,T,C or G
ggggcagttcggcggtcctgcgggtctgtctcttgcttcaacagtgtttggacggaacagatccggggactctttcttccagcctccgaccgccctccgatttcctctccacttgcaacctccgggaccatcttctcggccatctcctgcttctgggacctgccagcaccgtttttgtggttagctccgtcttgccgaccaaccatgagctcccagattcgtcagaattattccaccgacgtggaggcagccgtcaacagcctggtcaatatgtacctgcaggcctcctaaacctacctctctctgggcttctatttcgaccgcgatgatgtggctctggaaagcgtgagccacttcttccgagaattggccgaagagaatcgcgaaggctacgaacgtctcctgaaaatgtaaaaacagcgaggcagcaccgctctttatacaggatttcaagaaaccttcctgaagagaagtgggggctaaaatcacaggatgcgtaatgatcaaccaccatatgtccttagaataagaccttaatatcctaacccattatgggagatggtataggcacacggaggatattggctcatttaggttaagtaacatgacatactaacaaaacgtataataatgtacttctcacttagcctaggaggaatgtatgaaatattaaatggtngtgacatgaaggagttgaaagaatgttagtgatctctactcagaccccacaagcatagtctggctgtttatgttgaagataggacgctagtgggcagagtccggatatatcgaccgtggtacgccagagttgcagataagatcgcgcgataagaaaacacgtatttatgatatatctgcgaatgcgtgaagagagcgtgattactacccacgattaagagaatatatttatactagcaatcgattgaccgacatacaaatactacgatcttgtgtt

SEQ ID NO: 29356 - DNA, 436 bp, Macaca Mulatta
tgtttcttttttccctttggatacatttttaattacaaaaatagagcctgattgtcacccagacagatgtttgcttgcttctgggcccattgggcctcctctcagagcctggaactcccagcccccagctcctggggtgccttcctccaggtgtgtccatggctcgggctggggggatgcagtcatgctcctgggatgtgcgggtttaataagctactaggtaccatccttgatcaaattcagattgacagacttagagcaggtcacctctcgccttcataatgaagccaagaaagaggagtccccacagcactgggtttgactctgtaattaagctggtaaagtggaaaaataaaagtaggaaacctaaatggaaaccaaaccagaaagccaggcagcttgggagttccgagcctgcttccttccagctgttcgg

SEQ ID NO: 29357 - DNA, 862 bp, Macaca Mulatta
gggaccagtctgggttttaaggctctgggaagcagggttgggttactaaagacagaggaatgtgggggagaggtgagtagttccttcctctttctcctctctggtttatgcttttaacttattttctaccttgataaacttctggaacttggcttttaaatttaactgttctagtttttaagcagtttccaccttgctttggtctaatgcttttctttgaaatgctaacagaattcccaagctttttccagttctagacatctttactagacctttgggggactcttataatggagctgctttagaaaagcactttaattagataatgtattttgactaaaagtcatgagcatgcccagtgagagcttctagctgatctcagaggactggagtgactgagggtaaaatgtctcacagcccatgctgaattttctgtattttaaactgatattgcagtcattggagagagagctcctcatttctcgaatgaaagatgagatatattcatcctcatgtaccacatctgtcttagtgtttgtgtctggggtgtgttatcagacagcatggtctacataccactgtgtcagtcagaagaaccaagtgttatctcaactggcccagtgtttctccaggctggggactgttaagggctctaaggggatgtagacagagtctccctgtggttctgactttctggcttgatgagctttcagtttctgtttttgctattgtttcctaaatttgacctacatattacatgggtgtagtgtgttgaagcttttcaaggaagggtctagtgagctaagtttcatcttccgggtactcactgattcaaactgacctttcccgttctattaaccat

SEQ ID NO: 29358 - DNA, 390 bp, Macaca Mulatta
agatgcaaatgctgtgggcaggtctgcccttcagctggcagaactctatctggccgcttggcctcataaaggagtctctagttctcttctcaaatctctattttttttaacccagatgatgtggggtcaaagagccaggatgtcagcctgtgcttggaggacatcatggagaaactccgtcatgccttccccagtgtgcgaagttctgatgtgactgccaacaccctgctggcctcttgatggagccagatccctatcctatagttcattgtcctctcctggttcccgtcaaagcctttcctcagccttcatccaacccttccagtttccgctggccccacattcctcaactagtattatttgggctctgggcagcagcagggatctggt

SEQ ID NO: 29359 - DNA, 1118 bp, Macaca Mulatta
catgaacaaatgaaaaagatttggaagcacagcacaaagaattagaggaaaaacgtcgtcagtttgaggatgagaaagcaaactgggaagctcaacaacgtattttagaacaacagaactcttcgagaaccttggaaaagaacaagaagaaagggaagatcttttaaactctctattgaccaccagttacgtattagttgccaatatgccagcttggacatcagtgtttgttggatccgtttgaccaatttgcaccagttttatccataatgatggatttaacagcatgacaaaaattattatttttgttgttgttcttgatggagattaagatgccttgaattgtctagggtgttgtgtacttagaaagtaacagctctaagtacctttcctacatttgctttttcttttttaattaaacagatatcttcagtttaatgcaagagaacattttactgttgtacaatcatgttctggtggtttgattgtttacaggatattccaaaataaaaggactctggaaggttttcattgaggataaattgccataatatgatgcaaactatgcttctctatgataattataatacaaaggttccattcagtgcagcatatacaataatgtaatttagtctaacacagttgaccctatttttgacacttccattgtttaaaaatacacatggaaaaaaaaaccctatatgctttcagtgcacctagagcttttttataacaaacctctttttgtttgtttgttctggattccttaaatattatattattttcaataaaagccctcattagccagaatcatcgttactgctttcatttttgtaaaaaccttttgatttaaaaaattttcccatatatttgggccctagctaaaaaataagaaatttaacccatctttttcataatggtgagggaacccgaacaaaggaaaaacttttcccttttaaacctcagctcttttatcacttttaagcgctaacttagccagcggggggaaaaaaagacattttataggaaattcctttttctagggcaaaaatatcggggaaagcaataaatgaaccaatcccagggtttctttcccaattatactccatgccctcatt

SEQ ID NO: 29360 - DNA, 280 bp, Macaca Mulatta
caggggttccagcacaaagtttacttctgggcgattttgtatccaaggaaataatgtgaacacaaggaaatgtctttagagcacagagacagagggaggaataagaggaggagaaagctctctataccaaagactgaaaaaaaatcctgtctgtttttgtatttattatgtgtatttatgtgggtgatttgataacaagtttaatataaagtagcctgggagtttggtcagtggggttggtttgtgatccaggaataaaccttgtggctgtggctgttta

SEQ ID NO: 29361 - DNA, 800 bp, Macaca Mulatta
tctttgtctcatgtttatacaccaaatgatgtccgcatggtgattgaatatgccagattacgaggaattcgagtcctgccagaagttgataccctgggcatacactatcttggggaaaaggtcagaaagacctcctgactccgtgttacagtagacaaaacaagttggactcttttggacctataaaccctactctgaatacaacatacagcttccttaactacatttttcgaagaaattagtgaggtgtttccagatcaattcattcatttgggaggagatgaagtggaatttaaatgttgggaatcaaatccaaaaattcaagatttcatgaagcaaaagtggctttggcaaagattttaaaaaactagaatctttctacattcaaaaggttttggatattattgcaaccataaacaagggatccattgtctggcaggaggtttttgatgataaagtgaagcttgcgccgggcacaatagttgaagtatggaaagacaacgcgtatcctgaggaactcagcaaagtcacagcatctggcttccccgtaatcctttctgctccttggtacttagatttgattagttatggacaagattggaggaaatactataaagtggaacctcttgattttggtggtactcgggaacagaaacaacttttcattggtggagaagcttgtctatggggagaatatgtggatgcaactaacctcactccgagattatggcctcgggcaagtgctgttggtgagagactctggagctccaaagatgtcagagatatggatggcgcctatg

SEQ ID NO: 29362 - DNA, 636 bp, Macaca Mulatta
tcatgtccagaggggaccgtgccactctacagtgggttttcttttctctttgtacaagggaatgaacgagcccacggacaagacctcggaactctgggcagctgcctgcagcgatttaccacaatgccattcttattctgcaatgtcaatgatgtatgtaatttcgcatctcgaaatgattattcatactggctgtcaacaccagctctgatgccaatgaacatggctcccattactggcagggcccttgagccttatataagcagatgcactgtttgtgaagctcctgcgatcgccatagctgttcacagccaaaccactgacattcctccatgtcctcacggctggatttctctctggaaaggattttctttcatcatgttcacaagtgcaggttctgagggcaccgggcaagcactggcctcccctggctcctgcctggaagaattccgagccagcccatttctagaatgtcatggaagaggaacgtgcaactactattcaaattcctacagtttctggctggcttcattaaacccagaaagaatgttcagaaagcctattccatcaactgtgaaagctggagaattagaaaaaataataagtcgctgtcaggtgtgcatgaagaaaagacac

SEQ ID NO: 29363 - DNA, 1372 bp, Macaca Mulatta
  misc_feature (1)...(1372): n = A,T,C or G
ggcattacttaatgacttgcattgtggtttttctgcaagcaactttaatgactttttttataccacatggtctcccagtttctaggtgaatgcaacatgatgatggtgatgatgacgatgagtttaatcattgttccatttattgcctttagggctgagggaaagggnnnnnnnnnnnnnnnnnnccccattttcccccgttctgtctttcttttggtggcttacaccacacttaatgacgctatgactaattctgctcccaagcccttgtatcttgggcttcgttttaggctcacgtgtcagatctgcatgcattgcttgcatttttctggtatctgaatgttggttccttgttccaggaattcaacattaatttccaaaagtatcatgggacttgtgacaacacaagacatgaatctatgtataaaatttatcggcctttctcatttacctgctctagtattattgtattgtgtgtgcgtgcgtgtgtgatgtcaggctgccacgtaaaacttcagagaaaaatcttaaaagcagaccatccttttttgcatgctctattctaagtagaatgttcaatgtaactgactaaaattgcatgttaaagatatttagtatttaggttatcctactaaattcgatttgttttcagtttcctgtatatttgcttactgtgccgttttagtggttttaggataaaaatgcactggtgaagcaaatgtagtgccaacagaaggtgattttccagttgtaaatgtcatgcagcatttgaagggactgtgttttctttaaaaaaaatcacagttacttctaaatcagatttcgtttcttttatcgttttatgtgccaaaccacgaagtgcattgggcttgaatctctgaacactgtagacccattagaagactgttccgattgtcacaaattgtaatgcctgaaaacactcttaagctgattgtcttaaaaaaatgaaagttctccaaagacaaaacaggaacaatttattataacaaaataattatggttgaaatgtctgtgggttccttggaaaatgctggcgctctttgtggttttccatcattagtgcagtttggaatgaatgtgtacaaggtcagaggtcttcgtggttcactttttaaaattaggtaaatgacctcatctttcaagcttgaattcatttttaattttaattttattttatacaatgtgtagacagttccctgttctctgcatttagaagtatacacaatataaatctgttaattctgtaagtaatttttataattatgatgtaactctatcttatccttaaaacatttaaaataaaccctttatgtgcnnnnnnnnnnnnnnnnnnnnnnnnnnnnnnnnnnnc

SEQ ID NO: 29364 - DNA, 1272 bp, Macaca Mulatta
  misc_feature (1)...(1272): n = A,T,C or G
ggttttaaaatcaaagatgggaaaatcggagaaaattgcccttccccacggccagcttgttcatggtatacacttgtatgagcaaccaaagataaacagacagaaaagcaaatataacttgccactaaccaagatcacctctgcaaaaagaaatgaaaacagctttnnnnnnnnnnnnnnnnnnnnnnnnnnnnnnnnnnnnnnnnnnnnnnnnnnnnnnnnnnnnnnnnnnnnnnnnnnnnnnnnnnnnnnnnnnnnnnnnnnnnnnnnnnnnnnnnnnnnnnnnnnnnnnnnnnnnnnnnnnnnnnnnnnnnnnnnnnnnnnnnnnnnnnnnnnnnnnnnnnnnnnnnnnnnnnnnnnnnnnnnnnnnnnnnnnnnnnnnnnnnnnnnnnnnnnnnnnnnnnnnnnnnnnnnnnnnnnnnnnnnnnnnnnnnnnnnnnnnnnnnnnnnnnnnnnnnnnnnnnnnnnnnnnnnnnnnnnnnnnnnnnnnnnnggactcttgagaaaattggtacagaaatggaaatttgccttgttgcaacatacaattgcaaaagatgagtttaaaaaattacatacaaacagcttgtattatattttatattttgtaaatactgtataccatgtattatgtgtatattgttcatacttgagaggtatattatagttttgttatgaaagtatgtattttgccctgcccacattgcaggtgttttgtatatatacaatggagaaattttaagtgtgtgctaaggcacatggaagaccgattttatttgcacaaggtactgagatttttttcaagaaacagctgtcaaatctcaaggtgaagatctaaatgtgaacagtttactaatgcactactgaagtttaaatctgtggcacaatcaatgtaagcatggggtttgtttctctaaattgatttctaatttgaaattaatgaacaactcctattcccatttttgccaaaatcaatttctggttttggtatatatccattccagcttaatgcctctaattttaatgccaacaaaattggttgtaatcaaattttaaaataataataatttggcccccccttttaaaatagtcttgactctttgtgtgtggctttctcatgtttgaatgtgtgactagatgattttgtgtggttggatttttttaaattctactcatactggctgaatgtgagccgccatgcctggccatcatctacattttcttaccaggaacatcaagggggtttttgggcatagtactggacgactatag

SEQ ID NO: 29365 - DNA, 87 bp, Macaca Mulatta
cccatcctcataatttcgtatgagaccttccgccttcatgttggagtcctccagaaaggaagtgttggtctggtcatatgtgacgag

SEQ ID NO: 29366 - DNA, 705 bp, Macaca Mulatta
  misc_feature (1)...(705): n = A,T,C or G
tcctgcgacggcttcttcaccaactataactggcgggaggagcacttggagcggatgctggggcaggctggcgagcgccgggctgacgtgtacgtgggtgtggacgtgtttgctcgggggaacgtggtcggaggccgattcgacacagacaannnnnnnnnnnnnnnnnnnnnnnnnnnnnnnnnnnnnnnnnnnnnnnnnnnnnnnnnnnnnnnnnnnnnnnnnnnnnnnnnnnnnnnnnnnnnnnnnnnnnnnnnnnnnnnnnnnnnnnnnnnnnnnnnnnnnnnnnnnnnnnnnnnnnnnnnnnnnnnnnnnnnnnnnnnnnnnnnnnnnnnnnnnnnnnnnnnnnnnnnnnnnnnnnnnnnnnnnnnnnnnnnnnnnnnnnnnnnnnnnnnnnnnnnnnnnnnnnnnnnnnnnnnnnnnnnnnnnnnnnnnnnnnnnnnnnnnnnnnnnnnnnnnnnnnnnnnnnnnnnnnnnnnnnnnnnnnnnnnnnnnnnnnnnnnnnnnnnnnnnnnnnnnnnnnnnnnnnnnnnnnnnnnnnnnnnnnnnnnnnnaggttattttccctgcaggccccagtgccacccacgattctcctgtccatggtgtataagcttgaggggcaccacagacgtcacggttgctttagagctaaccacaggggatgccagcagctgccacatcggtggcatctcagtgttgaac

SEQ ID NO: 29367 - DNA, 523 bp, Macaca Mulatta
actatgtatagtcttctattctctttgccccattcctggtacatatgcaactgcttaagtctgactgctactgtgactggatctattatatgcttaatttctgagtgaaatagtttctttggtcaggacatttattctactataaaaaatagggctttgttgttattaaagacttagtgctcttgatattcttaagcttcatgtctcaatgagtggcagtctgtagagaaacagaaccgtgatagccttttaccttcccaagtagatatatttgctaacacaaagagtgtaagggtagtttggaattttaaaagaaggagatgtaatttagttcaaggtcacataattttaccaatattttttactgcttatatttaataggagagacgtcaggcaggcctcaggacctctaagaagacaagtgaaatcatgtgcctgtaacttaccctactttttactcaattaaaatggttcatgcagcttgagaccattgaggtgatgagtaattactatatggagatac

SEQ ID NO: 29368 - DNA, 734 bp, Macaca Mulatta
agataatcttccttcattctaattctattgcaagagtgggagtaaatgacttctgtccaacagtgccaaagatgaagaaatctttatacagtgcaataagtttattcaacaacccagtgaaatactgggaaatgcaacctgcaacatttcgttgtgttttgagcagaatgagtgttcagcttgggaactttggaatgtaataattagtaattggtaatgtccatttaatataagattcaaaaatccttacatttggaatacttgaactctattaataatggtagtattatatatacaagcaaatatctattctcaagtggtaagtccactgacattttatgacaagaaatttcaacagaattttgccaaactattgatacataagggttaagagaaacaagcatctactgcagtttctttttgcgtacaaatgatcttacataaatctcatgcttgcccattcttttctttataacaaagaagtaagacattcagtatttaacactttgttatcaagcatattttaaaaagaactgtactgtaaatggaatgcttgacttagcaaaatttgagctctttcatttgctgttagaaaaacaattaacaaagacagtaatgtgaagagtacattatactattcttattctttaataacttgggtagtactgtaatatttttaatcatcttgaagtatgatttgatataatcttattgaaattaccttatcatatctt

SEQ ID NO: 29369 - DNA, 813 bp, Macaca Mulatta
tatgtctgtgtgtttgagaccaagagaaagggtgtatgggcttgggagtagaagaaaggtcgtccctgctgcagaatttatctacagatgaatgaagaggctttcaggaatttgtaaagcttctccttcccctctgcattttgttttatttgtagctaataaaatacataatcctgacagtatttaagtgttcccctaccgttacctttgccattagcactgtatttccaatatggctttttttttttcatgacatattaatggaagtcagcttgtaaaattgtatgtcaagtttaaaaacataagaatgtagtttacaaataggccattgttgtatttgttgttctactttgggggaggagaggaattattcataggattccaaattctgaatcctatcttgggcccaaaaaacagaaaccagccataacccagaaattggcattccccacatgagtataagcttgcttgcctactttttacccttcaagtttcatgtcatttaaaaaaaatcttcccgtggtttatttaatcttctcatttttcacctaaactaaagagaacaaaatctggtttactggtctacaaagtgagaatttgaaatccaaaacacaaatattgctctagaaatgttccaaccttttctttcttctttttttcagtatccgctgtatcctgatactttaagtacagtgtaatatatgcaagacccgaaggatatttcaccaacccaatggcattcgatgtaattttcatgatttagaagaattattcacacaatcctgtttctatattctgacttctgattcactc

SEQ ID NO: 29370 - DNA, 12044 bp, Macaca Mulatta
  misc_feature (1)...(12044): n = A,T,C or G
ggaatcgcagcatctgaccccaggattcaccttacaaanagtggaatgacccaaccaccagagcttctacaaagtcagtatctttcaaatcgnnnnnnnnnnnnnnnnnnnnnnnnnnnnnnnnnnnnnnnnnnnnnnnnnnnnnnnnnnnnnnnnnnnnnnnnnnnnnnnnnnnnnnnnnnnnnnnnnnnnnnnnnnnnnnnnnnnnnnnnnnnnnnnnnnnnnnnnnnnnnnnnnnnnnnnnnnnnnnnnnnnnnnnnnnnnnnnnnnnnnnnnnnnnnnnnnnnnnnnnnnnnnnnnnnnnnnnnnnnnnnnnnnnnnnnnnnnnnnnnnnnnnnnnnnnnnnnnnnnnnnnnnnnnnnnnnnnnnnnnnnnnnnnnnnnnnnnnnnnnnnnnnnnnnnnnnnnnnnnnnnnnnnnnnnnnnnnnnnnnnnnnnnnnnnnnnnnnnnnnnnnnnnnnnnnnnnnnnnnnnnnnnnnnnnnnnnnnnnnnnnnnnnnnnnnnnnnnnnnnnnnnnnnnnnnnnnnnnnnnnnnnnnnnnnnnnnnnnnnnnnnnnnnnnnnnnnnnnnnnnnnnnnnnnnnnnnnnnnnnnnnnnnnnnnnnnnnnnnnnnnnnnnnnnnnnnnnnnnnnnnnnnnnnnnnnnnnnnnnnnnnnnnnnnnnnnnnnnnnnnnnnnnnnnnnnnnnnnnnnnnnnnnnnnnnnnnnnnnnnnnnnnnnnnnnnnnnnnnnnnnnnnnnnnnnnnnnnnnnnnnnnnnnnnnnnnnnnnnnnnnnnnnnnnnnnnnnnnnnnnnnnnnnnnnnnnnnnnnnnnnnnnnnnnnnnnnnnnnnnnnnnnnnnnnnnnnnnnnnnnnnnnnnnnnnnnnnnnnnnnnnnnnnnnnnnnnnnnnnnnnnnnnnnnnnnnnnnnnnnnnnnnnnnnnnnnnnnnnnnnnnnnnnnnnnnnnnnnnnnnnnnnnnnnnnnnnnnnnnnnnnnnnnnnnnnnnnnnnnnnnnnnnnnnnnnnnnnnnnnnnnnnnnnnnnnnnnnnnnnnnnnnnnnnnnnnnnnnnnnnnnnnnnnnnnnnnnnnnnnnnnnnnnnnnnnnnnnnnnnnnnnnnnnnnnnnnnnnnnnnnnnnnnnnnnnnnnnnnnnnnnnnnnnnnnnnnnnnnnnnnnnnnnnnnnnnnnnnnnnnnnnnnnnnnnnnnnnnnnnnnnnnnnnnnnnnnnnnnnnnnnnnnnnnnnnnnnnnnnnnnnnnnnnnnnnnnnnnnnnnnnnnnnnnnnnnnnnnnnnnnnnnnnnnnnnnnnnnnnnnnnnnnnnnnnnnnnnnnnnnnnnnnnnnnnnnnnnnnnnnnnnnnnnnnnnnnnnnnnnnnnnnnnnnnnnnnnnnnnnnnnnnnnnnnnnnnnnnnnnnnnnnnnnnnnnnnnnnnnnnnnnnnnnnnnnnnnnnnnnnnnnnnnnnnnnnnnnnnnnnnnnnnnnnnnnnnnnnnnnnnnnnnnnnnnnnnnnnnnnnnnnnnnnnnnnnnnnnnnnnnnnnnnnnnnnnnnnnnnnnnnnnnnnnnnnnnnnnnnnnnnnnnnnnnnnnnnnnnnnnnnnnnnnnnnnnnnnnnnnnnnnnnnnnnnnnnnnnnnnnnnnnnnnnnnnnnnnnnnnnnnnnnnnnnnnnnnnnnnnnnnnnnnnnnnnnnnnnnnnnnnnnnnnnnnnnnnnnnnnnnnnnnnnnnnnnnnnnnnnnnnnnnnnnnnnnnnnnnnnnnnnnnnnnnnnnnnnnnnnnnnnnnnnnnnnnnnnnnnnnnnnnnnnnnnnnnnnnnnnnnnnnnnnnnnnnnnnnnnnnnnnnnnnnnnnnnnnnnnnnnnnnnnnnnnnnnnnnnnnnnnnnnnnnnnnnnnnnnnnnnnnnnnnnnnnnnnnnnnnnnnnnnnnnnnnnnnnnnnnnnnnnnnnnnnnnnnnnnnnnnnnnnnnnnnnnnnnnnnnnnnnnnnnnnnnnnnnnnnnnnnnnnnnnnnnnnnnnnnnnnnnnnnnnnnnnnnnnnnnnnnnnnnnnnnnnnnnnnnnnnnnnnnnnnnnnnnnnnnnnnnnnnnnnnnnnnnnnnnnnnnnnnnnnnnnnnnnnnnnnnnnnnnnnnnnnnnnnnnnnnnnnnnnnnnnnnnnnnnnnnnnnnnnnnnnnnnnnnnnnnnnnnnnnnnnnnnnnnnnnnnnnnnnnnnnnnnnnnnnnnnnnnnnnnnnnnnnnnnnnnnnnnnnnnnnnnnnnnnnnnnnnnnnnnnnnnnnnnnnnnnnnnnnnnnnnnnnnnnnnnnnnnnnnnnnnnnnnnnnnnnnnnnnnnnnnnnnnnnnnnnnnnnnnnnnnnnnnnnnnnnnnnnnnnnnnnnnnnnnnnnnnnnnnnnnnnnnnnnnnnnnnnnnnnnnnnnnnnnnnnnnnnnnnnnnnnnnnnnnnnnnnnnnnnnnnnnnnnnnnnnnnnnnnnnnnnnnnnnnnnnnnnnnnnnnnnnnnnnnnnnnnnnnnnnnnnnnnnnnnnnnnnnnnnnnnnnnnnnnnnnnnnnnnnnnnnnnnnnnnnnnnnnnnnnnnnnnnnnnnnnnnnnnnnnnnnnnnnnnnnnnnnnnnnnnnnnnnnnnnnnnnnnnnnnnnnnnnnnnnnnnnnnnnnnnnnnnnnnnnnnnnnnnnnnnnnnnnnnnnnnnnnnnnnnnnnnnnnnnnnnnnnnnnnnnnnnnnnnnnnnnnnnnnnnnnnnnnnnnnnnnnnnnnnnnnnnnnnnnnnnnnnnnnnnnnnnnnnnnnnnnnnnnnnnnnnnnnnnnnnnnnnnnnnnnnnnnnnnnnnnnnnnnnnnnnnnnnnnnnnnnnnnnnnnnnnnnnnnnnnnnnnnnnnnnnnnnnnnnnnnnnnnnnnnnnnnnnnnnnnnnnnnnnnnnnnnnnnnnnnnnnnnnnnnnnnnnnnnnnnnnnnnnnnnnnnnnnnnnnnnnnnnnnnnnnnnnnnnnnnnnnnnnnnnnnnnnnnnnnnnnnnnnnnnnnnnnnnnnnnnnnnnnnnnnnnnnnnnnnnnnnnnnnnnnnnnnnnnnnnnnnnnnnnnnnnnnnnnnnnnnnnnnnnnnnnnnnnnnnnnnnnnnnnnnnnnnnnnnnnnnnnnnnnnnnnnnnnnnnnnnnnnnnnnnnnnnnnnnnnnnnnnnnnnnnnnnnnnnnnnnnnnnnnnnnnnnnnnnnnnnnnnnnnnnnnnnnnnnnnnnnnnnnnnnnnnnnnnnnnnnnnnnnnnnnnnnnnnnnnnnnnnnnnnnnnnnnnnnnnnnnnnnnnnnnnnnnnnnnnnnnnnnnnnnnnnnnnnnnnnnnnnnnnnnnnnnnnnnnnnnnnnnnnnnnnnnnnnnnnnnnnnnnnnnnnnnnnnnnnnnnnnnnnnnnnnnnnnnnnnnnnnnnnnnnnnnnnnnnnnnnnnnnnnnnnnnnnnnnnnnnnnnnnnnnnnnnnnnnnnnnnnnnnnnnnnnnnnnnnnnnnnnnnnnnnnnnnnnnnnnnnnnnnnnnnnnnnnnnnnnnnnnnnnnnnnnnnnnnnnnnnnnnnnnnnnnnnnnnnnnnnnnnnnnnnnnnnnnnnnnnnnnnnnnnnnnnnnnnnnnnnnnnnnnnnnnnnnnnnnnnnnnnnnnnnnnnnnnnnnnnnnnnnnnnnnnnnnnnnnnnnnnnnnnnnnnnnnnnnnnnnnnnnnnnnnnnnnnnnnnnnnnnnnnnnnnnnnnnnnnnnnnnnnnnnnnnnnnnnnnnnnnnnnnnnnnnnnnnnnnnnnnnnnnnnnnnnnnnnnnnnnnnnnnnnnnnnnnnnnnnnnnnnnnnnnnnnnnnnnnnnnnnnnnnnnnnnnnnnnnnnnnnnnnnnnnnnnnnnnnnnnnnnnnnnnnnnnnnnnnnnnnnnnnnnnnnnnnnnnnnnnnnnnnnnnnnnnnnnnnnnnnnnnnnnnnnnnnnnnnnnnnnnnnnnnnnnnnnnnnnnnnnnnnnnnnnnnnnnnnnnnnnnnnnnnnnnnnnnnnnnnnnnnnnnnnnnnnnnnnnnnnnnnnnnnnnnnnnnnnnnnnnnnnnnnnnnnnnnnnnnnnnnnnnnnnnnnnnnnnnnnnnnnnnnnnnnnnnnnnnnnnnnnnnnnnnnnnnnnnnnnnnnnnnnnnnnnnnnnnnnnnnnnnnnnnnnnnnnnnnnnnnnnnnnnnnnnnnnnnnnnnnnnnnnnnnnnnnnnnnnnnnnnnnnnnnnnnnnnnnnnnnnnnnnnnnnnnnnnnnnnnnnnnnnnnnnnnnnnnnnnnnnnnnnnnnnnnnnnnnnnnnnnnnnnnnnnnnnnnnnnnnnnnnnnnnnnnnnnnnnnnnnnnnnnnnnnnnnnnnnnnnnnnnnnnnnnnnnnnnnnnnnnnnnnnnnnnnnnnnnnnnnnnnnnnnnnnnnnnnnnnnnnnnnnnnnnnnnnnnnnnnnnnnnnnnnnnnnnnnnnnnnnnnnnnnnnnnnnnnnnnnnnnnnnnnnnnnnnnnnnnnnnnnnnnnnnnnnnnnnnnnnnnnnnnnnnnnnnnnnnnnnnnnnnnnnnnnnnnnnnnnnnnnnnnnnnnnnnnnnnnnnnnnnnnnnnnnnnnnnnnnnnnnnnnnnnnnnnnnnnnnnnnnnnnnnnnnnnnnnnnnnnnnnnnnnnnnnnnnnnnnnnnnnnnnnnnnnnnnnnnnnnnnnnnnnnnnnnnnnnnnnnnnnnnnnnnnnnnnnnnnnnnnnnnnnnnnnnnnnnnnnnnnnnnnnnnnnnnnnnnnnnnnnnnnnnnnnnnnnnnnnnnnnnnnnnnnnnnnnnnnnnnnnnnnnnnnnnnnnnnnnnnnnnnnnnnnnnnnnnnnnnnnnnnnnnnnnnnnnnnnnnnnnnnnnnnnnnnnnnnnnnnnnnnnnnnnnnnnnnnnnnnnnnnnnnnnnnnnnnnnnnnnnnnnnnnnnnnnnnnnnnnnnnnnnnnnnnnnnnnnnnnnnnnnnnnnnnnnnnnnnnnnnnnnnnnnnnnnnnnnnnnnnnnnnnnnnnnnnnnnnnnnnnnnnnnnnnnnnnnnnnnnnnnnnnnnnnnnnnnnnnnnnnnnnnnnnnnnnnnnnnnnnnnnnnnnnnnnnnnnnnnnnnnnnnnnnnnnnnnnnnnnnnnnnnnnnnnnnnnnnnnnnnnnnnnnnnnnnnnnnnnnnnnnnnnnnnnnnnnnnnnnnnnnnnnnnnnnnnnnnnnnnnnnnnnnnnnnnnnnnnnnnnnnnnnnnnnnnnnnnnnnnnnnnnnnnnnnnnnnnnnnnnnnnnnnnnnnnnnnnnnnnnnnnnnnnnnnnnnnnnnnnnnnnnnnnnnnnnnnnnnnnnnnnnnnnnnnnnnnnnnnnnnnnnnnnnnnnnnnnnnnnnnnnnnnnnnnnnnnnnnnnnnnnnnnnnnnnnnnnnnnnnnnnnnnnnnnnnnnnnnnnnnnnnnnnnnnnnnnnnnnnnnnnnnnnnnnnnnnnnnnnnnnnnnnnnnnnnnnnnnnnnnnnnnnnnnnnnnnnnnnnnnnnnnnnnnnnnnnnnnnnnnnnnnnnnnnnnnnnnnnnnnnnnnnnnnnnnnnnnnnnnnnnnnnnnnnnnnnnnnnnnnnnnnnnnnnnnnnnnnnnnnnnnnnnnnnnnnnnnnnnnnnnnnnnnnnnnnnnnnnnnnnnnnnnnnnnnnnnnnnnnnnnnnnnnnnnnnnnnnnnnnnnnnnnnnnnnnnnnnnnnnnnnnnnnnnnnnnnnnnnnnnnnnnnnnnnnnnnnnnnnnnnnnnnnnnnnnnnnnnnnnnnnnnnnnnnnnnnnnnnnnnnnnnnnnnnnnnnnnnnnnnnnnnnnnnnnnnnnnnnnnnnnnnnnnnnnnnnnnnnnnnnnnnnnnnnnnnnnnnnnnnnnnnnnnnnnnnnnnnnnnnnnnnnnnnnnnnnnnnnnnnnnnnnnnnnnnnnnnnnnnnnnnnnnnnnnnnnnnnnnnnnnnnnnnnnnnnnnnnnnnnnnnnnnnnnnnnnnnnnnnnnnnnnnnnnnnnnnnnnnnnnnnnnnnnnnnnnnnnnnnnnnnnnnnnnnnnnnnnnnnnnnnnnnnnnnnnnnnnnnnnnnnnnnnnnnnnnnnnnnnnnnnnnnnnnnnnnnnnnnnnnnnnnnnnnnnnnnnnnnnnnnnnnnnnnnnnnnnnnnnnnnnnnnnnnnnnnnnnnnnnnnnnnnnnnnnnnnnnnnnnnnnnnnnnnnnnnnnnnnnnnnnnnnnnnnnnnnnnnnnnnnnnnnnnnnnnnnnnnnnnnnnnnnnnnnnnnnnnnnnnnnnnnnnnnnnnnnnnnnnnnnnnnnnnnnnnnnnnnnnnnnnnnnnnnnnnnnnnnnnnnnnnnnnnnnnnnnnnnnnnnnnnnnnnnnnnnnnnnnnnnnnnnnnnnnnnnnnnnnnnnnnnnnnnnnnnnnnnnnnnnnnnnnnnnnnnnnnnnnnnnnnnnnnnnnnnnnnnnnnnnnnnnnnnnnnnnnnnnnnnnnnnnnnnnnnnnnnnnnnnnnnnnnnnnnnnnnnnnnnnnnnnnnnnnnnnnnnnnnnnnnnnnnnnnnnnnnnnnnnnnnnnnnnnnnnnnnnnnnnnnnnnnnnnnnnnnnnnnnnnnnnnnnnnnnnnnnnnnnnnnnnnnnnnnnnnnnnnnnnnnnnnnnnnnnnnnnnnnnnnnnnnnnnnnnnnnnnnnnnnnnnnnnnnnnnnnnnnnnnnnnnnnnnnnnnnnnnnnnnnnnnnnnnnnnnnnnnnnnnnnnnnnnnnnnnnnnnnnnnnnnnnnnnnnnnnnnnnnnnnnnnnnnnnnnnnnnnnnnnnnnnnnnnnnnnnnnnnnnnnnnnnnnnnnnnnnnnnnnnnnnnnnnnnnnnnnnnnnnnnnnnnnnnnnnnnnnnnnnnnnnnnnnnnnnnnnnnnnnnnnnnnnnnnnnnnnnnnnnnnnnnnnnnnnnnnnnnnnnnnnnnnnnnnnnnnnnnnnnnnnnnnnnnnnnnnnnnnnnnnnnnnnnnnnnnnnnnnnnnnnnnnnnnnnnnnnnnnnnnnnnnnnnnnnnnnnnnnnnnnnnnnnnnnnnnnnnnnnnnnnnnnnnnnnnnnnnnnnnnnnnnnnnnnnnnnnnnnnnnnnnnnnnnnnnnnnnnnnnnnnnnnnnnnnnnnnnnnnnnnnnnnnnnnnnnnnnnnnnnnnnnnnnnnacctcaattttgttggctctttgatttgtatcagactttgaggagggaagggggaagtgaacgaagcccgcttccaggcccctgacaggatgctgcagtggcaaggtcaagctcgcctgcctgccagcagttggctggtgagcagcagcatgcagaccagctgtgggaagcctcctgaagaatgccccagctgatgctttcagctgggaatagcttgttcctattggggaactcattgttctccagtctctgcagcaggaagccagctgtcatatccggagggaatttcagatgctttacctttttggttttgccctgcatcactcatgtggctatgaaataggtgtgtctctgagaatagagcccaatgtagtgacaatgggtagtcaaatgcaccccagatgctcatgccctcttgtggttctgcagtgtttatgaaattttggggaaaggagaccctagacagtaagcaaaattggagacactccaacaaggctaagttaatgctgtgttgcccagaccaagagctagcttctcatttggtcagcctagcatgcaaccagtagtgtggtggtaaaatgtttaacaaccagctcactgagaatagaaagcacctggtttgcaccatttgccaatttctgtggcataaatactaccactttagatgattttaagctaccaactgtgatgtcactgaacacatggttggaaagagatgcacacagttgactcttgcaagcctgggcaaaaatgcctcaacacactactggatgcagccagtcaaagagggttcatatttcatatatgtgttcatgtgnnnnnnnnnnnnnnnnnnnnnnnnnnnnnnnnnnnnnnnnnnnnnnnnnnnnnnnnnnnnnnnnnnnnnnnnnnnnnnnnnnnnnnnnnnnnnnnnnnnnnnnnnnnnnnnnnnnnnnnnnnnnnnnnnnnnnnnnnnnnnnnnnnnnnnnnnnnnnnnnnnnnnnnnnnnnnnnnnnnnnnnnnnnnnnnnnnnnnnnnnnnnnnnnnnnnnnnnnnnnnnnnnnnnnnnnnnnnnnnnnnnnnnnnnnnnnnnnnnnnnnnnnnnnnnnnnnnnnnnnnnnnnnnnnnnnnnnnnnnnnnnnnnnnnnnnnnnnnnnnnnnnnnnnnnnnnnnnnnnnnnnnnnnnnnnnnnnnnnnnnnnnnnnnnnnnnnnnnnnnnnnnnnnnnnnnnnnnnnnnnnnnnnnnnnnnnnnnnnnnnnnnnnnnnnnnnnnnnnnnnnnnnnnnnnnnnnnnnnnnnnnnnnnnnnnnnnnnnnnnnnnnnnnnnnnnnnnnnnnnnnnnnnnnnnnnnnnnnnnnnnnnnnnnnnnnnnnnnnnnnnnnnnnnnnnnnnnnnnnnnnnnnnnnnnnnnnnnnnnnnnnnnnnnnnnnnnnnnnnnnnnnnnnnnnnnnnnnnnnnnnnnnnnnnnnnnnnnnnnnnnnnnnnnnnnnnnnnnnnnnnnnnnnnnnnnnnnnnnnnnnnnnnnnnnnnnnnnnnnnnnnnnnnnnnnnnnnnnnnnnnnnnnnnnnnnnnnnnnnnnnnnnnnnnnnnnnnnnnnnnnnnnnnnnnnnnnnnnnnnnnnnnnnnnnnnnnnnnnnnnnnnnnnnnnnnnnnnnnnnnnnnnnnnnnnnnnnnnnnnnnnnnnnnnnnnnnnnnnnnnnnnnnnnnnnnnnnnnnnnnnnnnnnnnnnnnnnnnnnnnnnnnnnnnnnnnnnnnnnnnnnnnnnnnnnnnnnnnnnnnnnnnnnnnnnnnnnnnnnnnnnnnnnnnnnnnnnnnnnnnnnnnnnnnnnnnnnnnnnnnnnnnnnnnnnnnnnnnnnnnnnnnnnnnnnnnnnnnnnnnnnnnnnnnnnnnnnnnnnnnnnnnnnnnnnnnnnnnnnnnnnnnnnnnnnnnnnnnnnnnnnnnnnnnnnnnnnnnnnnnnnnnnnnnnnnnnnnnnnnnnnnnnnnnnnnnnnnnnnnnnnnnnnnnnnnnnnnnnnnnnnnnnnnnnnnnnnnnnnnnnnnnnnnnnnnnnnnnnnnnnnnnnnnnnnnnnnnnnnnnnnnnnnnnnnnnnnnnnnnnnnnnnnnnnnnnnnaccaccctcactaatctatcatattcacccataaattttacaaatgagattgattccgtctcaagacaatttgtcaaatacttaattttcttcctggatgattctacttactggatattttagaaagaaaaatgtctgagataaaatccctcacatttactcaatattacaaattgctgtttctattcctactctgagtagtgtttctgaagattgtttgctgtagtgttgtctttgataaaatgaatgtcagtagtgagccttttagagataccatgctcagaaatcctctttgggatcaggagatacctaaaattctccccctttgcccactttgttagatgagtgacctattctttggatcctgcaaagaagagactggtttcttttcttttctggtggtggtagtggttgtatctgtggctgtgatggttgttgttacttgtctttctctctctggctctggcttttgctttcctgctagtgttctttctctttccaaacaaatagtgaaattaaatgtgagcttctgaattgtacttgttcatgcttttaaaatataacagattaataaaaatagatgtgtcctgatttaaaacatgccccctggaaaggcatgctgtattatgaaatcatgataatataactgcattattacatggcagtataaatattagtctgtttaattcatttgtccaattgtataactttgtggagcagtgttttgacctttgctacataattttggagcaagtggagtggttgcaggcagacgagacagtgttatatcaggatttttcaatgaactttagnnnnnnnnnnnnnnnnnnnnnnnnnnnnnnnnnnnnnnnnnnnnnnnnnnnnnnnnnnnnnnnnnnnnnnnnnnnnnnnnnnnnnnnnnnnnnnnnnnnnnnnnnnnnnnnnnnnnnnnnnnnnnnnnnnnnnnnnnnnnnnnnnnnnnnnnnnnnnnnnnnnnnnnnnnnnnnnnnnnnnnnnnnnnnnnnnnnnnnnnnnnnnnnnnnnnnnnnnnnnnnnnnnnnnnnnnnnnnnnnnnnnnnnnnnnnnnnnnnnnnnnnnnnnnnnnnnnnnnnnnnnnnnnnnnnnnnnnnnnnnnnnnnnnnnnnnnnnnnnnnnnnnnnnnnnnnnnnnnnnnnnnnnnnnnnnnnnnnnnnnnnnnnnnnnnnnnnnnnnnnnnnnnnnnnnnnnnnnnnnnnnnnnnnnnnnnnnnnnnnnnnnnnnnnnnnnnnnnnnnnnnnnnnnnnnnnnnnnnnnnnnnnnnnnnnnnnnnnnnnnnnnnnnnnnnnnnnnnnnnnnnnnnnnnnnnnnnnnnnnnnnnnnnnnnnnnnnnnnnnnnnnnnnnnnnnnnnnnnnnnnnnnnnnnnnnnnnnnnnnnnnnnnnnnnnnnnnnnnnnnnnnnnnnnnnnnnnnnnnnnnnnnnnnnnnnnnnnnnnnnnnnnnnnnnnnnnnnnnnnnnnnnnnnnnnnnnnnnnnnnnnnnnnnnnnnnnnnnnnnnnnnnnnnnnnnnnnnnnnnnnnnnnnnnnnnnnnnnnnnnnnnnnnnnnnnnnnnnnnnnnnnnnnnnnnnnnnnnnnnnnnnnnnnnnnnnnnnnnnnnnnnnnnnnnnnnnnnnnnnnnnnnnnnnnnnnnnnnnnnnnnnnnnnnnnnnnnnnnnnnnnnnnnnnnnnnnnnnnnnnnnnnnnnnnnnnnnnnnnnnnnnnnnnnnnnnnnnnnnnnnnnnnnnnnnnnnnnnnnnnnnnnnnnnnnnnnnnnnnnnnnnnnnnnnnnnnnnnnnnnnnnnnnnnnnnnnnnnnnnnnnnnnnnnnnnnnnnnnnnnnnnnnnnnnnnnnnnnnnnnnnnnnnnnnnnnnnnnnnnnnnnnnnnnnnnnnnnnnnnnnnnnnnnnnnnnnnnnnnnnnnnnnnnnnnnnnnnnnnnnnnnnnnnnnnnnnnnnnnnnnnnnnnnnnnnnnnnnnnnnnnnnnnnnnnnnnnnnnnnnnnnnnnnnnnnnnnnnnnnnnnnnnnnnnnnnnnnnnnnnnnnnnnnnnnnnnnnnnnnnnnnnnnnnnnnnnnnnnnnnnnnnnnnnnnnnnnnnnnnnnnnnnnnnnnnnnnnnnnnnnnnnnnnnnnnnnnnnnnnnnnnnnnnnnnnnnnnnnnnnnnnnnnnnnnnnnnnnnnnnnnnnnnnnnnnnnnnnnnnnnnnnnnnnnnnnnnnnnnnnnnnnnnnnnnnnnnnnnnnnnnnnnnnnnnnnnnnnnnnnnnnnnnnnnnnnnnnnnnnnnnnnnnnnnnnnnnnnnnnnnnnnnnnnnnnnnnnnnnnnnnnnnnnnnnnnnnnnnnnnnnnnnnnnnnnnnnnnnnnnnnnnnnnnnnnnnnnnnnnnnnnnnnnnnnnnnnnnnnnnnnnnnnnnnnnnnnnnnnnnnnnnnnnnnnnnnnnnnnnnnnnnnnnntcttaacaagcatgctcgtcttgtcagaatttcagtaagttccaatttcctgtacagaccagggtaaactgttctaacatcaatcaattaatgaaatgttatctggtttttaaaagctggtttcatgtgctttatgtgtataaaactatatctgcctgtgtggctttgcatttcaaatgtgtggcgcacaagcattttgttggtgctttgttctcagtacagtaactctgtgtacaaacattttaatgtggttttgttgttttccaacaagatgtctctgtaaaaatgatattggctgagctggtgcgttggtttctctcatagaggcattaactatactgccaatgcattgaattatttaaaaatgcaaaataaaatttttatgaaaatctca

SEQ ID NO: 29371 - DNA, 606 bp, Macaca Mulatta
  misc_feature (1)...(606): n = A,T,C or G
ggcgctctcgacaaaccaacnnnnnnnnnnnnnnnnnnnnnnnnnnnnnnnnnnnnnnnnnnnnnnnnnnnnnnnnnnnnnnnnnnnnnnnnnnnnnnnnnnnnnnnnnnnnnnnnnnnnnnnnnnnnnnnnnnnnnnnnnnnnnnnnnnnnnnnnnnnnnnnnnnnnnnnnnnnnnnnnnnnnnnnnnnnnnnnnnnnnnnnnnnnnnnnnnnnnnnnnnnnnnnnnnnnnnnnnnnnnnnnnnnnnnnnnnnnnnnnnnnnnnnnnnnnnnnnnnnnnnnnnnnnnnnnnnnnnnnnnnnnnnnnnnnnnnnnnnnnnnnnnnnnnnnnnnnnnnnnnnnnnnnnnnnnnnnnnnnnnnnnnnnnnnnnnnnnnnnnnnnnnnnnnnnnnnnnnnnnnnnnnnnnnnnnnnnnnnnnnnnnnnnnnnnncgcgtgggggtgcagcgtgcgtggggggggtctccccttgtactcctcctgggacgttcgtgccatcaggaccagagctctttatgccccaaattagtacaaagcataacggcatctatggtagctctgctcgtaactcagccactggcagggaatgtccacattcaagatggtc

SEQ ID NO: 29372 - DNA, 2454 bp, Macaca Mulatta
  misc_feature (1)...(2454): n = A,T,C or G
tcggaccaaggcagcccatggctttgactgggaagaagagaggcaaccaattcttcagcttttgacacagctacttcagttggacatccgtcacctgtggaaccactcaataattgaagaagaatttgtcagnnnnnnnnnnnnnnnnnnnnnnnnnnnnnnnnnnnnnnnnnnnnnnnnnnnnnnnnnnnnnnnnnnnnnnnnnnnnnnnnnnnnnnnnnnnnnnnnnnnnnnnnnnnnnnnnnnnnnnnnnnnnnnnnnnnnnnnnnnnnnnnnnnnnnnnnnnnnnnnnnnnnnnnnnnnnnnnnnnnnnnnnnnnnnnnnnnnnnnnnnnnnnnnnnnnnnnnnnnnnnnnnnnnnnnnnnnnnnnnnnnnnnnnnnnnnnnnnnnnnnnnnnnnnnnnnnnnnnnnnnnnnnnnnnnnnnnnnnnnnnnnnnnnnnnnnnnnnnnnnnnnnnnnnnnnnnnnnnnnnnnnnnnnnnnnnnnnnnnnnnnnnnnnnnnnnnnnnnnnnnnnnnnnnnnnnnnnnnnnnnnnnnnnnnnnnnnnnnnnnnnnnnnnnnnnnnnnnnnnnnnnnnnnnnnnnnnnnnnnnnnnnnnnnnnnnnnnnnnnnnnnnnnnnnnnnnnnnnnnnnnnnnnnnnnnnnnnnnnnnnnnnnnnnnnnnnnnnnnnnnnnnnnnnnnnnnnnnnnnnnnnnnnnnnnnnnnnnnnnnnnnnnnnnnnnnnnnnnnnnnnnnnnnnnnnnnnnnnnnnnnnnnnnnnnnnnnnnnnnnnnnnnnnnnnnnnnnnnnnnnnnnnnnnnnnnnnnnnnnnnnnnnnnnnnnnnnnnnnnnnnnnnnnnnnnnnnnnnnnnnnnnnnnnnnnnnnnnnnnnnnnnnnnnnnnnnnnnnnnnnnnnnnnnnnnnnnnnnnnnnnnnnnnnnnnnnnnnnnnnnnnnnnnnnnnnnnnnnnnnnnnnnnnnnnnnnnnnnnnnnnnnnnnnnnnnnnnnnnnnnnnnnnnnnnnnnnnnnnnnnnnnnnnnnnnnnnnnnnnnnnnnnnnnnnnnnnnnnnnnnnnnnnnnnnnnnnnnnnnnnnnnnnnnnnnnnnnnnnnnnnnnnnnnnnnnnnnnnnnnnnnnnnnnnnnnnnnnnnnnnnnnnnnnnnnnnnnnnnnnnnnnnnnnnnnnnnnnnnnnnnnnnnnnnnnnnnnnnnnnnnnnnnnnnnnnnnnnnnnnnnnnnnnnnnnnnnnnnnnnnnnnnnnnnnnnnnnnnnnnnnnnnggcccagcagcttccacacaagaaaagaatccccaggagtctgtaggaaacatggtcacaggacagactgtctgtaaaagtaagcccagtgtgttggagcctgaggagtccaggggaagtgatgaactggtgaagcaggagatgctggtgcagtatctgcaggatgcctacagcttctcccggaagattacagcggccattggcattaccagcaagatgatgtatgaaaacacaactacagnnnnnnnnnnnnnnnnnnnnnnnnnnnnnnnnnnnnnnnnnnnnnnnnnnnnnnnnnnnnnnnnnnnnnnnnnnnnnnnnnnnnnnnnnnnnnnnnnnnnnnnnnnnnnnnnnnnnnnnnnnnnnnnnnnnnnnnnnnnnnnnnnnnnnnnnnnnnnnnnnnnnnnnnnnnnnnnnnnnnnnnnnnnnnnnnnnnnnnnnnnnnnnnnnnnnnnnnnnnnnnnnnnnnnnnnnnnnnnnnnnnnnnnnnnnnnnnnnnnnnnnnnnnnnnnnnnnnnnnnnnnnnnnnnnnnnnnnnnnnnnnnnnnnnnnnnnnnnnnnnnnnnnnnnnnnnnnnnnnnnnnnnnnnnnnnnnnnnnnnnnnnnnnnnnnnnnnnnnnnnnnnnnnnnnnnnnnnnnnnnnnnnnnnnnnnnnnnnnnnnnnnnnnnnnnnnnnnnnnnnnnnnnnnnnnnnnnnnnnnnnnnnnnnnnnnnnnnnnnnnnnnnnnnnnnnnnnnnnnnnnnnnnnnnnnnnnnnnnnnnnnnngccttctctgggcaaacgtcaaccccccttccggctgcctcaggaacacaggttgtttgagcgactgcgggagacggtcacaaaaggnaggctttgtccacccagacccactgtggatcccattcaaagaggtggcagtgaccctcatttaccaactggcagagggccccgaagtgatctgtgcccagatattgcagggctgtgcaaaacaggccctggagaagctagaagagaagagaaccagtcaggaggaccnnnngagtcccccgcaatgctccccactttcctgttgatgaacctgctgtccctggctggggatgtggctctgcagcagctggtccacttggagcaggcagtgagtggagagctctgtcggcgccgagttctccgggaagaacaggagcacaagaccaaagatcccaaggagaagn

SEQ ID NO: 29373 - DNA, 656 bp, Macaca Mulatta
cgctgccgccgccccgcgtgcccgtacccgtggcgctatggaggtggcgctgctggggctgtgcaactggagcacgctgggcgtgtgcgccgcgctgaagctgccgcagatctccgctgtactagctgcgcgcagcgcgcggggcctcagccttccgagtttacttctggagctggcagggttcctggtgtttctccggtaccagtgttactatgggtatccgccgctgacctacctggagtaccccatcctcatcgcacaagatgtcatcctcctgctgtgtatctttcattttaacgggaacgtgaagcaggccactccttacatcgctgtattggtgtcttcttggttcgtcctcgccctgcagaagtggatcatagacctggccatgaatctatgtactttcatcagcgcggccagtaagtttgcacagctccagtgtctatggaagacgagagactcgggaactgtgagtgcgctgacttggagcctctcttcctatacctgtgcaacaagaatcatcacaaccttaatgaccaccaatgattttacaattcttacacgtttcgtgatcatgctggctttaaatatatgggtaaccgtgacagtacttcgctaccggaagacagctataaaggctgaatgatggatacatt

SEQ ID NO: 29374 - DNA, 109 bp, Macaca Mulatta
aggcccaaggagaagccatgagggcagtgctgatcccaattcgagaggttctaaccccggaatcggacatctccatcgcacacgtcctggctgcccgagccgacctgtc

SEQ ID NO: 29375 - DNA, 1165 bp, Macaca Mulatta
  misc_feature (1)...(1165): n = A,T,C or G
tctggactcattaaaagatctttcttctctccatcacattgatgctaacagtgctaaatggaatgggaatttcttggattacatagcatttcgggggggggggacagaatctcagtatataataaaagcacctcttttgtaggatggcaccaagcatcatgaaaagcctaatggaccacaccattcctgaggtttaaaattcacggcaccatggnaaatgcagctgaacgtctccagtttccttctttggcaacttctgtattatgcacatgaagctttcccggagccagcaagcatatgctgcatgaggacttttctatcttacattatggctgggaatcttactattttcatctgataccttgttcagatttcaaaatagttgtagccttatcctggttttacagatgtgaaactttcaagagatttactgactttcctagaacagtttctctactggaaacctgatgcttttataagccattgtgattaggatgactgatacaggcttagctttgtgtgaaaaccagtcacctttctcctaggtaatgagtagtgctgttcatattactttagttctatagcatatttgcatttttaacatgctaccatagtacatttagaatgattgcctttgattttttaaaaaaattcggtgtgtgtataaaatgccaattaagaacactggtttcattccatgtaagcattaaacagtgtatgtaggttgcaagagattgtgatgattcttaaattttaactaccttcatttaatatgcttaaactgtcgccttaactatgttaagcatctagactaaaagccaaaatataattattgctgcctttctaaaacccaaaatgtagatctctattaacctgaaaatgtacactagccccgaacagttttaatggtacctttactgagctatagccataagctgccttaagttggtttttgaagaatttttttagttccaatgccattatgggaaaaccttccttttcctttctaaaaaaagttgccccaagccaccccacctttttgttgggagaaagattggaattctcccccaactataatatttaaaaatgggtnnnnnnnnnnnnnnnnnnnnnngcctttaaaaaacaccgggggaattaaaaaacctctttttcgcgcgacccg

SEQ ID NO: 29376 - DNA, 713 bp, Macaca Mulatta
actcactcccgggttcatctggccacaggtacacccttcccacagcctttgcatcccccagagccaagggagtttaagtttgcagagttacaggccagttctccagctctccatcttagagagacaggtcatctcgccggcccgcttgcaggaaatgagccctgcagccgactcgaatccccctagggctcaggcactgagggcctggggacagtggagcgtatgggtgggagacatatggagggtaccctatttacacctgagtcagcaaagccactgatgggaatctacagatttaggtgctaaaccgtttattttccacggatgagtcacaatctgaaaaatcagacttccatcctgaaaatctgtatgtttcaaaaccacttgccatcctgttagattgccagttcctgggaccaggcctcagactgtgaagtgtgtgtcctccagcatccagtccagggggagccacagaaaccatgatcttgcttaagccattaaagtcaaagatgaattctggagtgcagctgagtctttgatgaggcgatggggtagtttcatcaggaccagagaggactagggatttaagcataaatttctgaccttgcttcccctggatgttccccaacatcaaaaggaatgttggctatggaaaaataggccatccttggacagaggtgctttcagaaggtacaccaggatgacgtccccat

SEQ ID NO: 29377 - DNA, 902 bp, Macaca Mulatta
gggggagaagccgcagcgccgcctcttctctcgcgtcctcgcatccgtcgccgccgcctcttcctccgcctcctccttcgcctcttcctgcctcctcccggcttccgccgccgccactccagcctaatcccaaccccagggcgaagcgtttccttatttatttccgttttctcgccactacagcctcctgacacggtgatccgggcgggccccgcaggaattttatcccctcaccggcctcacactagtatcgcatgtccactatccagaacctccaatctttcgacccctttgctgatgcaactaagggtgacgacttactcccggcagggactgaggattacattcatataagaatcccagcaacggaacggcagaaagacattgactactgttcagggcattgcagatgattttgacaaaaagaaacttgtgaaagctttcaaaaagaaatttgcctgttatggtactgtgattgaacttcctgaatacggagaggttattcagctttaaggtgaccaaagaaaaaacatttgccattttctctttgaggttggctttgtcaaggaggaacagcttaagggttcgtggattctaaaatgaacctaaatacgtgggagaatttcttgaataagtttgttctctaaaccgggtttggctggccttgtgaaatgattgcccggcagtaaaacggactttttcatttattttaatcattcaaaactggcattccacttctgcttggattacggaaaaccgtggggggtatgtaaggcttagtaaaccccctaacgaaaaattgccagcaaagaatgggtaaccaaaaccctccaaatttccgcctttaacaggcttttccaaatggaaaaaaaggttttcgcagaggttttaatttggttcaa

SEQ ID NO: 29378 - DNA, 189 bp, Macaca Mulatta
gtattactggagaggagcactctttggtatgtagaggttaggtcatgagagaattccacccattggagtttcttgctaaggagcatgagtcttcgtcctgtgggcagtgggtagccattaaagtgtctggcacataagggacaagtagctcaaactccccagaatgatcactctgatacaaggtggagg

SEQ ID NO: 29379 - DNA, 585 bp, Macaca Mulatta
  misc_feature (1)...(585): n = A,T,C or G
gccttaaaggaccttcccanagtctccctttccctgtctggcttctcccttaagaagagagagatacttgtagaattgggtgggaggaatgagcataaactgtccttccatttgggatatgttacattagaaagagagagaataaggagcctttcttatggaagaaatgggagaagagagacagggttattttcagcagagtctagtagtttctctgtaaggcaaaataatctaaaaagactaacctgcccacccactccttatattgctgtgagattgcccctatcttgtgctcttctgtctgcagtgtgcacggacttgttctaacctggaataaaggtgattgattgtannnnnnnnnnnnnnnnnnnnnnnnnnnnnnnnnnnnnnnnnnnnnnnnnnnnnnnnnnnnnnnnnnnnnnnnnnnnnnnnnnnnnnnnnnnnnnnnnnnnnnnnnnnnnnnnnnnnnnnnnnnnnnnnnnnnnnnnnnnnnnnnnnnnnnnnnnnnnnnnnnnnnnnnnnnnnnnnnnnnnnnnnnnnnnnnnnnnnnnnnnnnnnnnnnnnnnnnnnnnnnnnnnnnnnnnn

SEQ ID NO: 29380 - DNA, 1195 bp, Macaca Mulatta
  misc_feature (1)...(1195): n = A,T,C or G
ggggcagttcggcggtcccgcgggtctgtctcttgcttcaacagtgtttggacggaacagatccggggtcttgttcttccagcctccgatcgccctccgatttcctctccacttgcaacctccgggaccatcttctcggccttctcctgcttctgggacctgccagcaccgtttttgtggttagctccgtcttgccgaccaaccatgagctcccagattcgtcagaattattccaccgacgtggaggcagccgtcaacagcctggtcaatatgtacctgcaggcctcctacacgtacctctgtctgggcttctatttcaaccgctatgatgtggctcaggaaggcgtgagccccttcttcctggaattggcctaagagaaacgcgagggtttaatatcgtttcctgatagatccataaaattgtgttggccggtccaacgactccttttattatagggaacgtccaagaaaagccccaggcatgaacaaaatgaaacgcggggggggacaaaaaacccctagggaaatgacaccatcgagcaaatgatctcggaacacaaatgggcgcatcgtcctgggtctatactatataaataaatagaatcgtcaatggtagacctatctcctaacgacggggcanccgctcgatgtttttttgagtgaggggaaatataatgcacatcatctcacgatgggacaaaatacacctctgggtaagggcgcagattccctccttgttgcaactcaacacatctcacgattctagagaaaagttttcagctgaacacacagaacatcacgtatcgtgcggctaagtgagaagctgtaaaaatacccacccgggtagggatgatatatgagtggcgacactcgcaagattcagccgccactccttaaaaatgcttacaaaaggggtcaagaaaggtcagatctaaaacatcagctcaactcacnataactaaacaatataacataaatgataatttagtagggtgatgtgtcgccaaacccactaacctcacaatagcgaaaagtcaacataaagatattttactcaacaatagggctcgctggcgtatttgcggctgccatagagatctactctatgggtagttagtgagcacttggtgttctcaccttatgcgggcttcgcgancaaaaataactggcatgtacgcgcgcacttatcacaaag

SEQ ID NO: 29381 - DNA, 799 bp, Macaca Mulatta
gggaactttctgatgagtgttttgaacagtggggtgtgagaccaaggccctcctggatcactactatgtatggaggcaaaaacatcagttcacactcaaacattgttttcagcaatggtgaactagacccctggtcaggaggtggagtaacttttgatatcacagacactctggttgcagtcaccatctcttattgtgcccaccacttacatctgcgcgccaagaatgccttagatcccacgtctgtgctgttagcccgtgccttggaagtcagacatatggagaattggatcagagatttctatgaccgtgcaggaaagcagcactgagaaacttttgattgttttcagtttcttcttttatgttctaaccaccacattcccattcactttggttttctacgtgtaattaccttctcttgtgtatcagtagatttgatgggccacggttgagatagaataaaggggtgatgaccgtaacagccactggtccccatgaatgggattttcttggggttctcaccgtcttttgcaccaatggtctagaaaaaaaccttcctgaaaaactcttcccaacaccctccagtgggccttttctaaactgggaaacaagagctttcctgaattgcctttttccttaggaaggggagcaggctaccttttccttatgggaaaccacctgccaatcccacaaaaatcttccctcttgggggcctttataaaaggattatgaaagatctttcctctttaaaccccccatatttatgtaaaagtccctcccaatccccccttatcctcct

SEQ ID NO: 29382 - DNA, 1747 bp, Macaca Mulatta
  misc_feature (1)...(1747): n = A,T,C or G
aaggtcttggctctgcacaatgacttattgctagtcttcaggactcccaggaaaggctcttactgagcttgatttgactaaagacagcctaaaggagaccaaggatgctctattaaatgtggaggnnnnnnnnnnnnnnnnnnnnnnnnnnnnnnnnnnnnnnnnnnnnnnnnnnnnnnnnnnnnnnnnnnnnnnnnnnnnnnnnnnnnnnnnnnnnnnnnnnnnnnnnnnnnnnnnnnnnnnnnnnnnnnnnnnnnnnnnnnnnnnnnnnnnnnnnnnnnnnnnnnnnnnnnnnnnnnnnnnnnnnnnnnnnnnnnnnnnnnnnnnnnnnnnnnnnnnnnnnnnnnnnnnnnnnnnnnnnnnnnnnnnnnnnnnnnnnnnnnnnnnnnnnnnnnnnnnnnnnnnnnnnnnnnnnnnnnnnnnnnnnnnnnnnnnnnnnnnnnnnnnnnnnnnnnnnnnnnnnnnnnnnnnnnnnnnnnnnnnnnnnnnnnnnnnnnnnnnnnnnnnnnnnnnnnnnnnnnnnnnnnnnnnnnnnnnnnnnnnnnnnnnnnnnnnnnnnnnnnnnnnnnnnnnnnnnnnnnnnnnnnnnnnnnnnnnnnnnnnnnnnnnnnnnnnnnnnnnnnnnnnnnnnnnnnnnnnnnnnnnnnnnnnnnnnnnnnnnnnnnnnnnnnnnnnnnnnnnnnnnnnnnnnnnnnnnnnnnnnnnnnnnnnnnnnnnnnnnnnnnnnnnnnnnnnnnnnnnnnnnnnnnnnnnnnnnnnnnnnnnnnnnnnnnnnnnnnnnnnnnnnnnnnnnnnnnnnnnnnnnnnnnnnnnnnnnnnnnnnnnnnnnnnnnnnnnnnnnnnnnnnnnnnnnnnnnnnnnnnnnnnnnnnnnnnnnnnnnnnnnnnnnnnnnnnnnnnnnnnnnnnnnnnnnnnnnnnnnnnnnnnnnnnnnnnnnnnnnnnnnnnnnnnnnnnnnnnnnnnnnnnnnnnnnnnnnnnnnnnnnnnnnnnnnnnnnnnnnnnnnnnnnnnnnnnnnnnnnnnnnnnnnnnnnnnnnnnnnnnnnnnnnnnnnnnnnnnnnnnnnnnnnnnnnnnnnnnnnnnnnnnnnnnnnnnnnnnnnnnnnnnnnnnnnnnnnnnnnnnnnnnnnnnnnnnnnnnnnnnnnnnnnnnnnnnnnnnnnnnnnnnnnnnnnnnnnnnnnnnnnnnnnnnnnnnnnnnnnnnnnnnnnnnnnnnnnnnnnnnnnnnnnnnnnnnnnnnnnnnnnnnnnnnnnnnnnnnnnnnnnnnnnnnnnnnnnnnnnnnnnnnnnnnnnnnnnnnnnnnnnnnnnnnnnnnnnnnnnnnnnnnnnnnnnnnnnnnnnnnnnnnnnnnnnnnnnnnnnnnnnnnnnnnnnnnnnnnnnnnnnnnnnnnnnnnngtcctgctcagagtgaagcttctccagtggcttctccagatccccagcgccaggagtggtttgcccggtacttcacattctgaaagaattgtgttgacacagctctgtatggactgttactgagagcatgactttatacagattgatatgtaaataggctttcctatgtcaaacactgtgaatgagaaagtctttgtctctccaatttgaaaatgcactgtatttcctgtgatatttattggaatcattctataaggtactatatgatgtgtgtaattataactgttatttttatttgagatggaagaggctttaacctttgtaattactgcataataaattttgttagaa

SEQ ID NO: 29383 - DNA, 70 bp, Macaca Mulatta
agccaatgagaatgaggactgttcagcactaaccaatgagatcattgtcaccatgcacaccttccaggat

SEQ ID NO: 29384 - DNA, 103 bp, Macaca Mulatta
ctgaagttctccaagggcgaccatctctacgtcttggacacatctggcggtgagtggtggtacgcacacaacaccaccgaaatgggctacattccctcctcct

SEQ ID NO: 29385 - DNA, 119 bp, Macaca Mulatta
cagacagggaagttggacccccactacccaaaggtctgcgggcacagagggaacgttctggacgtcaagtggaacccttttgatgattttgagatcgcctcctgttctgaagacgccac

SEQ ID NO: 29386 - DNA, 107 bp, Macaca Mulatta
agattgagcgacgcctggacacggtgcggtcagtatgccaccattcccataagcgcttggtggcatgtttccagggccagcatggcaccgatgccgagaagagacac

SEQ ID NO: 29387 - DNA, 511 bp, Macaca Mulatta
  misc_feature (1)...(511): n = A,T,C or G
gatccgagctggatccagagttgcatacagaccaatttctgcatcagtgttatctcgaccagaggctannnnnnnnnnnnnnnnnnnnnnnnnnnnnnnnnnnnnnnnnnnnnnnnnnnnnnnnnnnnnnnnnnnnnnnnnnnnnnnnnnnnnnnnnnnnnnnnnnnnnnnnnnnnnnnnnnnnnnnnnnnnnnnnnnnnnnnnnnnnnnnnnnnnnnnnnnnnnnnnnnnnnnnnnnnnnnnnnnnnnnnnnnnnnnnnnnnnnnnnnnnnnagaaacccttcgctgaagcagcagctgttctcatatgctatcctgggatttgccttgtctgaagctatgggtctcttttgtttgatggttgctttcttgattttgtttgccatgtaacaaattactgcttgacatgttggcattcttattaattacggatgtaattctgtgtatcttactgtgactccgaaaactgtagtattggtgtcatggaaatgtacgttattcccaaagtcat

SEQ ID NO: 29388 - DNA, 616 bp, Macaca Mulatta
aggtctatgagaacatccatttggcccgtctcgggtgaggaacagctagggaacagaggcttaaatcccggaggggactggggatgggagaggaaacacgggttgggttggggaggagcccttgttcctgaggatgtgaaaagtagaggtatccttaatccgtctctctggaaaaccccacagcccacctgcccacaagaccaggtgattttggtgacatctgctgggaagtgtgacctgctgtttcgctggccatctagcacctggagtattcctcgacaaccttggcaaggggggcgggactgcgagttcgacttcaccgtccagctggcgtccagcagccaccaagctgtgtatggggagggtgggggactgaaggaaaggaggagcattattttgtgatgtcacctacaaaaaggtttggtctcctgtcttgtagcagccagtggaaggatggccctgagcccatagtactgtggggttgaggggagcctgaggttgctggtgggggcaaggaggatgggtgtgagcagggaggagacaggaatctggagacttgagcaatggtggggaatccattgcagcagagctgaaggacaaatggggaaaactgggg

SEQ ID NO: 29389 - DNA, 1649 bp, Macaca Mulatta
  misc_feature (1)...(1649): n = A,T,C or G
aatgacgccatcaatcctgaggacttcccagaacctgtctacaagagtttcctcatgagcctctgtcctcggccagaaataaatgagatcttcacttcttnnnnnnnnnnnnnnnnnnnnnnnnnnnnnnnnnnnnnnnnnnnnnnnnnnnnnnnnnnnnnnnnnnnnnnnnnnnnnnnnnnnnnnnnnnnnnnnnnnnnnnnnnnnnnnnnnnnnnnnnnnnnnnnnnnnnnnnnnnnnnnnnnnnnnnnnnnnnnnnnnnnnnnnnnnnnnnnnnnnnnnnnnnnnnnnnnnnnnnnnnnnnnnnnnnnnnnnnnnnnnnnnnnnnnnnnnnnnnnnnnnnnnnnnnnnnnnnnnnnnnnnnnnnnnnnnnnnnnnnnnnnnnnnnnnnnnnnnnnnnnnnnnnnnnnnnnnnnnnnagttatcacgcctctcctcggctgagatgtaccgccaagagctgctgtccggctgccgatgcgcggagctagattgctggaagggcaaaccccctgacaaagagaccattatcacccacggtttcaccatgaccacagacatcttcttcaaagnnnnnnnnnnnnnnnnnnnnnnnnnnnnnnnnnnnnnnnnnnnnnnnnnnnnnnnnnnnnnnnnnnnnnnnnnnnnnnnnnnnnnnnnnnnnnnnnnnnnnnnnnnnnnnnnnnnnnnnnnnnnnnnnnnnnnnnnnnnnnnnnnnnnnnnnnnnnnnnnnnnnnnnnnnnnnnnnnnnnnnnnnnnnnnnnnnnnnnnnnnnnnnnnnnnnnnnnnnnnnnnnnnnnnnnnnnnnnnnnnnnnnnnnnnnnnnnnnnnnnnnnnnnnnnnnnnnnnnnnnnnnnnnnnnnnnnnnnnnnnnnnnnnnnnnnnnnnnnnnnnnnnnnnnnnnnnnnnnnnnnnnnnnnnnnnnnnnnnnnnnnnnnnnnnnnnnnnnnnnnnnnnnnnnnnnnnnnnnnnnnnnnnnnnnnnnnnnnnnnnnnnnnnnnnnnnnnnnnnnnnnnnnnnnnnnnnnnnnnnnnnnnnnnnnnnnnnnnnnnnnnnnnnnnnnnnnnnnnnnnnnnnnnnnnnnnnnnnnnnnnnnnnnnnnnnnnnnnnnnnnnnnnnnnnnnnnnnnnnnnnnnnnnnnnnnnnnnnnnnnnnnnnnnnnnnnnnnnnnnnnnnnnnnnnnnnctacaacaagcgccagatgagccgcatttaccccaagggaacccgcatggactcctccaactacatgccccagatgttctggaatgctggatgccagatggttgccctcaacttccagacgatgnnnnnnnnnnnnnnnnnnnnnnnnnnnnnnnnnnnnnnnnnnnnnnnnnnnnnnnnnnnnnnnnnnnnnnnnnnnnnnnnnnnnnnnnnnnnnnnnnnnnnnnnnnnnnnnnnnnnnnnnnnnnnnnnnnnnnnnnnnnnnnnnnnnnnnnnnnnnnnnnnnnnnnnnnnnnnnnngtgatctctgggcagttcctgtcagaacgcagtgtgcgcacctatgtggaagtggagctgtttggccttcctggggaccccaagaggcgctaccgaactaagctgtcacccagtaccaattccatcaatcctgtctggaaggaggagccctttgtctttgagaa

SEQ ID NO: 29390 - DNA, 1263 bp, Macaca Mulatta
  misc_feature (1)...(1263): n = A,T,C or G
aagtgattatttttcttttgctcacctttcaacatgaaggaggatcaagttgtggcggaagaaccaggattccaagatgaagaggnnnnnnnnnnnnnnnnnnnnnnnnnnnnnnnnnnnnnnnnnnnnnnnnnnnnnnnnnnnnnnnnnnnnnnnnnnnnnnnnnnnnnnnnnnnnnnnnnnnnnnnnnnnnnnnnnnnnnnnnnnnnnnnnnnnnnnnnnnnnnnnnnnnnnnnnnnnnnnnnnnnnnnnnnnnnnnnnnnnnnnnnnnnnnnnnnnnnnnnnnnnnnnnnnnnnnnnnnnnnnnnnnnnnnnnnnnnnnnnnnnnnnnnnnnnnnnnnnnnnnnnnnnnnnnnnnnnnnnnnnnnnnnnnnnnnnnnnnnnnnnnnnnnnnnnnnnnnnnnnnnnnnnnnnnnnnnnnnnnnnnnnnnnnnnnnnnnnnnnnnnnnnnnnnnnnnnnnnnnnnnnnnnnnnnnnnnnnnnnnnnnnnnnnnnnnnnnnnnnnnnnnnnnnnnnnnnnnnnnnnnccgtccagatcgccttcgggacattgctgatcgcttcaatgtagaccatgatgcagtactggacaacgtactttatgcacgtgcatatactagnnnnnnnnnnnnnnnnnnnnnnnnnnnnnnnnnnnnnnnnnnnnnnnnnnnnnnnnnnnnnnnnnnnnnnnnnnnnnnnnnnnnnnnnnnnnnnnnnnnnnnnnnnnnnnnnnnnnnnnnnnnnnnnnnnnnnnnnnnnnnnnnnnnnnnnnnnnnnnnnnnnnnnnnnnnnnnnnnnnnnnnnnnnnnnnnnnnnnnnnnnnnnnnnnnnnnnnnnnnnnnnnnnnnnnnnnnnnnnnnnnnnnnnnnnnnnnnnnnnnnnnnnnnnnnnnnnnnnnnnnnnnnnnnnnnnnnnnnnnnnnnnnnnnnnnnnnnnnnnnnnnnnnnnnnnnnnnnnnnnnnnnnnnnnnnnnnnnnnnnnnnagtcctgagatgcctgaaaatgaagccaccttcgcaataactgctggaggaattggggatgccaaggagtaggtggtgaattgatgcaaatcgcttcttagtgcttattaggagctgaagaaatggaaaagcagtctccaatttcacatcttgaaatagaggttttttcccacatgttactaaaggaaagtcagcaaaagatatttaaatcttatatttatcttaaaagtccttgatttgtgataactatacattgtatgtaaattcagggatatgtata

SEQ ID NO: 29391 - DNA, 118 bp, Macaca Mulatta
catcagcctttccccaccccacgaggccctcgactaccacttcggcctcgaggagggcgagggcatcagagacctcttcgactgtgactttggggacctcacccccctggatttctga

SEQ ID NO: 29392 - DNA, 874 bp, Macaca Mulatta
ggggcagttcggcggtcctgcgggtctgtctcttgcttcaacagtgtttggacggaacagatccggggactctttcttccagcctccgaccgccctccgatttcctctccacttgcaacctccgggaccatcttctcggccatctcctgcttctgggacctgccagcaccgtttttgtggttagctccgtcttgccgaccaaccatgagctcccagattcgtcagaattattccaccgacgtggaggcagccgtcaacagcctggtcaatatgtacctgcaggcctcctacacctacctctctctgggcttctatttcgaccgcgatgatgtggctctggaaggcgtgagccacttcttccgctaattggccgatgataaacgcgagggctacaagcgtctcctgaagatgcaaaaccagcgatgggcggccgcgctcttttttcagggaagtcagtaagcccgccttgaagatgaagtgggggtaaaaaaccccggattgccatgaatagccctcaatggccccttggtaaaaaaaaaatagtaaccctagccccatttatggaatcattcctggccccaggtggtttcctgcccatccagtggaattcaccaattctctagaggatatttccaggggaatattacaagtttccctcgaaatgacgggagagtggaaatccccaaactaaatagataaggatggtatacacaactatgatcaaaatccatttaaatcgaatttagtatctgaaccccatatatgtcttaggaattgtagtattgaaaattcctagctattagaaaagcgatatccattctcaccatacctcaacaagtgtaagcgtgtcttctccgaaagcatccaacgtaca

SEQ ID NO: 29393 - DNA, 134 bp, Macaca Mulatta
ttttcagatccgtggtgctcttaatgccgtcagaagcttggttcctgatgctttagaagggaagccgaaagctgttgttactcacagcagtggaaaccatggccaggctctcacctatgctgccaaactggaag

SEQ ID NO: 29394 - DNA, 3251 bp, Macaca Mulatta
  misc_feature (1)...(3251): n = A,T,C or G
nccggttaccaattcaagggacactcaagaggtacccctagaaaaagctaagcaagtgcttaaaataattgctactttcaagcataccacctcaatctttgatgactttgcacattatgaaaagcgtcaagaagaggaggaagccatgcgtaggnnnnnnnnnnnnnnnnnnnnnnnnnnnnnnnnnnnnnnnnnnnnnnnnnnnnnnnnnnnnnnnnnnnnnnnnnnnnnnnnnnnnnnnnnnnnnnnnnnnnnnnnnnnnnnnnnnntgcttaaggtgacatctttgaacactttaacacaaagttgactcttctcgtaatggttttcatcagcgcatctgcccttatactctcaccaaacacacttgagaactgtaacttcgtcaagcactttctgtcctgaagcttttaccagtatctgctgtcttttgtaattatgcatcctagctaaggcacagaagactgaatgaatgcaannnnnnnnnnnnnnnnnnnnnnnnnnnnnnnnnnnnnnnnnnnnnnnnnnnnnnnnnnnnnnnnnnnnnnnnnnnnnnnnnnnnnnnnnnnnnnnnnnnnnnnnnnnnnnnnnnnnnnnnnnnnnnnnnnnnnnnnnnnnnnnnnnnnnnnnnnnnnnnnnnnnnnnnnnnnnnnnnnnnnnnnnnnnnnnnnnnnnnnnnnnnnnnnnnnnnnnnnnnnnnnnnnnnnnnnnnnnnnnnnnnnnnnnnnnnnnnnnnnnnnnnnnnnnnnnnnnnnnnnnnnnnnnnnnnnnnnnnnnnnnnnnnnnnnnnnnnnnnnnnnnnnnnnnnnnnnnnnnnnnnnnnnnnnnnnnnnnnnnnnnnnnnnnnnnnnnnnnnnnnnnnnnnnnnnnnnnnnnnnnnnnnnnnnnnnnnnnnnnnnnnnnnnnnnnnnnnnnnnnnnnnnnnnnnnnnnnnnnnnnnnnnnnnnnnnnnnnnnnnnnnnnnnnnnnnnnnnnnnnnnnnnnnnnnnnnnnnnnnnnnnnnnnnnnnnnnnnnnnnnnnnnnnnnnnnnnnnnnnnnnnnnnnnnnnnnnnnnnnnnnnnnnnnnnnnnnnnnnnnnnnnnnnnnnnnnnnnnnnnnnnnnnnnnnnnnnnnnnnnnnnnnnnnnnnnnnnnnnnnnnnnnnnnnnnnnnnnnnnnnnnnnnnnnnnnnnnnnnnnnnnnnnnnnnnnnnnnnnnnnnnnnnnnnnnnnnnnnnnnnnnnnnnnnnnnnnnnnnnnnnnnnnnnnnnnnnnnnnnnnnnnnnnnnnnnnnnnnnnnnnnnnnnnnnnnnnnnnnnnnnnnnnnnnnnnnnnnnnnnnnnnnnnnnnnnnnnnnnnnnnnnnnnnnnnnnnnnnnnnnnnnnnnnnnnnnnnnnnnnnnnnnnnnnnnnnnnnnnnnnnnnnnnnnnnnnnnnnnnnnnnnnnnnnnnnnnnnnnnnnnnnnnngttccaaaaggagaaagctatgtagaaagatacattaagggtgaaaatagcaatacagtagatttgaataccttgatgtttttgcattacttcatttatgtttacatcatgtttagaaatgtttgcatttactatggtctttggtcacttcagctcaaaaacctagtgatggatatttctttgaggctttcatttatataattttgtttcgtacaatgtttttttaaaatgtgcaaatactgtattcaagtgaaaacagtatttgtagataaccatagctactacacagttctttggtagtcccagtgtagttatatcagtgtttactgaagggaacatcaaaatattaatggtatattataaaataaagactttcttaaaggaaaattgcacctattttacctttttaagagtaagccatgaaatcttgtaacatgtctcttaactatttataatgaaaagtggcatttgggtatagtcaccacagcaatgttctacatccctaagattacataggtaggacatgtcaaagatgactgttgtcattctggaggtcctattagagaatattataaaagggtgaccttgtaggaaggatctgagtcctccccctgaggttgtctttttcttggtgctttattagcaactctggatatttttataaaactagttacattataaacggtttcaaacatgtggaatttacattaggtttttatgtaagnnnnnnnnnnnnnnnnnnnnnnnnnnnnnnnnnnnnnnnnnnnnnnnnnnnnnnnnnnnnnnnnnnnnnnnnnnnnnnnnnnnnnnnnnnnnnnnnnnnnnnnnnnnnnnnnnnnnnnnnnnnnnnnnnnnnnnnnnnnnnnnnnnnnnnnnnnnnnnnnnnnnnnnnnnnnnnnnnnnnnnnnnnnnnnnnnnnnnnnnnnnnnnnnnnnnnnnnnnnnnnnnnnnnnnnnnnnnnnnnnnnnnnnnnnnnnnnnnnnnnnnnnnnnnnnnnnnnnnnnnnnnnnnnnnnnnnnnnnnnnnnnnnnnnnnnnnnnnnnnnnnnnnnnnnnnnnnnnnnnnnnnnnnnnnnnnnnnnnnnnnnnnnnnnnnnnnnnnnnnnnnnnnnnnnnnnnnnnnnnnnnnnnnnnnnnnnnnnnnnnnnnnnnnnnnnnnnnnnnnnnnnnnnnnnnnnnnnnnnnnnnnnnnnnnnnnnnnnnnnnnnnnnnnnnnnnnnnnnnnnnnnnnnnnnnnnnnnnnnnnnnnnnnnnnnnnnnnnnnnnnnnnnnnnnnnnnnnnnnnnnnnnnnnnnnnnnnnnnnnnnnnnnnnnnnnnnnnnnnnnnnnnnnnnnnnnnnnnnnnnnnnnnnnnnnnnnnnnnnnnnnnnnnnnnnnnnnnnnnnnnnnnnnnnnnnnnnnnnnnnnnnnnnnnnnnnnnnnnnnnnnnnnnnnnnnnnnnnnnnnnnnnnnnnnnnnnnnnnnnnnnnnnnnnnnnnnnnnnnnnnnnnnnnnnnnnnnnnnnnnnnnnnnnnnnnnnnnnnnnnnnnnnnnnnnnnnnnnnnnnnnnnnnnnnnnnnnnnnnnnnnnnnnnnnnnnnnnnnnnnnnnnnnnnnnnnnnnnnnnnnnnnnnnnnnnnnnnnnnnnnnnnnnnnnnnnnnnnnnnnnnnnnnnnnnnnnnnnnnnnnnnnnnnaattttgtcgtgtttgggtttgttcattcctgtgaatgatggtacagttaggtgagattttctgttatggtacccaaactcaccatttggtcctctttaatctttgagggtttcaataaaaattgttcactcat

SEQ ID NO: 29395 - DNA, 777 bp, Macaca Mulatta
  misc_feature (1)...(777): n = A,T,C or G
gggagtcgcaccagaagcgagcagggctggtgctggggcttcttctcctgaaggggctgcaagagggaagacttagccatgtcgtccttgatcagaagggtgatcagcaccgcgaaagctccaggggccataggaccctacagtcaagctgtgttagtcgacaggaccatttacatttcaggacagataggcatggacccttcaagtggacagcttgtgtcaggaggggtagcagaagaagctaaacaagctcttaaaaacatgggtgaaattctgaaagctgcaggctgtgacttcactaatgtggtgaaaacaactgttcttctggctgacataaatgacttcaatactgtcaatgaaatctacaaacagtatttcaagagtaattttcctgctagagctgcttaccaagttgctgctttgcccaaaggtagtcgaattgaaatcgaagcagtagctgtccaaggaccgctgacaacagcatcactataagtgggccagtgctttgtagtctggacttgttaacattttgatttttacaattgatgtaacatcttaattaaccttttaattttcacaattgatgacagtgtgagcttgatgaaaatatctgaagttattatggaaatactatataatagggagagttgaacatgaattgnaagattagagaaggaaatccagttactgtttttaaattacacctggtattactggaatataaggaaaaaaagataccccatttaacctagtttactccaattaattaaaaagaaa

SEQ ID NO: 29396 - DNA, 333 bp, Macaca Mulatta
aggtctgtttgggaccccactgctgaccagcctcccagagaaagtgcgcaacttcttggccagccaagtgcccttccctagccgactgggtgaccctgctgagtatgctcacctggtacaggccatcatcgagaacccattcctcaatggagaggtcatccggctggatggggccattcgtatgcagccttgaagggagaaggcagagaaaacacacgctcctctgcccttccttcccctggggtactactctccagcttgggaggaagcctagtagccattttgtaactgcctaccagttgtcctctgtgcctaataaagtctctttttctc

SEQ ID NO: 29397 - DNA, 237 bp, Macaca Mulatta
  misc_feature (1)...(237): n = A,T,C or G
gaaccacagtcagatatcacgagtacctgttgctattaaagtgctggatgtcaatgacaacgcccctgaattcgcatccgaatatgaggcatttttatgtgaaaatggaaaacccggccaagtngtcattcaaacagttagcgccatggacaaagatgatcccaaaaatggacattatttcttatacagtctccttccagaaatggtcaacaatccgaatttcaccatcaagaaaaa

SEQ ID NO: 29398 - DNA, 276 bp, Macaca Mulatta
  misc_feature (1)...(276): n = A,T,C or G
tcttatgaggcagtcatgggactacgaggagacagccagnnnnnnnnnnnnnnnnnnnnnnnnnnnnnnnnnnnnnnnnnnnnnnnnnnnnnnnnnnnnnnnnnnnngtgtccatggacagcgggtctctggtgctgtcagccattggtgacctccctgggggctctagcccgtcggaggactcgtgcctgctggagctgcagggctccgtgcgatgcgtggactacgtgctcttccgctccatccagcgcagcagtgccggctactgcctcagcc

SEQ ID NO: 29399 - DNA, 711 bp, Macaca Mulatta
tgtggaaccactcaataattgtgaagaattgtcagtttgggttactggctgttgctaccgccttctggagaatcccaccattagtcagcagaagaaccgctccactcgggaagccataacacacctgcttggtgtagccttgacccgttataaccatatgctcagtgctacagtgaagatcatccagatgctgcagcactttgaacacctggcacctgtactggttgcagctgtgagtctatgggcaactgactatggaatgaagagcatagtgggagagattgtaagagagattggacaaaagtgtccccaagagctgagtcgagacccttcaggggacaaagggctttgcagcattcctgacagaactagcagaacgtgtcccagctatcctgatgtccagcatgtgcattttgctagatcacctggatggagagaattacatgatgcgtaatgctgtgctagcagccatggcagagatggtgctgcaggttctcaatggcgatcaactggaagcagcagctcgagacaccagagaccaattcttggatactttacaagcccatggccatgatgtcaactcctttgtgcggagccgtgttttgcagcttttcacccgaattgtccagcagaaggctctccccttgacacgtttccacaccatcatgaaacagctcctctcctacatcaccaaggacaagcagacagaga

SEQ ID NO: 29400 - DNA, 542 bp, Macaca Mulatta
ctgaaggccgagcaggaggaagggctcccgctgcccctcgcaaacattaaggaagagccgccctctccggggaccccaccccagtccccaccggctccccctgtcttcctcagcgcctcctgtttcgacagccaagaccactcagccttcgagatggaggaggaagaggtagacagcaaggctcacctgcgcgggctggggggcctggcctcctgaccttcgccgccctgccctccgccgctccgcctgagctccccggtttgcagaatggaggagggaagttgaaggagccacctcctctgtctacccacccgtccccttcacgcccttgacactaaggagtggggggccctggactgcccctccctctcccatcgcccacccccagaacccctgatgctggttaggaaccgctcaccccaacatgtgtcttaaggcaggacgacttggaaaaaaaggcggcggacagttggccagagggatggagactggtggggacgcccccgcctgcctgtccccccgttacacacactggacaccat

SEQ ID NO: 29401 - DNA, 1600 bp, Macaca Mulatta
gcaagcatgccccaggggaacagatgtatatgtctcccaggaagtctctgtgggtgaaagactgatctcaaaagttgtggctgagagtagctaaagccaagttagagggctgtttcagggtctacattgagactacagttaatatgcctacctcctgagacactagtgtttgggtctcctccgtgggcccctggacagatggttttggcagcatgacgaagtcctaatgtggctgaaggcaagtccacaggaggatgggtctcttttcaggtctggagatggaatcactgttgctatagcaggcctttttttgagactaacctggcctctccactaaaggatgtgtgactttctggggacagaagagtacagtccctgacatcacacactgcagagatggataaccaaggagtaatctactcagacttgaatctggcccagaatccaaagaggcagcagaggaaacctaagggcaataaaagctccattttagtaactgaacaggaaatattctatgtggaattaaaccttcaaaatacttctctggattttcaagggattgataaaatatatgactgcaaaggtttactgtcagctccagagaagctcattgctggggtcctgggaatcatttgtattgtcttgatggcctctgtgttaaaaatagttgttattatctcctttccaggagcagaacaattcttccctgaatacaagaactcagaaagtacgtcactgtggccattgtcctgaggagtggattacatattccaacagttgttattacattggcaaggaaaaaagaacttgggcagagagtttgctggcctgtacttcaaagaactccagtctgctttctatagataatgaagaagaaatgaaatttctgactgccattttaccttcctcatggattggtgtgtttcgtgacagcagtcatcatccatgggtgacaataaacggtctgactttcaaacatgagataaaagactccgataatgctgaacataactgtgcaatgctacatgcacgtggactcaaatcagaccagtgtggatcttcaaaaatatatcattgtaagcataagctttagaagtaaagcatttgcgtttgcagtgcatcagataaattttatatttctcaaaatagaaataatattatgattgcataaatcttaaaatgaattatgttatttgctctaataagaaaattctaaatcaattattgaagtaggatacacacaattactaaagtacagatatcctagcatttgtgtcgggctcgttttgctcaacatgatatatgtggtatccagcctttctaaaagttgcatgttatatgagtcagtttatatgaagtatcaagaacagtcaaacccatggagacagaaagtagaatagtggttgccaatgcctaagggaggtggaaataggagatgatcactaattgatagaaagtttcttcgtgtcgtgatgaaaactttctaaatttcagtagtggtgatggttgtaactctgtgaatatactaaacatcattgatttttaatcattttaagtggatgaaatttatgctttgtacatgacacttcaataaagctat

SEQ ID NO: 29402 - DNA, 113 bp, Macaca Mulatta
cagctcaagataaatgtgctttgggtacccatgggtgtcagcacatttgtgtgaatgacagaacagggtcctatcattgtgaatgctatgatggctacactctgaatgcagat

SEQ ID NO: 29403 - DNA, 458 bp, Macaca Mulatta
  misc_feature (1)...(458): n = A,T,C or G
gagacctgccccagtgcccccactcggcaggcagcagctggaagcgcaggggttgcagcctcccccacctacctccacctccagcctgcgctttgctgctgccctggcccaggacctgggtctgcccgtccccagccagtggctggcagtggctgacaagatcaaggtaccctttgacgtggagcagaacttccacccggagttcgatgggtatgagcctggnggagaggtggtgaagcaggcagatgtcgtgctcctgggataccccgtccccttctccctgagtcctgatgttcgcaggaaaaacctggagatttacgaggctgtgacatccccccagggccccgccatgacctggngagcatgtttgctgtgggctggatggagctgaaggacacagcgcgggcccggggcctcctggacaggagctttgccagcatgactgaacccttcaaggt

SEQ ID NO: 29404 - DNA, 597 bp, Macaca Mulatta
tgcttgtgtgcttctgagactccttggcaaatgaaaatgtaggaggctaatcaatcatcctggggagccgcttgccctttcctgggagatgggtgtgtacgcacgcccttgaacatggggcggcacctctggagctgcgggctgtgcagatgcactgccattctggaatcgtctctgacttgggccaggtgtatccaacccagaggtcaaggcagtgacaaggccaagacagagggtcaggacagcatttagaagggctcatgctttgggtcagaaatgccagggggccaccactgtgtgtttgcccacagcagaccccaccacggttacagacagggatgcagacataacactacaagcatatccatcaggagtcaattcatggggctgtccccaggaggtcagctcattagtgtggctggccaaggccatgctggcccttagaggtggctgctccagctccagcagtgactctgtgggcaggaaagcccgggttctgatcgacccacaggagaccacactcgggtgggccctgtaagtgaagccctttcttccaaaatggccactggatccaatttctctcactgggaatcaagg

SEQ ID NO: 29405 - DNA, 871 bp, Macaca Mulatta
ccttttgggcatccccggacttgagcagtaccacttctggaccagcatcccgttctgctttatctatctcgtgactgtcgtggccagcagtatccttctctacctcattgtggtggagcacagtcttcatgcacccatgttctttttcctttccatgctggccattactgacctcatattgtccaccgtatgtgtccccaaaacatttagcatcttctggtttggttcccaaaaatcagttttccctggctgtctcacccaattattctttctgcactatagctttgtgttggactcagttatactgctggccatggcatttgactgctatatggccatctgctcacccttgagatacactactattctgactcccaaaaccattatcaaaattgctgtgagaatatgtttccaaagtctctgtgtttttgtcccatgtgttttccttgtgaatcatttacccttctgcaggacacatatcatttctcacacatagtgtgagcacataggtgttgcccagcttgcctgtgttgatatctccatcaatatctggtatggattttgtattcctatcatgacagtgatgacggatgtgatcctcattgctgtctcctacaccctcatcctctatgctgtcttttgtctcccctcccgagatgcccggcagaaggcctttggcacctgtggttcccatgtctgtgttatcctcgtattctatataccagcattcttctccatccttgctcatcgctttgggcataatgtccctcatacctttcatatgatgtttgccaacctttacgtaatcatcccacctgctttcaaccttattgtctacagagtaaagaccaagcagatctgaacagaatcc

SEQ ID NO: 29406 - DNA, 1218 bp, Macaca Mulatta
gtctgcttctcagccagtgggagccgcgtggcctgggtgagccacgacagcaccgtgtgccgtggctgatgctgacaagaagatggccgtcgcgactctggcctctgaaacgctaccgctgctggcgctgaccttcatcacagacaacagcctggtggcagcgggccacgactgcttcccagtgctgtcacctatgacgccgctgcggggatgctgagctttggcgggcggctggacgttcccaagcagagctcgcagcgtggcttaacggcccgcgagcgcttccagaacctcgacaagaaggcgagctcggagggcggcacgactgcgggcgcaggcctggactcgctgcacaagaacagcgtcagatctcagtgctcagcgggggcaaggccaagtgctcgcagttctgcaccactggcatggacggcggcatgatcatctgggatgttaagagcttggagtcagccttgaaggacctcaagatcaaatgacctgtgaggaatatgttaccttcatcctagctgctggggaagcagggagaggagtaggggaggctaatggttgctttgctgagtatttctggggtaccaatgtgagtccccataggggctgctccctcaaagaggggacagatggggagcttttcttacctattccagaaatatgtgcctgtatttcttagataaatgctttcatttattggagcaaaaagaaattctgccccccaaggcttgtgcttggtcaagctctgctatcgaatgcggaggtatggaaatgcaactctgttttcagccactacaaaaacacactgaagtacacagaccagtgaaactatgaaacaaacacataaacaagtctgcaaaataacctgctagcatcatgatgccaggatctaattcacacacaacaatactagccataaatgtaaatgggctaaattccccaattaaaaggcaaagaatggcaagccggagaaagagccaagacccactggtatgctatcatcaagagacccatctcacatgcaaagacacataggctcaaaataaagggatggaggaaaattttccaaaccaatggaaaacagaaaaaggaagaggttgaaatccctgtttcttgaccaacagaccttatccaccaagacccaagaaaggctttccttattagtaaaagggttcaatttcctccagaaagaacttatccttaaaaatttat

SEQ ID NO: 29407 - DNA, 663 bp, Macaca Mulatta
ccttttcgctcaagtaatttacaagtcaaagacaagaagagatcagagtgaatgtgccatcttaaccagagctacagaatttagtgaataattaaagtacaaattgctttaacctccttgaacttttccaagcaatttctctgtacttctatatatgaatgtcttcgttaattttctgctactataacagaataccacagactgggtaatttagaagaaaagaaatttattttcttcctagttctggaggctgggaaggccaagggcatggcattgacatctgccttgtatctgatgaggaccttcttactgcatgataacaaagcagaaaggcaagcaaaagtgtaagatgaagagagaggaaacaaaaccaaacatatcctttcatcagaagcccattccctctataaggcattattccatttatgagaatggagccctcatgacctaatcatgaccttaaaggcccctcccaacactgttacaatggcaattaaatctcaacaacgtttccagagatgacattcgaatcatagcaatgaatttttcatagttatatttggtattcgtgagggaagaaatgaccatttcccttgtatttttataattaaatcagcaaaatattgtagtaaagaaatctttcctgtgaagataccatgaccc

SEQ ID NO: 29408 - DNA, 395 bp, Macaca Mulatta
cagaggtcactggaagcggtgagtgatgctacaacagaggcgtataggaaattctcttgagtccagaggaggaagttatttgagctaaggagattggtatctcgggagatgtttagaaggatttcataagggaaggaaagtgtaaaatcatggggatatgagaatatttggcaagttcacaaagtaagttcagtgtgggttgatgaacatgtcacttttttttgaaagattattttcatgaaaaatacagctaaacagtactctacccaaaagattcacttcagagagttttttcccccattaataagggatgatccattcttagtgtgtgcccagtagtgtctgtttctgagatttaagggctggctaagaaggcttgacatggggcagttgct

SEQ ID NO: 29409 - DNA, 685 bp, Macaca Mulatta
tacaggcccatgggaaaggaaaaaccccagatcatctgttaccctgggactgggcattacatcgagcctccttacttccccctgtgcccagcttcccttcacgaattagtaaacaaacatgtgatgtggggtggggagcccacggctcattctaaggcccaggtagatgcctggaagcagattctagccttcttctgcaaacacctgggaggtacccagaaaacagctttccctaaattgtaatgcatttgtctattgttgacatgagagattcaagatcaggttctagtattcagtaaccctatgtgaatcagctgtctcctggataacattaaagccatgtccttgtcattagtggtgtattttacgtaactctgttgaataagctttgtcattagttttactaatgtaacttgcttgttgtagaagattaagaggcatatgacacatataagtgaaaagcattcccaccagttaacatttgtgtttccttctagattttttttagttaatgttttaagtcataggtgagctttaaagctggtgactttttccatcactgtgaaagaatggtcacctaatgtttgctgttcaaccttcagtagcagggtagaattttctttggccagaaacatacagaggggtgttaatatgaggaaaggcagctgaccttttcattataaag

SEQ ID NO: 29410 - DNA, 3268 bp, Macaca Mulatta
  misc_feature (1)...(3268): n = A,T,C or G
aggtgccactgcagaaacgggcagtgccctccatgaggtgcaaaactgtcttcgagctgactcctgaattcttcagtcctggaaagtccaggggcctaggttctcaacaatgggcacaaaggcagagatggggataccggaggagcctccaggaatcatgggcccagaacccgctctgtctacagcacccatgtccaggcccaccttcaggtgtccacacctactctcagcccatcttttgtaccacttccatttcaaacacctgtctactgcctcaggatagttcctggaaagcgtggcaggtgccttggtgtctccgtgatggtcagactcgccctgccttagatatgtgtcaagagatggagcagctgttgcttcactcacaggaaaggttggtgtcactggagtctgtcatcagcatgaggtctcaccccnnnnnnnnnnnnnnnnnnnnnnnnnnnnnnnnnnnnnnnnnnnnnnnnnnnnnnnnnnnnnnnnnnnnnnnnnnnnnnnnnnnnnnnnnnnnnnnnnnnnnnnnnnnnnnnnnnnnnnnnnnnnnnnnnnnnnnnnnnnnnnnnnnnnnnnnnnnnnnnnnnnnnnnnnnnnnnnnnnnnnnnnnnnnnnnnnnnnnnnnnnnnnnnnnnnnnnnnnnnnnnnnnnnnnnnnnnnnnnnnnnnnnnnnnnnnnnnnnnnnnnnnnnnnnnnnnnnnnnnnnnnnnnnnnnnnnnnnnnnnnnnnnnnnnnnnnnnnnnnnnnnnnnnnnnnnnnnnnnnnnnnnnnnnnnnnnnnnnnnnnnnnnnnnnnnnnnnnnnnnnnnnnnnnnnnnnnnnnnnnnnnnnnnnnnnnnnnnnnnnnnnnnnnnnnnnnnnnnnnnnnnnnnnnnnnnnnnnnnnnnnnnnnnnnnnnnnnnnnnnnnnnnnnnnnnnnnnnnnnnnnnnnnnnnnnnnnnnnnnnnnnnnnnnnnnnnnnnnnnnnnnnnnnnnnnnnnnnnnnnnnnnnnnnnnnnnnnnnnnnnnnnnnnnnnnnnnnnnnnnnnnnnnnnnnnnnnnnnnnnnnnnnnnnnnnnnnnnnnnnnnnnnnnnnnnnnnnnnnnnnnnnnnnnnnnnnnnnnnnnnnnnnnnnnnnnnnnnnnnnnnnnnnnnnnnnnnnnnnnnnnnnnnnnnnnnnnnnnnnnnnnnnnnnnnnnnnnnnnnnnnnnnnnnnnnnnnnnnnnnnnnnnnnnnnnnnnnnnnnnnnnnnnnnnnnnnnnnnnnnnnnnnnnnnnnnnnnnnnnnnnnnnnnnnnnnnnnnnnnnnnnnnnnnnnnnnnnnnnnnnnnnnnnnnnnnnnnnnnnnnnnnnnnnnnnnnnnnnnnnnnnnnnnnnnnnnnnnnnnnnnnnnnnnnnnnnnnnnnnnnnnnnnnnnnnnnnnnnnnnnnnnnnnnnnnnnnnnnnnnnnnnnnnnnnnnnnnnnnnnnnnnnnnnnnnnnnnnnnnnnnnnnnnnnnnnnnnnnnnnnnnnnnnnnnnnnnnnnnnnnnnnnnnnnnnnnnnnnnnnnnnnnnnnnnnnnnnnnnnnnnnnnnnnnnnnnnnnnnnnnnnnnnnnnnnnnnnnnnnnnnnnnnnnnnnnnnnnnnnnnnnnnnnnnnnnnnnnnnnnnnnnnnnnnnnnnnnnnnnnnnnnnnnnnnnnnnnnnnnnnnnnnnnnnnnnnnnnnnnnnnnnnnnnnnnnnnnnnnnnnnnnnnnnnnnnnnnnnnnnnnnnnnnnnnnnnnnnnnnnnnnnnnnnnnnnnnnnnnnnnnnnnnnnnnnnnnnnnnnnnnnnnnnnnnnnnnnnnnnnnnnnnnnnnnnnnnnnnnnnnnnnnnnnnnnnnnnnnnnnnnnnnnnnnnnnnnnnnnnnnnnnnnnnnnnnnnnnnnnnnnnnnnnnnnnnnnnnnnnnnnnnnnnnnnnnnnnnnnnnnnnnnnnnnnnnnnnnnnnnnnnnnnnnnnnnnnnnnnnnnnnnnnnnnnnnnnnnnnnnnnnnnnnnnnnnnnnnnnnnnnnnnnnnnnnnnnnnnnnnnnnnnnnnnnnnnnnnnnnnnnnnnnnnnnnnnnnnnnnnnnnnnnnnnnnnnnnnnnnnnnnnnnnnnnnnnnnnnnnnnnnnnnnnnnnnnnnnnnnnnnnnnnnnnnnnnnnnnnnnnnnnnnnnnnnnnnnnnnnnnnnnnnnnnnnnnnnnnnnnnnnnnnnnnnnnnnnnnnnnnnnnnnnnnnnnnnnnnnnnnnnnnnnnnnnnnnnnnnnnnnnnnnnnnnnnnnnnnnnnnnnnnnnnnnnnnnnnnnnnnnnnnnnnnnnnnnnnnnnnnnnnnnnnnnnnnnnnnnnnnnnnnnnnnnnnnnnnnnnnnnnnnnnnnnnnnnnnnnnnnnnnnnnnnnnnnnnnnnnnnnnnnnnnnnnnnnnnnnnnnnnnnnnnnnnnnnnnnnnnnnnnnnnnnnnnnnnnnnnnnnnnnnnnnnnnnnnnnnnnnnnnnnnnnnnnnnnnnnnnnnnnnnnnnnnnnnnnnnnnnnnnnnnnnnnnnnnnnnnnnnnnnnnnnnnnnnnnnnnnnnnnnnnnnnnnnnnnnnnnnnnnnnnnnnnnnnnnnnnnnnnnnnnnnnnnnnnnnnnnnnnnnnnnnnnnnnnnnnnnnnnnnnnnnnnnnnnnnnnnnnnnnnnnnnnnnnnnnnnnnnnnnnnnnnnnnnnnnnnnnnnnnnnnnnnnnnnnnnnnnnnnnnnnnnnnnnnnnnnnnnnnnnnnnnnnnnnnnnnnnnnnnnnnnnnnnnnnnnnnnnnnnnnnnnnnnnnnnnnnnnnnnnnnnnnnnnnnnnnnnnnnnnnnnnnnnnnnnnnnnnnnnnnnnnnnnnnnnnnnnnnnnnnnnnnnnnnnnnnnnnnnnnnnnnnnnnnnnnnnnnnnnnnnnnnnnnnnnnnnnnnnnnnnnnnnnnnnnnnnnnnnnnnnnnnnnnnnnnnnnnnnnnnnnnnnnnnnnnnnnnnnnnnnnnnnnnnnnnnnnnnnnnnnnnnnnnnnnnnnnnnnnnnnnnnnnnnnnnnnnnnnnnnnnnnnnnnnnnnnnnnnnnnnnnnnnnnnnnnnnnnnnnnnnnnnnnnnnnnnnnnnnnnnnnnnnnnnnnnnnnnnnnnnnnnnnnnnnnnnnnnnnnagagcatctggccagccaaggcataacccctgccagggatcatagagtgggaatcagtccagcctcccagcaggcccaacctgaaacctggaggagacgacaaagggacaaaggggtggatccagaga

SEQ ID NO: 29411 - DNA, 346 bp, Macaca Mulatta
tgcattcttgttctctctacccgatacccttataatttcatttaagcaggtgatgttatttttctctattatttggagtagttgattgatacgtttatattagatatgaatgcatccatttttgctgggtaattgatgtttcatggaacttcttcttttaatataattataatagttttctgagtgtcaacttttgtaattgttggatgctggagataaaatagtgactatgtcaccttccctgactttgtggaatttatagagtctaatgtcaatcagcaaattcaatgtagaaatgtccatacttttcattttaattgttctatatcattataatttatgtttg

SEQ ID NO: 29412 - DNA, 346 bp, Macaca Mulatta
  misc_feature (1)...(346): n = A,T,C or G
gggttcctatgtagatattctgtgcaactggtttctaaaatgttacaggaaactctttcnnnnnnnnnnnnnnnnnnnnnnnnnnnnnnnnaaggggaggtgggagaaggtaggcaagaggtctgaatattaacctatgttgatgtttatgtgttcataatatgttcttttttctctcttggtgtgtgtataaaagtgccttgctcatgaatgcatttttgctcttcacttcgaaaggaagcctttccccagcttggcagctgaataaaccaatagctttgtacatgnnnnnnnnnnnnnnnnnnnnnnnnnnnnnnnnnnnnnnnnnnnnnnnnnnnnnnnnnnc

SEQ ID NO: 29413 - DNA, 770 bp, Macaca Mulatta
gggaggctggggaacagccacccaggcttctagtgactcctggaccttcacatgctgggaatgtcttggggagtgacacaaagtcaggcaagcatgtgctggggtcttggtacatctgcatccttgcacaggacagagtggacagcagtcattggattcaggggccaacctactccagggtgacctcatcttaactggatttcatctgtgaagaactccatttccaaacaagggggacatgaaaggaggaggcggaggaccagtggagtctgagcccctggttcttggcagcaggatggagtttgaggcaaggaggtgatggctaccaagggcgtttggccaaagcatccctattcacatgccagggaggatggggagagtgataccttcctgctgcctgactgctgagcatggaaaggcctgatgatcctgagggcccagcacagcacctatcccaggatgctgcgaaagacaatatagggtaatttcctgacattgccacggcatctgtaagctgtcatggcgctggtgggagtgtagcagtgaggatgaccagaagtcactctcatcgccatcttggttttggtgggtcttggccggcttcttttacgcaacctgttttatcagcaaagtctttatgacctggatcttggtgctgacgtcctgttctcattccggtgtctaagaatgcccttaaacttccctggggaaagcaaccccagttaggttctccagtctcttatttttaccccagccccccttatttcaaa

SEQ ID NO: 29414 - DNA, 865 bp, Macaca Mulatta
ctggtagggattccgggtttagaggaaagccagcactggatcacactgcccctgggcatcttttacctccttgctctagtgggcaatgttaccattctcttcatcatcttgatggacccatccttacagcaacctatgtacctcttcctgtctatgctagctgccattgacctggttctggcctcctccactgcacccaaagcccttgcagtgctcctagttcatgcccatgagattgtgtacactgtctgcctgatccagatgttcttcatccatgcattctcctccatggagtcaggggtacttgtggccatggctctggatcactatgtagccatttgtcaccccttgcaccattccacgatcctgcatccaggagtcatagggtgcatcggaatggcggtgctggtgcggggattactagtcctcatccccttccccattctgttgcaaaaacttatcttctgccaaaccaccgtcataggccatgcttattgtgaacatatggctattgtaaaacttgcctgctcagaaaccacagtcaaccgagcttatgggctgactgtggccttgcttgtgattgggctggatgtcctggccattggtgtttcctatgcccacatcctccaggcagtgctgaaggtaccagggagtgaggcccgccttaaggcctttagcacatgtggatctcatgtttgtgtcatcctggtcttctatgtccctggaattttctccttcctcactcaccactttggtcaccatgtaccccatcatgtccatgttcttctggccacacctcatgccacctgcactcagtcctcttgtctatggggtgaagactcagcagatccaccagcgaaggtta

SEQ ID NO: 29415 - DNA, 2326 bp, Macaca Mulatta
  misc_feature (1)...(2326): n = A,T,C or G
aactgtctgcggcgcccgaaaaacaagtcggtgcgctggggacccggggccggggccaccttgctccggcctagccccgcgaaagtcggtgcgggccccagggcatgctcgggaccccccgnnnnnnnnnnnnnnnnnnnnnnnnnnnnnnnnnnnnnnnnnnnnnnnnnnnnnnnnnnnnnnnnnnnnnnnnnnnnnnnnnnnnnnnnnnnnnaaagccggatacgtggaccagcaagtgccctacaccttcagcagcnnnnnnnnnnnnnnnnnnnnnnnnnnnnnnnnnnnnnnnnnnnnnnnnnnnnnnnnnnnnnnnnnnnnnnnnnnnnnnnnnnnnnnnnnnnnnnnnnnnnnnnnnnnnnnnnnnnnnnnnnnnnnnnnnnnnnnnnnnnnnnnnnnnnnnnnnnnnnnnnnnnnnnnnnnnnnnnnnnnnnnnnnnnnnnnnnnnnnnnnnnnnnnnnnnnnnnnnnnnnnnnnnnnnnnnnnnnnnnnnnnnnnnnnnnnnnnnnnnnnnnnnnnnnnnnnnnnnnnnnnnnnnnnnnnnnnnnnnnnnnnnnnnnnnnnnnnnnnnnnnnnnnnnnnnnnnnnnnnnnnnnnnnnnnnnnnnnnnnnnnnnnnnnnnnnnnnnnnnnnnnnnnnnnnnnnnnnnnnnnnnnnnnnnnnnnnnnnnnnnnnnnnnnnnnnnnnnnnnnnnnnnnnnnnnnnnnnnnnnnnnnnnnnnnnnnnnnnnnnnnnnnnnnnnnnnnnnnnnnnnnnnnnnnnnnnnnnnnnnnnnnnnnnnnnnnnnnnnnnnnnnnnnnnnnnnnnnnnnnnnnnnnnnnnnnnnnnnnnnnnnnnnnnnnnnnnnnnnnnnnnnnnnnnnnnnnnnnnnnnnnnnnnnnnnnnnnnnnnnnnnnnnnnnnnnnnnnnnnnnnnnnnnnnnnnnnnnnnnnnnnnnnnnnnnnnnnnnnnnnnnnnnnnnnnnnnnnnnnnnnnnnnnnnnnnnnnnnnnnnnnnnnnnnnnnnnnnnnnnnnnnnnnnnnnnnnnnnnnnnnnnnnnnnnnnnnnnnnnnnnnnnnnnnnnnnnnnnnnnnnnnnnnnnnnnnnnnnnnnnnnnnnnnnnnnnnnnnnnnnnnnnnnnnnnnnnnnnnnnnnnnnnnnnnnnnnnnnnnnnnnnnnnnnnnnnnnnnnnnnnnnnnnnnnnnnnnnnnnnnnnnnnnnnnnnnnnnnnnnnnnnnnnnnnnnnnnnnnnnnnnnnnnnnnnnnnnnnnnnnnnnnnnnnnnnnnnnnnnnnnnnnnnnnnnnnnnnnnnnnnnnnnnnnnnnnnnnnnnnnnnnnnnnaggtcgccaggctctggggcatccagaagaaccggccagccatgaattacgacaagttgagccgctcgctccgatactattacgagaaaggcatcatgcagaaggtgnnnnnnnnnnnnnnnnnnnnnnnnnnnnnnnnnnnnnnnnnnnnnnnnnnnnnnnnnnnnnnnnnnnnnnnnnnnnnnnnnnnnnnnnnnnnnnnnnnnnnnnnnnnnnnnnnnnnnnnnnnnnnnnnnnnnnnnnnnnnnnnnnnnnnnnnnnnnnnnnnnnnnnnnnnnnnnnnnnnnnnnnnnnnnnnnnnnnnnnnnnnnnnnnnnnnnnnnnnnnnnnnnnnnnnnnnnnnnnnnnnnnnnnnnnnnnnnnnnnnnnnnnnnnnnnnnnnnnnnnnnnnnnnnnnnnnnnnnnnnnnnnnnnnnnnnnnnnnnnnnnnnnnnnnnnnnnnnnnnnnnnnnnnnnnnnnnnnnnnnnnnnnnnnnnnnnnnnnnnnnnnnnnnnnnnnnnnnnnnnnnnnnnnnnnnnnnnnnnnnnnnnnnnnnnnnnnnnnnnnnnnnnnnnnnnnnnnnnnnnnnnnnnnnnnnnnnnnnnnnnnnnnnnnnnnnnnnnnnnnnnnnnnnnnnnnnnnnnnnnnnnnnnnnnnnnnnnnnnnnnnnnnnnnnnnnnnnnnnnnnnnnnnnnnnnnnnnnnnnnnnnnnnnnnnnnnnnnnnnnnnnnnnnnnnnnnnnnnnnnnnnnnnnnnnnnnnnnnnnnnnnnnnnnnnnnnnnnnnnnnnnnnnnnnnnnnnnnnnnnnnnnnnnnnnnnnnnnnnnnnnnnnnnnnnnnnnnnnnnnnnnnnnnnnnnnnnnnnnnggatggggggtgctcgttagaagcagagagggatgggttcctgctccaagggaccctttgcctttcttctgccctttcctaggctcaggcctgggtttccacttccacctccaccacatctgtcagaccttaataaaggcccccacttctccca

SEQ ID NO: 29416 - DNA, 100 bp, Macaca Mulatta
aggattgtgcttagaggacaagaaatcgtcagttctgttgttcccaagtcaaacagtgtttttgacttccagaaagcttacaagctgactgaagaggagg

SEQ ID NO: 29417 - DNA, 179 bp, Macaca Mulatta
  misc_feature (1)...(179): n = A,T,C or G
gggtgatgcatttgctcttcctgtttgtgccaatgtatcaatgtagagttgctctgttttcttcaactgtatttattgctgcatttctcagcataaacttatcccattgtattttttataaataaatattttgttttgnnnnnnnnnnnnnnnnnnnnnnnnnnnnnnnnnnnnnnnnc

SEQ ID NO: 29418 - DNA, 214 bp, Macaca Mulatta
atcttccactatgccaagggacaaccctactttgacgaggtggggaccttcaaaaagcgcatccagtgggtaggggaccctcgttggaaggatggctccattgtcatacgcaacctaaactaccgtgacaatggcacgttcacttgtgacgccaaaaaccctccaaacatagtgggcaagacctctcaggacccgctgtacgtctttgaaaaag

SEQ ID NO: 29419 - DNA, 1226 bp, Macaca Mulatta
  misc_feature (1)...(1226): n = A,T,C or G
agttcattctgaatctagacttgctcagcctaatcaagttcctgtacaaccagaagctacacaggtnnnnnnnnnnnnnnnnnnnnnnnnnnnnnnnnnnnnnnnnnnnnnnnnnnnnnnnnnnnnnnnnnnnnnnnnnnnnnnnnnnnnnnnnnnnnnnnnnnnnnnnnnnnnnnnnnnnnnnnnnnnnnnnnnnnnnnnnnnnnnnnnnnnnnnnnnnnnnnnnnnnnnnnnnnnnnnnnnnnnnnnnnnnnnnnnnnnnnnnnnnnnnnnnnnnnnnnnnnnnnnnnnnnnnnnnnnnnnnnnnnnnnnnnnnnnnnnnnnnnnnnnnnnnnnnnnnnnnnnnnnnnnnnnnnnnnnnnnnnnnnnnnnnnnnnnnnnnnnnnnnnnnnnnnnnnnnnnnnnnnnnnnnnnnnnnnnnnnnnnnnnnnnnnnnnnnnnnnnnnnnnnnnnnnnnnnnnnnnnnnnnnnnnnnnnnnnnnnnnnnnnnnnnnnnnnnnnnnnnnnnnnnnnnnnnnnnnnnnnnnnnnnnnnnnnnnnnnnnnnnnnnnnnnnnnnnnnnnnnnnnnnnnnnnnnnnnnnnnnnnnnnnnnnnnnnnnnnnnnnnnnnnnnnnnnnnnnnnnnnnnnnnnnnnnnnnnnnnnnnnnnnnnnnnnnnnnnnnnnnnnnnnnnnnnnnnnnnnnnnnnnnnnnnnnnnnnnnnnnnnnnnnnnnnnnnnnnnnnnnnnnnnnnnnnnnnnnnnnnnnnnnnnnnnnnnnnnnnnnnnnnnnnnnnngatggatatcagcagaatttcaagcgaggctctgggcagagtggaccacggggagccccacgaggtnaggtcgtggagggcccccaagacccaacagagggatgccgcaaatgaacactcagcaagtgaattaatctgattcacaggattatgtttaatcgccaaaaacacactggccagtgtaccataatatgttaccagaagagttattatctatttgttctccctttcaggaaacttattgtaaagggactgttttcatcccataaagacaggactacaattgtcagctttctattacctggatatggaaggaaactatttttactctgcatgttctgtcctaagcgtcatcttgagccttgcacatgatactcagattcctcacccttgcttaggagtaaaacaatatactttacagggtgataataatctccatagttatttgaa

SEQ ID NO: 29420 - DNA, 633 bp, Macaca Mulatta
cgcgcgcggagctgcagccatggcagtcaccgcccagggagcccgcaggaaggagcgggtcctctgcctgtttgacgtggacgggaccctcacgccggctcgccagaaaattgaccctgaggtggccgccttcctgcagaagctgcgaagtagagtgcagatcggtgtggtgggcggctctgactactctaagatcgctgagcagctgggtgacggcgatgaagtcattgagaagtttgattatgtgtttgctgagaacgggacagtgcaatataagcacggacgactgctctccaagcagaccatccagaaccacctgggggaggagctgctgcaggacttgatcaacttctgcctcagctacatggccctgctcaggctgcccaagaagcgtggaaccttcattgagttccggaatggcatgctgaacatatcgcccatcggccggagctgcaccctggaggaacggatcgagttctccgaactggacaagaaagagaagatccgggagaagttcgtggaagccctgaaaacagagtttgccggcaaagggctgaggttctcccgaggaggcatgatcagctttgacgtcttccccgagggctgggacaagcgctactgcctggatagcct

SEQ ID NO: 29421 - DNA, 1358 bp, Macaca Mulatta
  misc_feature (1)...(1358): n = A,T,C or G
ggtcgattctgacaccagcatcttccagctcaaggaggtgatgctaagcgacagggggttccgactgaccagttgcgtgtgattttcgcaggaaggggagctgaggaatgactggactgtgcagnnnnnnnnnnnnnnnnnnnnnnnnnnnnnnnnnnnnnnnnnnnnnnnnnnnnnnnnnnnnnnnnnnnnnnnnnnnnnnnnnnnnnnnnnnnnnnnnnnnnnnnnnnnnnnnnnnnnnnnnnnnnnnnnnnnnnnnnnnnnnnnnnnnnnnnnnnnnnnnnnnnnnnnnnnnnnnnnnnnnnnnnnnnnnnnnnnnnnnnnnnnnnnnnnnnnnnnnnnnnnnnnnnnnnnnnnnnnnnnnnnnnnnnnnnnnnnnnnnnnnnnnnnnnnnnnnnnnnnnnnnnnnnnnnnnnnnnnnnnnnnnnnnnnnnnnnnnnnnnnnnnnnnnnnnnnnnnnnnnnnnnnnnnnnnnnnnnnnnnnnnnnnnnnnnnnnnnnnnnnnnnnnnnnnnnnnnnnnnnnnnnnnnnnnnnnnnnnnnnnnnnnnnnnnnnnnnnnnnnnnnnnnnngaatttttctttaaatgtggagcacaccccacctctgacaaggaaacatcagtagctttgcacctgatcgcaacaaatagtcggaacatcacttgcattacgtgcaccgacgtcaggnnnnnnnnnnnnnnnnnnnnnnnnnnnnnnnnnnnnnnnnnnnnnnnnnnnnnnnnnnnnnnnnnnnnnnnnnnnnnnnnnnnnnnnnnnnnnnnnnnnnnnnnnnnnnnnnnnnnnnnnnnnnnnnnnnnnnnngctggctgtcccaactccttgattaaagagctccatcacttcaggattctgggagaagagcagngcagtacaaccgataccagcagtatggtgcagaggagtgtgtcttgcagatggggggcgtgttatgcccccgccctggctgtggagcggggctgctgccggagtctgaccagaggaaagtcacctgtgaaggcggcaacggcctgggctgtgggngtttgccttctgccgggagtgtaaagaagcgtaccatgaaggggagtgcagtgccctatttgaagcctcaggaacaactactcaggnnnnnnnnnnnnnnnnnnnnnnnnnnnnnnnnnnnnnnnnnnnnnnnnnnnnnnnnnnnnnnnnnnnnnnnnnnnnnnnnnnnnnnnnnnnnnnnnnnnnnnnnnnnnnnnnnnnnggaggctgcatgcacatgaagtgtccgcagccccagtgcaggctcgagtggtgctggaactgtggctgcgagtggaaccgcgtctgcatgggggaccactggttcgacgtgtag

SEQ ID NO: 29422 - DNA, 386 bp, Macaca Mulatta
ggagcgttgcatgtactgtggtagaaatgctaactgaaaagccgccttgggctgaatttgaagcaatggctgccatctttaaaattgccactcagccaacaaacccaaagctgccacctcatgtctcagactatactcgagatttcctcaaacggatttttgtagaggccaaactgagaccttcagctgatgaactcttaaggcacatgtttgtgcattatcactagcagccagtaacctctcctgtgcctctacctagctcccatctattcattcaccttctctctgactgcacttttcttttttataaaaaaagagagatgggggagaaaaaaagacaagagggaaagtatttctcttgattcttggttaaatttgtttaataa

SEQ ID NO: 29423 - DNA, 649 bp, Macaca Mulatta
ggcacgagggtggcagttcctgtccatgggtaggtgacggccctggctcaggcagagggagatggttagactcttgtagggctaaaactctaatttggaattgaatgttgtggagatcttaattaaaggccacgcttacagcttagaaatgaaggcttaagtggcaccaagttacaaagtgatttatttccttctcagcaaacctccgggaggttccagaatgagttctttctcacaggttgtcttcttgggagcctggggccccccaggccccaccagctccgtcctcccctgatgaggggccctgctgaggtgtcagctgctctgctcagttagtctttattcccggggtaccaagcagctgcacactcagggcctgggaggcacatagaggcccagagagtccatgggggttctgctcctgaccgtgtgggtggtggtgatccctgtcaggatagacagtccttgctcccaccccatccaggatggccgcctgtcgctgaccattgagtcctgttgttgtaagccaggcatggagggtccggcccgtctgttgagccacagcctctgcagcactgtgctggcagatttcagctgcttgggaactgaaccctgccatgtgctaccaggggctggtctccattacact

SEQ ID NO: 29424 - DNA, 79 bp, Macaca Mulatta
tcatcaaagctgtgagccagttaatagctgacgctgggatcggaggctctcggtttcaacattcgcttgcaattaccaa

SEQ ID NO: 29425 - DNA, 1539 bp, Macaca Mulatta
  misc_feature (1)...(1539): n = A,T,C or G
gagccaggccaagtctattgcagaacagaagagatttccatttgccactgataatgacagcacaaatgaagagttagnnnnnnnnnnnnnnnnnnnnnnnnnnnnnnnnnnnnnnnnnnnnnnnnnnnnnnnnnnnnnnnnnnnnnaggaggagcctgatctggttagtgcaattttatggcgagggatagcctatggaaagaagggactacatgngacattaagaatgctgagcttgctctgttcgaactgagccgagtaattaccttggaaccagatcgtccagaggtatttgagcagcgagcagaannnnnnnnnnnnnnnnnnnnnnnnnnnnnnnnnnnnnnnnnnnnnnnnnnnnnnnnnnnnnnnnnnnnnnnnnnnnnnnnnnnnnnnnnnnnnnnnnnnnnnnnnnnnnnnnnnnnnnnnnnnnnnnnnnnnnnnnnnnnnnnnnnnnnnnnnnnnnnnnnnnnnnnnnnnnnnnnnnnnnnnnnnnnnnnnnnnnnnnnnnnnnnnnnnnnnnnnnnnnnnnnnnnnnnnnnnnnnnnnnnnnnnnnnnnnnnnnnnnnnnnnnnnnnnnnnnnnnnnnnnnnnnnnnnnnnnnnnnnnnnnnnnnnnnnnnnnnnnnnnnnnnnnnnnnnnnnnnnnnnnnnnnnnnnnnnnnnnnnnnnnnnnnnnnnnnnnnnnnnnnnnnnnnnnnnnnnnnnnnnnnnnnnnnnnnnnnnnnnnnnnnnnnnnnnnnnnnnnnnnnnnnnnnnnnnnnnnnnnnnnnnnnnnnnnnnnnnnnnnnnnnnnnnnnnnnnnnnnnnnnnnnnnnnnnnnnnnnnnnnnnnnnnnnnnnnnnnnnnnnnnnnnnnnnnnnnnnnnnnnnnnnnnnnnnnnnnnnnnnnnnnnnnnnnnnnnnnnnnnnnnnnnnnnnnnnnnnnnnnnnnnnnnnnnnnnnnnnnnnnnnnnnnnnnnnnnnnnnnnnnnnnnnnnnnnnnnnnnnnnnnnnnnnnnnnnnnnnnnnnnnnnnnnnnnnnnnnnnnnnnnnnnnnnnnnnnnnnnnnnnnnnnnnnnnnnnnnnnnnnnnnnnnnnnnnnnnnnnnnnnnnnnnnnnnnnnnnnnnnnnnnnnnnnnnnnnnnnnnnnnnnnnnnnnnnnnnnnnnnnnnnnnnnnnnnnnnnnnnnnnnnnnnnnnnnnnnnnnnnnnnnnnnnnnnnnnnnnnnnnnnnnnnnnnnnnnnnnnnnnnnnnnnnnnnnnnnnnnnnnnnnnnnnnnnnnnnnnnnnnnnnnnnnnnnnnnnnnnnnnnnnnnnnnnnnnnnnnnnnnnnnnnnnnnnnnnnnnnnnnnnnnnnnnnnnnnnnnnnnnnnnnnnaggattgctgacccagaccagcctgtgctgtggttagatcaaatgccagcacgaagtcttagcagaggttttaacaaccacatcaatttaatcaggnaggggtcaggtgatcaacatgagatacctggaatattttgagaaaatacttcattttattaaagatagaattcttgtttatcatgg

SEQ ID NO: 29426 - DNA, 285 bp, Macaca Mulatta
cagcctcacctgagtcaccttccaagttgttccatgggctcctggctctggactatggcaccttctttgcactccgcccaatctgcaccggatgctggcagggaggtggcagagagctcactgggactgagtggctgggcacccaacccttttccacctgtgcttatctcctggatctatcattactgcagaaacctgctctgttgtgctggctggcaggccctgtggctgctggctgagggttctgctgtcctgtgccaccccattaaagtgcagttccctccg

SEQ ID NO: 29427 - DNA, 2941 bp, Macaca Mulatta
  misc_feature (1)...(2941): n = A,T,C or G
cgggccgagggaggaggacacggacacccccggcttgcggcgccgggcctcgtgccggccgaccacggctgccccgggccagccctctcggcgcgtgtccaagctggcgtctgggcccccagccgcccccgcgcagccgcgcccgctccgcagcctctcgccgtcggtgcgccaactctcccggcgcttcgacgcgccgcgtctggactacggctccgctggggcccgggacgggggcgtcttccctgcggccgcggaagaagcggccgagggcccagcgcgaggggcctggcccagcgtcaccgagatgcgcaagctcttcggcggtcctggctccaggaggcccagcgccgactctgaatctccgggaacgcccagccccgacggtgccgcgtgggagcctccggctcgggagtcgcggcagccaccgacgccaccccctcggacatgcttccccctggtgggtctgcgttcggcgcggcccctgaccgggccggggatcgaagggaggctgcgccgnnnnnnnnnnnncaggagcgggcgctgcgtccagcggatggtttacattcttggcatatcttctcccaaccgcaggccggggcccggnnnnnnnnnnnnnnnnnnnnnnnnnnnnnnnnnnnnnngtcagccgcagccgcgctgccagctccagcgagnnnnnnnnnnnnnnnnnnnnnnnnnnnnnnnnnnnnnnnnnnnnnnnnnnnnnnnnnnnnnnnnnnnnnnnnnnnnnnnnnnnnnnnnnnnnnnnnnnnnnnnnnnnnnnnnnnnnnnnnnnnnnnnnnnnnnnnnnnnnnnnnnnnnnnnnnnnnnnnnnnnnnnnnnnnnnnnnnnnnnnnnnnnnnnnnnnnnnnnnnnnnnnnnnnnnnnnnnnnnnnnnnnnnnnnnnnnnnnnnnnnnnnnnnnnnnnnnnnnnnnnnnnnnnnnnnnnnnnnnnnnnnnnnnnnnnnnnnnnnnnnnnnnnnnnnnnnnnnnnnnnnnnnnnnnnnnnnnnnnnnnnnnnnnnnnnnnnnnnnnnnnnnnnnnnnnnnnnnnnnnnnnnnnnnnnnnnnnnnnnnnnnnnnnnnnnnnnnnnnnnnnnnnnnnnnnnnnnnnnnnnnnnnnnnnnnnnnnnnnnnnnnnnnnnnnnnnnnnnnnnnnnnnnnnnnnnnnnnnnnnnnnnnnnnnnnnnnnnnnnnnnnnnnnnnnnnnnnnnnnnnnnnnnnnnnnnnnnnnnnnnnnnnnnnnnnnnnnnnnnnnnnnnnnnnnnnnnnnnnnnnnnnnnnnnnnnnnnnnnnnnnnnnnnnnnnnnnnnnnnnnnnnnnnnnnnnnnnnnnnnnnnnnnnnnnnnnnnnnnnnnnnnnnnnnnnnnnctgagggtccgaaaacctggtgggagccccggggaccgtgtaagcagccccctagatggcagagactcaccatccgcaggtggctccatggggcaacttgaacccgtgtccatcccagccccagcatcacctggcacgcgccccacactcaaggacttgacagccactctgcggagagcaaagtcattcacctgctctgagaagcccatggcccgccgcctgccccgcaccagtgctctgaagcccagctcctccgagctactgctggcaggccctagtgccgaggaggatccgctgcccctcatcgtccaggaccagtatgtgcaggaggcccgccaggtttttgagaagatccagcgcatgggtgcccagcaagatgatggaagcgatgccccccctgaaagccctgactgggcacgggacgtgacccgagggcagcggtcccaggaggagctctcaggccctgagtccagtctgacagatgaaggcattggagcagaccctgagcctcctgttgcagtattttgtggcctgggtactacagggatgtggcaacccctttcctcatcctcagcccagacgaaccaccgtagtcctgggactgaggacagtctgggtgggtgggccctggtgtcccctgagatcccttgcacaccaagtgccctnnnnnnnnnnnnnnnnnnnnnnnnnnnnnnnnnnnnnnnnnnnnnnnnnnnnnnnnnnnnnnnnnnnnnnnnnnnnnnnnnnnnnnnnnnnnnnnnnnnnnnnnnnnnnnnnnnnnnnnnnnnnnnnnnnnnnnnnnnnnnnnnnnnnnnnnnnnnnnnnnnnnnnnnnnnnnnnnnnnnnnnnnnnnnnnnnnnnnnnnnnnnnnnnnnnnnnnnnnnnnnnnnnnnnnnnnnnnnnnnnnnnnnnnnnnnnnnnnnnnnnnnnnnnnnnnnnnnnnnnnnnnnnnnnnnnnnnnnnnnnnnnnnnnnnnnnnnnnnnnnnnnnnnnnnnnnnnnnnnnnnnnnnnnnnnnnnnnnnnnnnnnnnnnnnnnnnnnnnnnnnnnnnnnnnnnnnnnnnnnnnnnnnnnnnnnnnnnnnnnnnnnnnnnnnnnnnnnnnnnnnnnnnnnnnnnnnnnnnnnnnnnnnnnnnnnnnnnnnnnnnnnnnnnnnnnnnnnnnnnnnnnnnnnnnnnnnnnnnnnnnnnnnnnnnnnnnnnnnnnnnnnnnnnnnnnnnnnnnnnnnnnnnnnnnnnnnnnnnnnnnnnnnnnnnnnnnnnnnnnnnnnnnnnnnnnnnnnnnnnnnnnnnnnnnnnntccgccgaggctccaagaagcgcccagctcggacttttaccaggagcttgggagagacgagggcagtcaggaccagattggcggcctgtctcgggcccggccctcctccaaacacgttcgccatgccagtgtgcccgccacctttatgcctattgtggtgcctgagccaccaacttctgtcggtccccctgtggctgtgccagagcccataggcttccctgcccgagcccatcccacgttgcaggcaccatcgctcgaggacgtcaccaa

SEQ ID NO: 29428 - DNA, 329 bp, Macaca Mulatta
taatttagttttgtgtagctatatcaatgtgggtactccttttcatgtattcattttcacatgtttatctctagagagggatatacatttagtcaatatcattattcattaccaccactgttatttttcccccacttagaatgcatcattaagcccaaccaatggatctgaattaatgaatcgtcaaggatgaaatgtgagtattaaaaatacaaagagaaatttcacctgcaatttgtatcaatccaccagtgccccttgtgaccacactattgcctgctatgtgatgccggaatgaggtaggaggggaacagggggacatatttttc

SEQ ID NO: 29429 - DNA, 198 bp, Macaca Mulatta
ggagtccacatccatccccgagccgcgggcctggtgggcagagacggcccttacgacaagcagcccttcatggtggctttcttcaaagtgagtgaggtccacgtgcgcaccaccaggtcagcctctggccggcgccgacaacagagtcgtaatcgctctacccagtcccaggacgtggcgcgggtctccagtgcttca

SEQ ID NO: 29430 - DNA, 494 bp, Macaca Mulatta
gactgatctggtaacgcccctgtcctggcctgaccctgccatgggcaccaggctcctctgctgggtggtcctgggtttcctagggacaggtcacacaggtgctggagtctcccagtccccgaggtacaaagtcacgaagaggggacaggatgtagctctcaggtgtgatccaatttcgggtcatgcagccctttattggtaccgacagaccctgggaaagggcccagagcttctaacttacttccagagacgacgatcaaccagacaaatcagggctgcccagtgatcgcttctctgcagagaggactgagggatccgtctccactctgaagatccagcgcacagagcagggggactcggccgtgtatctctgtgccagcagcttaggattgaacacagatcagccccagtattttggagcaggcacccggctgaccgtgctcgaggacctgaaaaaggtgttcccacccgaggtcgctgtcgacctcgagggg

SEQ ID NO: 29431 - DNA, 1444 bp, Macaca Mulatta
  misc_feature (1)...(1444): n = A,T,C or G
tgtccacttgccggtccctcagaccgtcagcggtctctgtccgcctcgggacctatctgctggtcgctcggcgtccgatggctccgggccgcggaaccttaggcctggccctggtctccgagcgcgggttcgcccggaggagcgtgtggcgggggtgtgccggggcgtgcgtgcgccgggcatggggctgagcccggtgtggggagtgggtatctgcggagccggcctgagccccgcctcagccgggcgcggggagggggctccgtgcgtgtgatcgtgcagctgtgagcgcgtggccgccccgcgaggctccgctgcaggcccctgagccccaggagcaggaatcgctcctctgggcctgccctgggtcctggaaggtacagagctgcccactcctcccggggaggctgccgtggaggccatggagatccctgccccggagcccgagaagacagnnnncaggaatcggtgagtttcaaggatgtggctgtggacttcacccaggaggagtggggtcagctagactcccctcagagggccttgtaccgggatgtgatgttggagaactaccagaaccttcttgccctagnnnnnnnnnnnnnnnnnnnnnnnnnnnnnnnnnnnnnnnnnnnnnnnnnnnnnnnnnnnnnnnnnnnnnnnnnnnnnnnnnnnnnnnnnnnnnnnnnnnnnnnnnnnnnnnnnnnnnnnnnnnnnnnnnnnnnnnnnnnnnnnnnnnnnnnnnnnnnnnnnnnnnnnnnnnnnnnnnnnnnnnnnnnnnnnnnnnnnnnnnnnnnnnnnnnnnnnnnnnnnnnnnnnnnnnnnnnnnnnnnnnnnnnnnnnnnnnnnnnnnnnnnnnnnnnnnnnnnnnnnnnnnnnnnnnnnnnnnnnnnnnnnnnnnnnnnnnnnnnnnnnnnnnnnnnnnnnnnnnnnnnnnnnnnnnnnnnnnnnnnnnnnnnnnnnnnnnnnnnnnnnnnnnnnnnnnnnnnnnnnnnnnnnnnnnnnnnnnnnnnnnnnnnnnnnnnnnnnnnnnnnnnnnnnnnnnnnnnnnnnnnnnnnnnnnnnnnnnnnnnnnnnnnnnnnnnnnnnnnnnnnnnnnnnnnnnnnnnnnnnnnnnnnnnnnnnnnnnnnnnnnnnnnnnnnnnnnnnnnnnnnnnnnnnnnnnnnnnnnnnnnnnnnnnnnnnnnnnnnnnnnnnnnnnnnnnnnnnnnnncaccggcgcatccacacgggcgagaagcccttcttctgcggcgagtgcgggaaggccttcagctgccactcgtccctcaacgtgcatcagcgcatccacacgggcgagcggccctacaaatgcagcgcctgcgagaaggccttcagctgcagctcgctgctcagcatgcacctgcgggtgcacaccggcgagaagccctaccggtgcggcgagtgcggcaaggccttcaaccag

SEQ ID NO: 29432 - DNA, 96 bp, Macaca Mulatta
gatgaatttcaacctcttgtggaagagcctcagaatttagtcaaacaaaattgtgaactttttgagcagcttggagaatacaaattccagaatgcg

SEQ ID NO: 29433 - DNA, 685 bp, Macaca Mulatta
ggcaacagtggtagggggtgaagccccagcccctgtgctcccaacaccccccgaggctcctaggccccctgccacagtgcaccctgaaggagtccctcctactgacagtgaaagcaaggaggtgggcagcactgaaacaagccaagatggagatgccagctccagtgaaggcgagatgcgggtcatggatgaggacatcatggtagaatcaggtgagaggtttgggctggggcgaggggtttgagggtgttgtggatccaacaactgctcaggcagaataccaaacaaaccttttttccccaggtgatgactcatgggatctgatcacgtgttactgtcgaaagccctttgcagggcggcccatgattgagtgcagcctgtgtgggacgtggatccacctctcctgtgctaagattaagaagaccaacgtccctgacttcttttattgccagaaatgcaaggaactgaggccagaggcccggcggttaggggggcctcccaaatctggagagccctgacggcaccaactttagcctggaacttccaaatgataacatgatttgggaactgagcctcagggtcctcagcctaccccctggagcttggatactgtccgcacttcaaggcagggattcccgagggagacttgtttgaaaatgagtgtctcactttcctaccctatccg

SEQ ID NO: 29434 - DNA, 625 bp, Macaca Mulatta
  misc_feature (1)...(625): n = A,T,C or G
tgatcccggcttatgcaactacaaggattcgtagnnnnnnnnnnnnnnnnnnnnnnnnnnnnnnnnnnnnnnnnnnnnnnnnnnnnnnnnnnnnnnnnnnnnnnnnnnnnnnnnnnnnnnnnnnnnnnnnnnnnnnnnnnnnnnnnnnnnnnnnnnnnnnnnnnnnnnnnnnnnnnnnnnnnnnnnnnnnnnnnnnnnnnnnnnnnnnnnnnnnnnnnnnnnnnnnnnnnnnnnnnnnnnnagaagagggccagcaaccttggctctgcggtgaatccttcaccctggcagacgtctcacttgctgtcacattgcatcgactgaagttcctggggtttgcaaggagaaactggggaaacggaaagcgaccaaacttggaaacctattacgagcgtgtcttgaagagaaaaacatttaacaaggttttaggacatgtcaacaatatattaatctctgcagtgctgccaacagcattccgggtggccaagaaaagggccccaaaagttcttggcacgacccttgtggttggtttgcttgcaggagtgggatattttgcttttatgcttttcagaaagaggcttggcagcatggtattagcatttagacccagaccaaattatttcta

SEQ ID NO: 29435 - DNA, 709 bp, Macaca Mulatta
aggtgttctttctagcagaatcttgggttgaagtacgaggtaatgctttagctggagaatgggcagttggtgacggtgaaactcccataactagcgaaatagctgcatctttttgaactggccgcttctgtggcacctccctgaggatagagtgcggctaatgataccagtcgagaagcgtaaatcttgaaaagcctaacatccaaatttctgtgttttttaaaaatgccgattgttttattttcaagcagtatttttaaaaattaaaatgactagattttgagaaaaatgtttaggcttctaagtaaacagttttcagtttcgtacaaatgttcagttatatacaaaattgtgcttttgatagactatattctattttactcatttacacatttttttaaacaacaaatgggttgatcgtgctatgactcactggactgtaatttgtcagtgcatcctctggggcttctctttctatccatttgggatatcgtcccatgtttcggagcccaaagaaggggagagttgagtctggactcctacttctctacttctgccctgagggaaaattctagtgttctcttcccattagaataatcaaaaggaatccccatataaacttataatagttaaagctttatcttccaattgagaatcaactgctttcacagaaatttaaggcacgtggttttaggaaggatattcttct

SEQ ID NO: 29436 - DNA, 420 bp, Macaca Mulatta
aaagttgaaatgaaatgctttgagtcacctaaggcaggatatagacaagagtctttgtcatcttgctgcttctacctttattctcagctctgaacgtatgaacttgctcaatcacctcatcctaaaaataaaatcaccgtccccagaccacactcatttccttacccacccctgaggcttttgttggttttgacagccctggttcacttcttggtcctccagccccttcaaaggattgtgcagtgtggtaaggcaaatgtttaattcaaattatgtatatatagaagtgtttacatatgacagtccgaaattcattctcttaaataaccttcccctcttaatttcattgcctgcattgagagtctttgtcttgtgtgttttgctttcaatttccatgtgatccaggtgctttttgttaac

SEQ ID NO: 29437 - DNA, 578 bp, Macaca Mulatta
acataattgttgggagtgattcattcctccacgatatgcctcctctctccgatatcctgctaactgtaaccgctgtagcatttgagatgacaggacatatatatatatggccccacacttgaccttgagtctgaatgctctgaaatcaagcatatggcacagcgcttgagacttttgggtttgtgtcctttcttctatggctgtctcttaattctggagaggtctgtttccactggctggtttgcagggattgattcttaagcaccggatcacagaaagaagcaacaataaactatactgaactcaaaagtttttaggagaatcatgaaattggtccattcaaaggatagagttgagtccattgtgttattgttgcaagaggttgcatatttggtgagtccgttatataaaataatgttcttattgtaaatatgatacttttcataatctattttaccatgtatgtaacattcaaactgacaaatattatactgacgtatgaataaaggtgtcaaaaaactggcacatcagttacttttgatgaaagtccttcagtgatcgtcactaaataccctatc

SEQ ID NO: 29438 - DNA, 222 bp, Macaca Mulatta
atccgcaagcacatagatccgctgaccggctgcctgaggtactgcaccccgcggggtcgctttgtgcacgttccgcctcagctgccctgttcggactgggccaacgattttgggaagccctggtggcaggggtcgtattatgaggtggggcggctgtctgccaagacccggagcatccgcatcattaacacactcacgtcgcaggagcacacactggaggtg

SEQ ID NO: 29439 - DNA, 2314 bp, Macaca Mulatta
  misc_feature (1)...(2314): n = A,T,C or G
ggccacgcggaggcccacgcctaggccagcggccacaagcatcccatagcccaggtggcccaggactgcaccgcggcggcctgggcgccatagatccaccgtattcgctgatggcgcactacgatgaggtcaagtaagtgaacagttgcggcgcgtgggggcgcacgcggggcctccctgcgctcaggcttcccnnnnnnnnnnnnnnnnnnnnnnnnnnnnnnnnnnnnnnnnnnnnnnnnnnnnnnnngcgcgaggtgagcctgctgtctggttggtgttcgcggccggcctctgcgccatcctggcggctgtgctggcgctcaagtacctgggacggtcgcggcgggcggcggcgcctgtcccgnnnnnnnnnnnnnnnnnnnnnnnnngcgcgcgccgctcacttcttggccgccaacctggacgccagcatcgacccatgccaggacttctactctttagctggcggctgctggctgtggcgccacgccatccccgacgacaacctcatccatggcaccatcgcggccatcggctagcaaaatcatgagcgcctgcggcgcctgccggcgctgcccnnnnnnnnnnnnnnnnnnnnnnnnnnnnnnnnnnnnnnnnnnnnnnnnnnnnnnnnnnnnnnnnnnnnnnnnnnnnnnnnnnnnnnnnnnnnnnnnnnnnnnnnnnnnnnnnnnnnnnnnnnnnnnnnnnnnnnnnnnnnnnnnnnnnnnnnnnnnnnnnnnnnnnnnnnnnnnnnnnnnnnnnnnnnnnnnnnnnnnnnnnnnnnnnnnnnnnnnnnnnnnnnnnnnnnnnnnnnnnnnnnnnnnnnnnnnnnnnnnnnnnnnnnnnnnnnnnnnnnnnnnnnnnnnnnnnnnnnnnnnnnnnnnnnnnnnnnnnnnnnnnnnnnnnnnnnnnnnnnnnnnnnnnnnnnnnnnnnnnnnnnnnnnnnnnnnnnnnnnnnnnnnnnnnnnnnnnnnnnnnnnnnnnnnnnnnnnnnnnnnnnnnnnnnnnnnnnnnnnnnnnnnnnnnnnnnnnnnnnnnnnnnnnnnnnnnnnnnnnnnnnnnnnnnnnnnnnnnnnnnnnnnnnnnnnnnnnnnnnnnnnnnnnnnnnnnnnnnnnnnnnnnnnnnnnnnnnnnnnnnnnnnnnnnnnnnnnnnnnnnnnnnnnnnnnnnnnnnnnnnnnnnnnnnnnnnnnnnnnnnnnnnnnnnnnnnnnnnnnnnnnnnnnnnnnnnnnnnnnnnnnnnnnnnnnnnnnnnnnnnnnnnnnnnnnnnnnnnnnnnnnnnnnnnnnnnnnnnnnnnnnnnnnnnnnnnnnnnnnnnnnnnnnnnnnnnnnnnnnnnnnnnnnnnnnnnnnnnnnnnnnnnnnnnnnnnnnnnnnnnnnnnnnnnnnnnnnnnnnnnnnnnnnnnnnnnnnnnnnnnnnnnnnnnnnnnnnnnnnnnnnnnnnnnnnnnnnnnnnnnnnnnnnnnnnnnnnnnnnnnnnnnnnnnnnnnnnnnnnnnnnnnnnnnnnnnnnnnnnnnnnnnnnnnnnnnnnnnnnnnnnnnnnnnnnnnnnnnnnnnnnnnnnnnnnnnnnnnnnnnnnnnnnnnnnnnnnnnnnnnnnnnnnnnnnnnnnnnnnnnnnnnnnnnnnnnnnnnnnnnnnnnnnnnnnnnnnnnnnnnnnnnnnnnnnnnagacctactacaagaacaacttgaacagcatccgcttcagcatccagtgcttagtcaagaagactgggcaggaagtggacaagtccannnnnnnnnnnnnnnnnnnnnnnnnnnnnnnnnnnnnnnnnnnnnnnnnnnnnnnnnnnnnnnnnnnnnnnnnnnnnnnnnnnnnnnnnnnnnnnnnnnnnnnnnnnnnnnnnnnnnnnnnnnnnnnnnnnnnnnnnnnnnnnnnnnnnnnnnnnnnnnnnnnnnnnnnnnnnnnnnnnnnnnnnnnnnnnnnnnnnnnnnnnnnnnnnnnnnnnnnnnnnnnnnnnnnnnnnnnnnnnnnnnnnnnnnnnnnnnnnnnnnnnnnnnnnnnnnnnnnnnnnnnnnnnnnnnnnnnnnnnnnnnnnnnnacgggaaacacacggcttgggggagaacatcgcagatatgggtggcctcaagctggcctaccacgngcctatcagaagtgggtgcgggagcacggtccagagcacccactgccccggctcaagtacacacacgaccagctcttcttcattgcctttgcccagncccagaactggtgcatcaagcggcggtctcagtccatctaccttcaggtgctgaccgacaagcatgcccctgagcactacagg

SEQ ID NO: 29440 - DNA, 782 bp, Macaca Mulatta
  misc_feature (1)...(782): n = A,T,C or G
gggnnnnnnnnnnnnnnnnnnnnnnnnnnnnnnnnnnnnnnnnnnnnnnnnnnnnnnnnnnnnnnnnnnnnnnnnnnnnnnnnnnnnnnnnnnntgataccatgttaaagatgggctttcaacaacaagtgcttgacattttggaaaacattcctaatgattatcagaccattttggtttcagccacaattccaactagcatagagcaactagcaagccagcttctgcataatcctgtgagaattatcactggagaaaagaacctgccttgtgccaatgtacgtcagattattttgtgggtagaagacccagccaagaagaaaaaattatttgaaattttaaatgataagaaactctttaaacctccagtgttagtatttgtggactgcaaactaggagcagatcttttgagtgaagctgttcagaaaatcacagggctgaaaagcatatctatacattcagagaagtcgcaaatagaaaggaaaaacatattgaagggattactcgaaggagactatgaagttgtagtgagcacaggagtcttgggacgaggcctagacttgatcagtgtcaggctggttgtcaatttgatatgccttcaagtatggatgagtatgtccatcaaggtgggaagaattaggaagattaggtcaaaagggaacaacaaataactttcatccataaataattcaaaaagactctttctgggatatcgcaaaaacgagttaagccccaccagaatccattccttttccccccaagttatttaaattccccaatac

SEQ ID NO: 29441 - DNA, 132 bp, Macaca Mulatta
ttttattgacaaaacagttgtgccatcaagagatgaaactcttttagtggtaggaactcctagccttcttgaattgtttaaaagtcatcaggggctgctctcacatggcaaagagtaagaaagaaaagatat

SEQ ID NO: 29442 - DNA, 4064 bp, Macaca Mulatta
  misc_feature (1)...(4064): n = A,T,C or G
tagtgtgacaactccatacaatgcagactttgatggggatgagatgaacttgcacctgccgcagtctctggagacgcgggcagagatccaggagctggccatggttcctcgcatgattgtcaccccccagagcaaccggcctgtcatgggtatcgtgcaggacacactcacagcagtgcgcaaattcaccaagagagacgtcttcctggagcggnnnnnnnnnnnnnnnnnnnnnnnnnnnnnnnnnnnnnnnnnnnnnnnnnnnnnnnnnnnnnnnnnnnnnnnnnnnnnnnnnnnnnnnnnnnnnnnnnnnnnnnnnnnnnnnnnnnnnnnnnnnnnnnnnnnnnnnnnnnnnnnnnnnnnnnnnnnnnnnnnnnnnnnnnnnnnnnnnnnnnnnnnnnnnnnnnnnnnnnnnnnnnnnnnnnnnnnnnnnnnnnnnnnnnnnnnnnnnnnnnnnnnnnnnnnnnnnnnnnnnnnnnnnnnnnnnnnnnnnnnnnnnnnnnnnnnnnnnnnnnnnnnnnnnnnnnnnnnnnnnnnnnnnnnnnnnnnnnnnnnnnnnnnnnnnnnnnnnnnnnnnnnnnnnnnnnnnnnnnnnnnnnnnnnnnnnnnnnnnnnnnnnnnnnnnnnnnnnnnnnnnnnnnnnnnnnnnnnnnnnnnnnnnnnnnnnnnnnnnnnnnnnnnnnnnnnnnnnnnnnnnnnnnnnnnnnnnnnnnnnnnnnnnnnnnnnnnnnnnnnnnnnnnnnnnnnnnnnnnnnnnnnnnnnnnnnnnnnnnnnnnnnnnnnnnnnnnnnnnnnnnnnnnnnnnnnnnnnnnnnnnnnnnnnnnnnnnnnnnnnnnnnnnnnnnnnnnnnnnnnnnnnnnnnnnnnnnnnnnnnnnnnnnnnnnnnnnnnnnnnnnnnnnnnnnnnnnnnnnnnnnnnnnnnnnnnnnnnnnnnnnnnnnnnnnnnnnnnnnnnnnnnnnnnnnnnnnnnnnnnnnnnnnnnnnnnnnnnnnnnnnnnnnnnnnnnnnnnnnnnnnnnnnnnnnnnnnnnnnnnnnnnnnnnnnnnnnnnnnnnnnnnnnnnnnnnnnnnnnnnnnnnnnnnnnnnnnnnnnnnnnnnnnnnnnnnnnnnnnnnnnnnnnnnnnnnnnnnnnnnnnnnnnnnnnnnnnnnnnnnnnnnnnnnnnnnnnnnnnnnnnnnnnnnnnnnnnnnnnnnnnnnnnnnnnnnnnnnnnnnnnnnnnnnnnnnnnnnnnnnnnnnnnnnnnnnnnnnnnnnnnnnnnnnnnnnnnnnnnnnnnnnnnnnnnnnnnnnnnnnnnnnnnnnnnnnnnnnnnnnnnnnnnnnnnnnnnnnnnnnnnnnnnnnnnnnnnnnnnnnnnnnnnnnnnnnnnnnnnnnnnnnnnnnnnnnnnnnnnnnnnnnnnnnnnnnnnnnnnnnnnnnnnnnnnnnnnnnnnnnnnnnnnnnnnnnnnnnnnnnnnnnnnnnnnnnnnnnnnnnnnnnnnnnnnnnnnnnnnnnnnnnnnnnnnnnnnnnnnnnnnnnnnnnnnnnnnnnnnnnnnnnnnnnnnnnnnnnnnnnnnnnnnnnnnnnnnnnnnnnnnnnnnnnnnnnnnnnnnnnnnnnnnnnnnnnnnnnnnnnnnnnnnnnnnnnnnnnnnnnnnnnnnnnnnnnnnnnnnnnnnnnnnnnnnnnnnnnnnnnnnnnnnnnnnnnnnnnnnnnnnnnnnnnnnnnnnnnnnnnnnnnnnnnnnnnnnnnnnnnnnnnnnnnnnnnnnnnnnnnnnnnnnnnnnnnnnnnnnnnnnnnnnnnnnnnnnnnnnnnnnnnnnnnnnnnnnnnnnnnnnnnnnnnnnnnnnnnnnnnnnnnnnnnnnnnnnnnnnnnnnnnnnnnnnnnnnnnnnnnnnnnnnnnnnnnnnnnnnnnnnnnnnnnnnnnnnnnnnnnnnnnnnnnnnnnnnnnnnnnnnnnnnnnnnnnnnnnnnnnnnnnnnnnnnnnnnnnnnnnnnnnnnnnnnnnnnnnnnnnnnnnnnnnnnnnnnnnnnnnnnnnnnnnnnnnnnnnnnnnnnnnnnnnnnnnnnnnnnnnnnnnnnnnnnnnnnnnnnnnnnnnnnnnnnnnnnnnnnnnnnnnnnnnnnnnnnnnnnnnnnnnnnnnnnnnnnnnnnnnnnnnnnnnnnnnnnnnnnnnnnnnnnnnnnnnnnnnnnnnnnnnnnnnnnnnnnnnnnnnnnnnnnnnnnnnnnnnnnnnnnnnnnnnnnnnnnnnnnnnnnnnnnnnnnnnnnnnnnnnnnnnnnnnnnnnnnnnnnnnnnnnnnnnnnnnnnnnnnnnnnnnnnnnnnnnnnnnnnnnnnnnnnnnnnnnnnnnnnnnnnnnnnnnnnnnnnnnnnnnnnnnnnnnnnnnnnnnnnnnnnnnnnnnnnnnnnnnnnnnnnnnnnnnnnnnnnnnnnnnnnnnnnnnnnnnnnnnnnnnnnnnnnnnnnnnnnnnnnnnnnnnnnnnnnnnnnnnnnnnnnnnnnnnnnnnnnnnnnnnnnnnnnnnnnnnnnnnnnnnnnnnnnnnnnnnnnnnnnnnnnnnnnnnnnnnnnnnnnnnnnnnnnnnnnnnnnnnnnnnnnnnnnnnnnnnnnnnnnnnnnnnnnnnnnnngcaccacgtccaatgacatcgtggagatcttcacggtgnggtgctgggcattgaagctgtgcggaaggccctggagcgggagctgtaccatgtcatctcgtttgatggctcatatgtcaattaccgacacttggctctattgtgtgataccatgacctgtcgtggccatttgatggccatcacccgacacggagtcaaccgccaggacacaggaccactcatgaagtgttcctttgaggaaacggtnnnnnnnnnnnnnnnnnnnnnnnnnnnnnnnnnnnnnnnnnnnnnnnnnnnnnnnnnnnnnnnnnnnnnnnnnnnnnnnnnnnnnnnnnnnnnnnnnnnnnnnnnnnnnnnnnnnnnnnnnnnnnnnnnnnnnnnnnnnnnnnnnnnnnnnnnnnnnnnnnnnnnnnnnnnnnnnnnnnnnnnnnnnnnnnnnnnnnnnnnnnnnnnnnnnnnnnnnnnnnnnnnnnnnnnnnnnnnnnnnnnnnnnnnnnnnnnnnnnnnnnnnnnnnnnnnnnnnnnnnnnnnnnnnnnnnnnnnnnnnnnnnnnnnnnnnnnnnnnnnnnnnnnnnnnnnnnnnnnnnnnnnnnnnnnnnnnnnnnnnnnnnnnnnnnnnnnnnnnnnnnnnnnnnnnnnnnnnnnnnnnnnnnnnnnnnnnnnnnnnnnnnnnnnnnnnnnnnnnnnnnnnnnnnnnnnnnnnnnnnnnnnnnnnnnnnnnnnnnnnnnnnnnnnnnnnnnnnnnnnnnnnnnnnnnnnnnnnnnnnnnnnnnnnnnnnnnnnnnnnnnnnnnnnnnnnnnnnnnnnnnnnnnnnnnnnnnnnnnnnnnnnnnnnnnnnnnnnnnnnnnnnnnnnnnnnnnnnnnnnnnnnnnnnnnnnnnnnnnnnnnnnnnnnnnnnnnnnnnnnnnnnnnnnnnnnnnnnnnnnnnnnnnnnnnnnnnnnnnnnnnnnnnnnnnnnnnnnnnnnnnnnnnnnnnnnnnnnnnnnnnnnnnnnnnnnnnnnnnnnnnnnnnnnnnnnnnnnnnnnnnnnnnnnnnnnnnnnnnnnnnnnnnnnnnnnnnnnnnnnnnnnnnnnnnnnnnnnnnnnnnnnnnnnnnnnnnnnnnnnnnnnnnnnnnnnnnnnnnnnnnnnnnnnnnnnnnnnnnnnnnnnnnnnnnnnnnnnnnnnnnnnnnnnnnnncccaagttactcacccaccagcccgaactattctccaaccagtcccaattataccccaacgtcacccagctacagcccaacatcacccagctattcacctactagtcccaactacacgcctaccagccctaactacagcccaacctctccaagctactctccaacatcacccagttattccccgacctcaccaagttactccccttccagcccacgatacacaccacagtctccaacctataccccaagctcacccagctacagccccagctcgccca

SEQ ID NO: 29443 - DNA, 316 bp, Macaca Mulatta
  misc_feature (1)...(316): n = A,T,C or G
aggtacaaactgtgggtggacacctgctctgagatgtttggcggcctggacatctgtgccgtcaaagctgtacatggcaaagatgggaaagactacatttttgaggtnnnnnnnnnnnnnnnnnnnnnnnnnnnnnnnnnnnnnnnnnnnnnnnnnnnnnnnnnnnnnnnnnnnnnnnnnnnnnnnnnnnnnnnnnnnnnnnnnnnnnnnnnnnnnnnnnnnnnnnnnnnnnnnnnnnnnnnnnnnnnnnnncagagcggaacacttaaggatccggactcaagcaagaccccacctcagcggccaccccctcaag

SEQ ID NO: 29444 - DNA, 3272 bp, Macaca Mulatta
  misc_feature (1)...(3272): n = A,T,C or G
agcaaacggtgagtttttccagattctcagtcaaaatggagcacctcaggcagatgtgaccatgtacagtcttgaggagctggccgcaatgcttcagaacnnnnnnnnnnnnnnnngatacctttcaggcagtatcatcatttctgtccggaaggttagtgcacgtttctgaacaggctgctttgatcctgaatcgtaagaaagatgtcccggcgttttctcactttgttgacctgcttgcccctcaagacgtgagggtattctannnnnnnnnnnnnnnnnnnnnnnnnnnnnnnnnnnnnnnnnnnnnnnnnnnnnnnnnnnnnnnnnnnnnnnnnnnnnnnnnnnnnnnnnnnnnnnnnnnnnnnnnnnnnnnnnnnnnnnnnnnnnnnnnnnnnnnnnnnnnnnnnnnnnnnnnnnnnnnnnnnnnnnnnnnnnnnnnnnnnnnnnnnnnnnnnnnnnnnnnnnnnnnnnnnnnnnnnnnnnnnnnnnnnnnnnnnnnnnnnnnnnnnnnnnnnnnnnnnnnnnnnnnnnnnnnnnnnnnnnnnnnnnnnnnnnnnnnnnnnnnnnnnnnnnnnnnnnnnnnnnnnnnnnnnnagcagtgcctttgctgggttacctacctcaggacctgatcggaacatcgatcctaagctacctgcaccctgaagatcgttctctgatggttgccatacaccaaaaannnnnnnnnnnnnnnnnnnnnnnnnnnnnnnnnnnnnnnnnnnnnnnnnnnnnnnnnnnnnnnnnnnnnnnnnnnnnnnnnnnnnnnnnnnnnnnnnnnnnnnnnnnnnnnnnnnnnnnnnnnnnnnnnnnnnnnnnnnnnnnnnnnnnnnnnnnnnnnnnnnnnnnnnnnnnnnnnnnnnnnnnnnnnnnnnnnnnnnnnnnnnnnnnnnnnnnnnnnnnnnnnnnnnnnnnnnnnnnnnnnnnnnnnnnnnnnnnnnnnagccagttcacgtgagtgtgtccagtggctatgggagcctggggagcagcgggtcgcaggagcagcttgtcagcatcgcctcctccagtgaggccagcgggcactgcgtggaggagacaaaggcagagcannnnnnnnnnnnnnnnnnnnnnnnnnnnnnnnnnnnnnnnnnnnnnnnnnnnnnnnnnnnnnnnnnnnnnnnnnnnnnnnnnnnnnnnnnnnnnnnnnnnnnnnnnnnnnnnnnnnnnnnnnnnnnnnnnnnnnnnnnnnnnnnnnnnnnnnnnnnnnnnnnnnnnnnnnnnnnnnnnnnnnnnnnnnnnnnnnnnnnnnnnnnnnnnnnnnnnnnnnnnnnnnnnnnnnnnnnnnnnnnnnnnnnnnnnnnnnnnnnnnnnnnnnnnnnnnnnnnnnnnnnnnnnnnnnnnnnnnnnnnnnnnnnnnnnnnnnnnnnnnnnnnnnnnnnnnnnnnnnnnnnnnnnnnnnnnnnnnnnnnnnnnnnnnnnnnnnnnnnnnnnnnnnnnnnnnnnnnnnnnnnnnnnnnnnnnnnnnnnnnnnnnnnnnnnnnnnnnnnnnnnnnnnnnnnnnnnnnnnnnnnnnnnnnnnnnnnnnnnnnnnnnnnnnnnnnnnnnnnnnnnnnnnnnnnnnnnnnnnnnnnnnnnnnnnnnnnnnnnnnnnnnnnnnnnnnnnnnnnnnnnnnnnnnnnnnnnnnnnnnnnnnnnnnnnnnnnnnnnnnnnnnnnnnnnnnnnnnnnnnnnnnnnnnnnnnnnnnnnnnnnnnnnnnnnnnnnnnnnnnnnnnnnnnnnnnnnnnnnnnnnnnnnnnnnnnnnnnnnnnnnnnnnnnnnnnnnnnnnnnnnnnnnnnnnnnnnnnnnnnnnnnnnnnnnnnnnnnnnnnnnnnnnnnnnnnnnnnnnnnnnnnnnnnnnnnnnnnnnnnnnnnnnnnnnnnnnnnnnnnnnnnnnnnnnnnnnnnnnnnnnnnnnnnnnnnnnnnnnnnnnnnnnnnnnnnnnnnnnnnnnnnnnnnnnnnnnnnnnnnnnnnnnnnnnnnnnnnnnnnnnnnnnnnnnnnnnnnnnnnnnnnnnnnnnnnnnnnnnnnnnnnnnnnnnnnnnnnnnnnnnnnnnnnnnnnnnnnnnnnnnnnnnnnnnnnnnnnnnnnnnnnnnnnnnnnnnnnnnnnnnnnnnnnnnnnnnnnnnnnnnnnnnnnnnnnnnnnnnnnnnnnnnnnnnnnnnnnnnnnnnnnnnnnnnnnnnnnnnnnnnnnnnnnnnnnnnnnnnnnnnnnnnnnnnnnnnnnnnnnnnnnnnnnnnnnnnnnnnnnnnnnnnnnnnnnnnnnnnnnnnnnnnnnnnnnnnnnnnnnnnnnnnnnnnnnnnnnnnnnnnnnnnnnnnnnnnnnnnnnnnnnnnnnnnnnnnnnnnnnnnnnnnnnnnnnnnnnnnnnnnnnnnnnnnnnnnnnnnnnnnnnnnnnnnnnnnnnnnnnnnnnnnnnnnnnnnnnnnnnnnnnnnnnnnnnnnnnnnnnnnnnnnnnnnnnnnnnnnnnnnnnnnnnnnnnnnnnnnnnnnnnnnnnnnnnnnnnnnnnnnnnnnnnnnnnnnnnnnnnnnnnnnnnnnnnnnnnnnnnnnnnnnnnnnnnnnnnnnnnnnnnnnnnnnnnnnnagtgtgttgcaggcaacagtagcagtgagagcagtcctgccactaccggtgcactgtccatggggtcacctcccagggagaatccatcccatcctactgccagcacactgtccatgggatcgcctcccagcaggactccatcccatcctactgccagcgttctgtccacggggtcacctccctnnnnnnnnnnnnnnnnnnnnnnnnnnnnnnnnnnnnnnnnnnnnnnnnnnnnnnnnnnnnnnnnnnnnnnnnnnnnnnnnnnnnnnnnnnnnnnnnnnnnnnnnnnnnnnnnnnnnnnnnnnnnnnnnnnnnnnnnnnnnnnnnnnnnnnnnnnnnnnnnnnnnnnnnnnnnnnnnnnnnnnnnnnnnnnnnnnnnnnnnnnnnnnnnnnnnnnnnnnnnnnnnnnnnnnnnnnnnnnnnnnnnnnnnnnnnnnnnnnnnnnnnnnnnnnnnnnnnnnnnnnnnnnnnnnnnnnnnnnnnnnnnnnnnnnnnnnnnnnnnnnnnnnnagggttaaagaagttgtactaaaagaagacctagaaaagttagaaagtatgaggcaacagcagccccagttttctcatgggcaaaaggaggagctggccaaggtgtataattggattcaaagccagactgtccctcaagaaatcaacattcaa

SEQ ID NO: 29445 - DNA, 830 bp, Macaca Mulatta
cggccaacctgcacccaccgctccgcggccgccctgggacaagaaggagccggcgacagcccctgactcggtgcggaagatgccgcagctgacggcaagcgccatggtcagcccgcagggcgacgagagcccccggggcagcggcggaggcggccccacgtcggcctctgggccagcggcctctgagagcaggcccctgccgcgcgtgcatcgggcgcgcggggcaccccggcagcagggccccgggaccggcacccgcgacgtcttccagaagagccgtttcgccccgcgcggcgccccgcactttcgtttcatcatcgccgggcggcaggctgggaggcgctgccgcgggcgccttttccagactgcattccccgcgccgtacgggcctagcccggcctcccgctacgtgcagaagctgcccatgatcggccgcaccagccgccccgcccgccggtgggcgctctcggactactcgctgtacttgccgctctgagtaggtgagcgcttccatctttgtaaataaatcccgcccccggaagtgacgtctccattttcgtgggtcgcgccggataaggtggggtttggccgggttgaggctgtggcggcgcttcctggtggtcagggcgccatggcgctgccctggctgcagcgcgtcgagcttgcgctgtttgctgccgccttcctgtgcggggccgtggcggccgcggcgctgactcggacccaggtgcggctgcagggcggggtcaggtaggctggggagctggccggtcctgacgtggcgaggccactgtcgctttccgaccgagctcgctgctgcttggagccgg

SEQ ID NO: 29446 - DNA, 436 bp, Macaca Mulatta
  misc_feature (1)...(436): n = A,T,C or G
gcaataactggaattgtgactcaagggatagaccctggatgtgactcttcttttaaagaggaaactatgtggaggatgatgcaaaaacatatttatcttagttcactctgctgtagttctgttatttatacttggtgttgcttgtcatggacaccggtgaacatgtcgtaactctgtaactgcattgtaagtgcagtgggggtannnnnnnnnnnnnnnnnnnnnnnnnnnnnnnnnnnnnnnnnnnnnnnnnnnnnnnnnnnnnnnnnnnnnnnnnnnnnnnnnnnnnnnnnnnnnnnnnnnnnnnnnnnnnnnnnnnnnnnnnnntatttcttcctgcagtttattctgtgttttatatattatctaaatatttgtatatgctgtgtaatactcataatctggaaatgaataaaatgatatattcctggtttgt

SEQ ID NO: 29447 - DNA, 862 bp, Macaca Mulatta
  misc_feature (1)...(862): n = A,T,C or G
gggggaactcggtggtggccactgctcagaccagacttcgctcgttttcgtgcgcctcgctccgcttttcctccgcaaccatgtctgacaaacccgatatggctgagatcgagaaattcgataagtcgaaactgaagaagacagagacgcaagagaaaaatccactgccttccaaagaaacgattgaacaggagaagcaagcaggcgaatcgtaatgaggcgtgcgccgccaatatgcactgtacattccacaagcattgccttcttattttacttcttttagctgtttaactttgtaagatgcaaagaggttggatcaagtttaaatgactgtgctgcccctttcacatcaaagaactactgacaacgaaggccgcgcctgcctttcccatctgtctatctggctggcagggaaggaaagaacttgcatgttggtgaaggaagaagtggggtggaagaagtgggggtgggacgacagtgaaatctagagtaaaaccaagctggcccaaggtgtcctgcaggctgtaatgcagtttaatcagagtgccattttttttttgttcaaatgattttaattatcggaatgcacaatttttttaatatgcaaataaaaagtttaaaaacttatttttaataattgctcaaataaaaaggcggctctaaagaaccctttttaanaaacctccttggggcggcaaganaannnaagaaaaacaattttgtcatcgctccgctcnnnnncccccccccttnannncccctttttagaaaaaaacttttttctaaaaaacaccttttctcttttttggccccccccgggggcgcccccatgttgggtggtaaaagtgaaaaaccattgggg

SEQ ID NO: 29448 - DNA, 275 bp, Macaca Mulatta
tccttccaacctgttctcgtgactcctcaattccagggaaccagagcgacctgttctttgtacctgtaggtctaggatctccaaacttaaccaatcacatgcccctctcagaagaaatatgagcatgctccctcatgcagatagtatacgcatcataaacaaagagtagagctttaacataagataaataatcatacacagaaatcctgacattatattcccaaatctcaaaagatctcctgtgcaccccactttggggactatgctttaggtac

SEQ ID NO: 29449 - DNA, 1288 bp, Macaca Mulatta
  misc_feature (1)...(1288): n = A,T,C or G
tttattaatcagttacttggagttgttcctttgtcgacaccaacagaggataagctggcactgcctgctgacatcagagctctgcagcaacatttgtgtgtggtgcagctgacgaggttacttggcttgtaccacaccatggataaaaatcagaaattgagtgtggtcagagaattgatgttaaggtaccagcatggactggaatttgnnnnnnnnnnnnnnnnnnnnnnnnnnnnnnnnnnnnnnnnnnnnnnnnnnnnnnnnnnnnnnnnnnnnnnnnnnnnnnnnnnnnnnnnnnnnnnnnnnnnnnnnnnnnnnnnnnnnnnnnnnnnnnnnnnnnnnnnnnnnnnnnnnnnnnnnnnnnnnnnnnnnnnnnnnnnnnnnnnnnnnnnnnnnnnnnnnnnnnnnnnnnnnnnnnnnnnnnnnnnnnnnnnnnnnnnnnnnnnnnnnnnnnnnnnnnnnnnnnnnnnnnnnnnnnnnnnnnnnnnnnnnnnnnnnnnnnnnnnnnnnnnnnnnnnnnnnnnnnnnnnnnnnnnnnnnnnnnnnnnnnnnnnnnnnnnnnnnnnnnnnnnnnnnnncctcagaatatattattcaagcttacaaatatggtgcatttgagaagatcccagagtttatcgcttttaggaacaggctgaataattctcttcattttgcacaagtccgtactgaacggatgctgttagaccttctacttgaagcaaatatnnnnnnnnnnnnnnnnnnnnnnnnnnnnnnnnnnnnnnnnnnnnnnnnnnnnnnnnnnnnnnnnnnnnnnnnnnnnnnnnnnnnnnnnnnnnnnnnnnnnnnnnnnnnnnnnnnnnnnnnnnnnnnnnnnnnnnnnnnnnnnnnnnnnnnnnnnnnnnnnnnnnnnnnnnnnnnnnnnnnnnnnnnnnnnnnnnnnnnnnnnnnnnnnnnnnnnnnnnnnnnnnnnnnnnnnnnnnnnnnnnnnnnnnnnnnnnnnnnnnnnnnnnnnnnnnnnnnnnnnnnnnnnnnnnnnnnnnnnnnnnnnnnnnnnnnnnnnnnnnnnnnnnnnnnnnnnnnnnnnnnnnnnnnnnnnnnnnnnnnnnnnnnnnnnnnnnnnnnnnnnnnnnnnnnnnnnnnnnnnnnnnnnnnnnnnnnnnnnnnnnnnnnnnnnnnnnnnnnnnnnnnnnnnnnnnnnnnnnnnnnnnnnnnnnnnnnnnnnnnnnnnnnnnnnnnagaggatacaatggagatccaggaacgaatagaaaatagttttaagtctttactagaccagttaaaa

SEQ ID NO: 29450 - DNA, 642 bp, Macaca Mulatta
  misc_feature (1)...(642): n = A,T,C or G
gggaagcagtgcnnnnnnnnnnnnngnnnnnnnnnnnnnnnnntgtatgtgtgtgtatgttgaggaacatgaaacttggcagtagcagggggcactgaagttcacatgcaagttctaatctaaatttaagcagtctcttgtttgtttcgggactctggtttgactgttttctgatggtttcggcatgtctgcagcctgttctcctagcctgctgcttggagtcaggttgagcatcagtgagatgaagacagtaccttttcctctaacattggcagaacagcacgcacgggatgcctgaccttgagctctagtctcccctttaaatcttaccttggcagtgacacactattccttattcaataatctcaatgctgaaactgaactctattactaatgccttccagtcagagttcctgatgggatgcctatgggatgtggtatggcccacacctgggggacctggcagatggggtgagttgggtaaggaagatgatgcttagttcctgatagatgctacagatgtagtttggcatttcagctttttccagtttgatttttcactgggggttgagtcacagcaagctgtgtatgacttgtgttttgtggtgaacattaataatcaattgctaaagcctgaatctg

SEQ ID NO: 29451 - DNA, 697 bp, Macaca Mulatta
  misc_feature (1)...(697): n = A,T,C or G
tccgagcagagcatcctgacctccaccgcgctcctcacagccatgctgcgccagctccgctcccctgcgctgctgcgggaggccgcggctttcctcctgggcacagaccggcagcctnnnnnnnnnnnnnnnnnnnnnnnnnnnnnnnnnnnnnnnnnnnnnnnnnnnnnnnnnnnnnnnnnnnnnnagatcagcatcgccacgctccggctgtttgaggagctgctacagaagccccacgaggggatcatccgcagcctggtcctgcgcaaccttgagggccgcccttacgtggcctggggctcaccagagcctgagagctatgaggacannnnnnnnctggaggaagacccctactttaccgacagcttcctggattccggctttcaacctcgtgcaaagcctcgcctagctcctgccaccagctacgatggcaaaacagcagtgaccgaaatcgtcaacannnnnnnnnnnnnnnnnnnnnnnnnnnnnnnnnnnnnnnnnnnnnnnnnnnnnnnnnnnnnnnnnnnnnnnnnnnnnnnnnnnnnnnnnngttccaggagtgcagctcccgcgttgcgtcctggggctggcctctgacccccacacctttggacccccatgagcctgagcgacctttcttcgagggccacttcctccgagtgctgtttgaccgcatgtcccggattctggatca

SEQ ID NO: 29452 - DNA, 329 bp, Macaca Mulatta
gagactgcacctactttctgtggagggacaagttattgaaacaaagtatgaactggtaacatcgtcaagggaagaagcttggatcactgtctcaaagagatattaaaattttatgcatttaaaatcattgttaaattgattgaggaaaacaaccatttaaaaaatctgagttgaatccttttataaaccagtaacactttgtaatataaacacctatttgtacttaattttgtaaatttggatttttatatatcatattttcttcattatacacatttgacttactgcacagtatattgatcattttaatgggaaactttagatttcta

SEQ ID NO: 29453 - DNA, 585 bp, Macaca Mulatta
gtctaaggatgtcttgagccctgtgtgccccaccattcatgacctctgcattttctcattagatccctgaccataagcctgagcccctccctccccgccccatattcacacacaccctagcccctggccttgccctcttcctttaggcacgtcagaaaatcagcctagaagtttaaaccccactttcccccacttagcaccacaggcaaaggggcagatcccagaacccctgacacccccacctccacaggtctgctccttccttagccctggctaagagggtccttctgggatggcagccagtgagggtgggctgagactgaggcattgatgtgcaaatccagcttccatcccctcccccatctggcaggattctccatgtgtaaacttcacccccaggacccaggatcttctcctttctgggcatccctttgtgggtgggcagagccctgacccacagctgtgtttctgcttggagaagcatatgtaggggaataccctatggtgttgcgctgtgcgtggctgtgggataaatgtgtgtgggaatattgaaacatcgcccaataattgtggtttgtatataac

SEQ ID NO: 29454 - DNA, 686 bp, Macaca Mulatta
  misc_feature (1)...(686): n = A,T,C or G
atgctacaaaaagaggggattgatccgagaaatagcttgtttccggaaggtcccctttgggaagacttattgttgtgacctgaaaatgttaatttgaagatgtggggcagggacagtgacatttctgtagtcccagatgcacagaattatgggagagaatgttgatttctatacagtgtggcgcgcttttttaataatcatttaatcnnnnnnnnnnnnnnnnnnnnnnnnnnnnnnnnnnnnnnnnnnnnnnnnnnnnnnnnnnnnnnnnnnnnnnnnnnnnnnnnnnnnnnnnnnnnnnnnnnnnnnnnnnnnnnnnnnnnnnnnnnnnnnnnnnnnnnnnnnnnnnnnnnnnnnnnnnnnnnnnnnnnnnnnnnnnnnnnnnnnnnnnnnnnnnnnnnnnnnnnnnnnnnnnnnnnnnnnnnnnnnnnnnnnnnnnnnnnnnnnnnnnnnnnnnnnnnnnnnnnnnnnnnnnnnnnnnnnnnnnnnnnnnnnnnnnnnnnnnnnnnnnnnnnnnnnnnnnnnnnnnnnnnnnnnnnnnnnnnnnnnnnnnnnnnnnnnnnnnnnnnnnnnnnnnnnnnnnnnnnnnnnnnnnnnnnnnnnnnnnnnnnnnnnnnnnnnnnnnnnnnnnnnnnnnnnnnnnnnnnnnnnnnnnnnnnnnnnnnnnnnnnnnnnnnnnnnnnnnn

SEQ ID NO: 29455 - DNA, 3747 bp, Macaca Mulatta
  misc_feature (1)...(3747): n = A,T,C or G
agtgggcggacagaatatcaagctacacatggctccaggttacgaagaaccagcacctttgagaggaagcctagtaaacgttatccatcccggagacattcaacgttcaaagnnnnnnnnnnnnnnnnnnnnnnnnnnnnnnnnnnnnnnnnnnnnnnnnnnnnnnnnnnnnnnnnnnnnnnnnnnnnnnnnnnnnnnnnnnnnnnnnnnnnnnnnnnnnnnnnnnnnnnnnnnnnnnnnnnnnnnnnnnnnnnnnnnnnnnnnnnnnnnnnnnnnnnnnnnnnnnnnnnnnnnnnnnnnnnnnnnnnnnnnnnnnnnnnnnnnnnnnnnnnnnnnnnnnnnnnnnnnnnnnnnnnnnnnnnnnnnnnnnnnnnnnnnnnnnnnnnnnnnnnnnnnnnnnnnnnnnnnnnnnnnnnnnnnnnnnnnnnnnnnnnnnnnnnnnnnnnnnnnnnnnnnnnnnnnnnnnactgagtccaggaacgcctgccttgttcagtgaagccgctgcccatctaaagaagctggaactggaaactgtgaaggctgctggaccctggcctcctctgcacatcaacataaacaaggnnnnnnnnnnnnnnnnnnnnnnnnnnnnnnnnnnnnnnnnnnnnnnnnnnnnnnnnnnnnnnnnnnnnnnnnnnnnnnnnnnnnnnnnnnnnnnnnnnnnnnnnnnnnnnnnnnnnnnnnnncagggtggaaaagaggaatcaatgtttgtaaatatcaataagaaatccagtcttcaggacgctaatgtaannnnnnnnnnnnnnnnnnnnnnnnnnnnnnnnnnnnnnnnnnnnnnnnnnnnnnnnnnnnnnnnnnnnnnnnnnnnnnnnnnnnnnnnnnnnnnnnnnnnnnnnnnnnnnnnnnnnnnnnnnnnnnnnnnnnnnnnnnnnnnnnnnnnnnnnnnnnnnnnnnnnnnnnnnnnnnnnnnnnnnnnnnnnnnnnnnnnnnnnnnnnnnnnnnnnnnnnnnnnnnnnnnnnnnnnnnnnnnnnnnnnnnnnnnnnnnnnnnnnnnnnnnnnnnnnnnnnnnnnnnnnnnnnnnnnnnnnnnnnnnnnnnnnnnnnnnnnnnnnnnnnnnnnnnnnnnnnnnnnnnnnnnnnnnnnnnnnnnnnnnnnnnnnnnnnnnnnnnnnnnnnnnnnnnnnnnnnnnnnnnnnnnnnnnnnnnnnnnnnnnnnnnnnnnnnnnnnnnnnnnnnnnnnnnnnnnnnnnnnnnnnnnnnnnnnnnnnnnnnnnnnnnnnnnnnnnnnnnnnnnnnnnnnnnnnnnnnnnnnnnnnnnnnnnnnnnnnnnnnnnnnnnnnnnnnnnnnnnnnnnnnnnnnnnnnnnnnnnnnnnnnnnnnnnnnnnnnnnnnnnnnnnnnnnnnnnnnnnnnnnnnnnnnnnnnnnnnnnnnnnnnnnnnnnnnnnnnnnnnnnnnnnnnnnnnnnnnnnnnnnnnnnnnnnnnnnnnnnnnnnnnnnnnnnnnnnnnnnnnnnnnnnnnnnnnnnnnnnnnnnnnnnnnnnnnnnnnnnnnnnnnnnnnnnnnnnnnnnnnnnnnnnnnnnnnnnnnnnnnnnnnnnnnnnnnnnnnnnnnnnnnnnnnnnnnnnnnnnnnnnnnnnnnnnnnnnnnnnnnnnnnnnnnnnnnnnnnnnnnnnnnnnnnnnnnnnnnnnnnnnnnnnnnnnnnnnnnnnnnnnnnnnnnnnnnnnnnnnnnnnnnnnnnnnnnnnnnnnnnnnnnnnnnnnnnnnnnnnnnnngataagtctaggaaaagaaagataggaaaacgggattccttttcagaagtacctgtgtgtatctgttaataaccacaggggttaatacgatgtgggattctttactatcaatttcaaccatttgattttgtatgattgaaacttgcaccgagctttgactgtttgttaaagagtcatttttaatgaaagaataattctttattgctggtttttcatttacactgataaatacacagatcttataaagtctttaacattcatttgtattcagatgtgagtagatgaactaaaaaaagaaagttacatatcactatgactgaaggtacttcagattaatctgaaatataatttaacttgtgaactctttggatatgatattatttggaataaatagaatttatcattgaacccaaagtaggaaatagtagcttacgttgtctaaaaatccttacaaggttaagatgattcaatatcaggaagatnnnnnnnnnnnnnnnnnnnnnnnnnnnnnnnnnnnnnnnnnnnnnnnnnnnnnnnnnnnnnnnnnnnnnnnnnnnnnnnnnnnnnnnnnnnnnnnnnnnnnnnnnnnnnnnnnnnnnnnnnnnnnnnnnnnnnnnnnnnnnnnnnnnnnnnnnnnnnnnnnnnnnnnnnnnnnnnnnnnnnnnnnnnnnnnnnnnnnnnnnnnnnnnnnnnnnnnnnnnnnnnnnnnnnnnnnnnnnnnnnnnnnnnnnnnnnnnnnnnnnnnnnnnnnnnnnnnnnnnnnnnnnnnnnnnnnnnnnnnnnnnnnnnnnnnnnnnnnnnnnnnnnnnnnnnnnnnnnnnnnnnnnnnnnnnnnnnnnnnnnnnnnnnnnnnnnnnnnnnnnnnnnnnnnnnnnnnnnnnnnnnnnnnnnnnnnnnnnnnnnnnnnnnnnnnnnnnnnnnnnnnnnnnnnnnnnnnnnnnnnnnnnnnnnnnnnnnnnnnnnnnnnnnnnnnnnnnnnnnnnnnnnnnnnnnnnnnnnnnnnnnnnnnnnnnnnnnnnnnnnnnnnnnnnnnnnnnnnnnnnnnnnnnnnnnnnnnnnnnnnnnnnnnnnnnnnnnnnnnnnnnnnnnnnnnnnnnnnnnnaatccccttgacaatttatgatgccaccagcaatgtataagcatttctatttaccaatagctctgccagtattgggttttgccatttttatttattttcgctagtttaataggtatgtatagttgttcttgaagagttgttttatttcattaattgctagcaaggctgagcacttttccatgtgatgatttactagttgtatttccttgtgtgtaaaatgttcattcatttcttctgaccacttgttaagaggaactgatctcatatatttgtatcagaactgtatttttatgttgtatagtttgctctcctgtccctctccttaaaactgaatggtgccaataatttgatactaatgactataaaaaaggtaatgcctcatttactagtattgttgtaaaatgaggaatgtacgcgaatattcagataaccgaggattaaccctttaagtgctgaatctttaaaattttaatatttttttgttttgagggaaatctttctaaaatgtattacacacttccctgccttagtaaacagagtatactggagagtatttaaccttttcttgatgagtcatggtcacaattataaacatcagccccttttgtaccttggtatggtgcagtgatatcattaagagctatcaatatgtgtagggcttggcttggccttttataggatattatgctcttctgactgatggtttttttactgctctctgctctatcagtggagctatccggggcaattgtagcgtttggggccttttacccccatgtccccggctatacttttaaaacagctttagctgttctttatcttgtgcacatgatacaaaatatgttcccgtacaatatggggctgtcacttcttgccaacccagcac

SEQ ID NO: 29456 - DNA, 1754 bp, Macaca Mulatta
  misc_feature (1)...(1754): n = A,T,C or G
ggccgccgacagccctaccccttcgagcgcatgatcttcggcgccttctagggcctcatcgggcaatcggcctcgtacccgctggctgtatggggcggcgtatgcagacggcnnnnnnnnnnnnnnnnnnnnnnnnnnnnnnnnnnnnnnnnnnnnnnnnnnnnnnnnnnnnnnnnnnnnnnnnnnnnnnnnnnnnnnnnnnnnnnnnnnnnnnnnnnnnnnnnnnnnnnnnnnnnnnnnnnnnnnnnnnnnnnnnnnnnnnnnnnnnnnnnnnnnnnnnnnnnnnnnnnnnnnnnnnnnnnnnnnnnnnnnnnnnnnnnnnnnnnnnnnnnnnnnnnnnnnnnnnnnnnnnnnnnnnnnnnnnnnnnnnnnnnnnnnnnnnnnnnnnnnnnnnnnnnnnnnnnnnnnnnnnnnnnnnnnnnnnnnnnnnnnnnnnnnnnnnnnnnnnnnnnnnnnnnnnnnnnnnnnnnnnnnnnnnnnnnnnnnnnnnnnnnnnnnnnnnnnnnnnnnnnnnnnnnnnnnnnnnnnnnnnnnnnnnnnnnnnnnnnnnnnnnnnnnnnnnnnnnnnnnnnnnnnnnnnnnnnnnnnnnnnnnnnnnnnnnnnnnnnnnnnnnnnnnnnnnnnnnnnnnnnnnnnnnnnnnnnnnnnnnnnnnnnnnnnnnnnnnnnnnnnnnnnnnnnnnnnnnnnnnnnnnnnnnnnnnnnnnnnnnnnnnnnnnnnnnnnnnnnnnnnnnnnnnnnnnnnnnnnnnnnnnnnnnnnnnnnnnnnnnnnnnnnnnnnnnnnnnnnnnnnnnnnnnnnnnnnnnnnnnnnnnnnnnnnnnnnnnnnnnnnnnnnnnnnnnnnnnnnnnnnnnnnnnnnnnnnnnnnnnnnnnnnnnnnnnnnnnnnnnnnnnnnnnnnnnnnnnnnnnnnnnnnnnnnnnnnnnnnnnnnnnnnnnnnnnnnnnnnnnnnnnnnnnnnnnnnnnnnnnnnnnnnnnnnnnnnnnnnnnnnnnnnnnnnnnnnnnnnnnnnnnnnnnnnnnnnnnnnnnnnnnnnnnnnnnnnnnnnnnnnnnnnnnnnnnnnnnnnnnnnnnnnnnnnnnnnnnnnnnnnnnnnnnnnnnnnnnnnnnnnnnnnnnnnnnnnnnnnnnnnnnnnnnnnnnnnnnnnnnnnnnnnnnnnnnnnnnnnnnnnnnnnnnnnnnnnnnnnnnnnnnnnnnnnnnnnnnnnnnnnnnnnnnnnnnnnnnnnnnnnnnnnnnnnnnnnnnnnnnnnnnnnnnnnnnnnnnnnnnnnnnnnnnnnnnnnnnnnnnnnnnnnnnnnnnnnnnnnnnnnnnnnnnnnnnnnnnnnnnnnnnnnnnnnnnnnnnnnnnnnnnnnnnnnnnnnnnnnnnnnnnnnnnnnnnnnnnnnnnnnnnnnnnnnnnnnnnnnnnnnnnnnnnnnnnnnnnnnnnnnnnnnnnnnnnnnnnnnnnnnnnnnnnnnnnnnnnnnnnnnnnnnnnnnnnnnnnnnnnnnnnnnnnnnnnnnnnnnnnnnnnnnnnnnnnnnnnnnnnnnnnnnnnnnnctgaccccgggtctatgatctattgacattgaacccctgacctggtgccagggtgagcgtaacgtgagtgttgctttccacggctggctcagcacacgctgtgtgaagggatctgagcttgttcatctccagctgtgacttccatttctcccttccttctgtcctcctcctgttcttgccttggacctgtggatgtgcagaccgctctctctg

SEQ ID NO: 29457 - DNA, 751 bp, Macaca Mulatta
  misc_feature (1)...(751): n = A,T,C or G
ggcatctatgtggtggacagtggacaatctgtgcacttccagacaatatttgctgctgctcaaatgattggttggtatgaccctaaagtaactcgagtcttccatgctggatttggtgtggtgctaggggaagacaagaaaaagtttaaaacacgtgcgggtgaaacagtgcgcctcatggaccctatgggagaaggactaaaacgatccatggacaagttgaaggaaaaaagaaagagacaaggtcttaactgcagaggaattaaatgctgctcagacatccatcgcctatggctgtatcaaatatgctgacctttctcataaccggttgaatgactacatcttctcctttgacaaaatgctagatgacagaggaaatacagcggcttacttgttgtatgccttcactagaatcaggtctattgcacgtctggccaatattgatgaagaaatgctccaaaaagctgctcgagaaaccaagattcttttggatcatgagaaggaatggaaactaggccggtgcattttacggttccctgagattctgcaaaagattttggatgacttatttctccacactctctgtgattatatatatgagctggcaactactttcacagagttctatgatagctgctactgtgtggagaaagatagacagactgggaaaaatattgaanggtgaacatngtggcgtaatgctgctatgtgaaagcagtagcttgcctggtcatgggcccaagggggttcg

SEQ ID NO: 29458 - DNA, 113 bp, Macaca Mulatta
cctgaggaaagccagtggcctgacagcagcagacatggcacaaacccaggggtttccaggagggtgcccagtttctctgaccctccagaattgtcatctgaaccatttctata

SEQ ID NO: 29459 - DNA, 372 bp, Macaca Mulatta
cagacccaccctccagttgtttgcctttcacagtcttcttcccacagtgccgtccctgcagactctgtgccgcctagtgatacagagaagcatggtgcaccggctggccattgatgggctccacctgcccaaagaacttaaggatttctgcaagtatgagtgaagacccgcagcgcaccggagcagagctgcatcctggggcctcagacctgtggctggctggtctgaagttggccatattgctgccaaccaggaccagaaataaacagccaatgctgacatcttgatcattggaaggtctccttgccctccagcctaggagaggcactttgtttagaatcactgcaggtcagcaggtcggagcaagagagc

SEQ ID NO: 29460 - DNA, 498 bp, Macaca Mulatta
ttcgtttgtattattgaagtaatttaatatttgttgtaaaacaggcctggcttctttgcctccttgccccagctgtttccactccatttccccctcctgatgcttgaaatttatccacatttgatgaaaggattactttattcattatcatatattttaacaatgtttattattcatttatccctctacagaaccaccgcccacaccgaggagattatttggagtgggtcccaacctggggacttgactctgaaatctaactccccccttccctcattttgtgacttagatgggggcatggttcaggcagaactggtgtctcctattggatcctgcaggaggacctaggcacaggcgtatggtggccacacccaggagggttgattggcaggctggaagacaaaagtctcccaattaaggcacttttacctctatgaggaggtgggagttggttggctgggaatattgttgttggggtggggaggagttatttcaatg

SEQ ID NO: 29461 - DNA, 226 bp, Macaca Mulatta
gcgaatgtctgcgacaacgagctcctgcactgccagaacggagggacgtgccacaacaacgtgcgctgcctgtgcccggccgcatacacgggcatcctctgcgagaagctgcggtgcgaggaggctggcagctgcggctccgactctggccagggtgcgcccccgcacggctccccagcgctgctgctgctgaccacgctgctgggaaccgccagccccctggtgt

SEQ ID NO: 29462 - DNA, 734 bp, Macaca Mulatta
  misc_feature (1)...(734): n = A,T,C or G
gcgggagaacctgcttcggggtcagcaggaggaggaggaacggctactcaaagctatccccttgttctgcttcccagacgggaatgagtgggcatcactcaccgagtatcccaggnagggagaccttctccttcgttctgaccaatgtggatgggagcagaaagattggatactgcaggcgcctcttgnnnnnnnnnnnnnnnnnnnnnnnnnnnnnnnnnnnnnnnnnnnnnnnnnnnnnnnnnnnnnnnnnnnnnnnnnnnnagatcctggatgaagtggagaagagacatcagatctccatggctgtcatctacccgttcatgcagggcctccgagaggcagccttccctgctcctgggaagactgtcactctcaagagcttcatccccgactcaggcactgannnnnnnnnnnnnnnnnnnnnnnnnnnnnnnnnnnnnnnnnnnnnnnnnnnnnnnnnnnnnnnnnnnnnnnnnnnnnnnnnnnnnnnnnnnnnnnnnnnnnnnnnnnnnnnnnnnnnnnnnnnnnnnnnnnnnnnnnnnnnnnnnncagcaccctatctcagtgcatccatgctgctgccgcgctgctctaccccttcagctgggcgcacacctacatccctgttgtccctgagagccttctggccaccgtctgctgccccacccccttcatggttggagtacaaatgcgcttccagcaggaggtcatggacagccctatggaagagg

SEQ ID NO: 29463 - DNA, 395 bp, Macaca Mulatta
tttttatgatctgtttagtgcttattattttccaataaatatgcttcaaaccatgagtacactattaggccctacaactttgttttccttatattttattagatgatttgcttcctataactgatcttgttttgttctttttgctaatatttgtatctcaaaattctttaattaaaaaagtcaatatttatcatatgtaaattaaatgtgaatacattctcattgcaaaaaaactacatcttataaataaggctaacccttagaacactatctgcagtcctgtcctcaccccagcagcgactgctgtttaccactacgctggtgaattgtagtagggacaaacaatgtaaatattgaagagaaatggcctgactaagtaaaatatgatgtagtca

SEQ ID NO: 29464 - DNA, 1009 bp, Macaca Mulatta
  misc_feature (1)...(1009): n = A,T,C or G
ggcacaagtgatccttatgtgaaatttaagctgaatgggaagacgctgtacaaaagtaaagtcatatataagaacttgaacccagtatgggatgagatagtggtattgccaatacaaagccttgatcaaaagctacgtgtgaaggtnnnnnnnnnnnnnnnnnnnnnnnnnnnnnnnnnnnnnnnnnnnnnnnnnnnnnnnnnnnnnnnnnnnnnnnnnnnnnnnnnnnnnnnnnnnnnnnnnnnnnnnnnnnnnnnnnnnnnnnnnnnnnnnnnnnnnnnnnnnnnnnnnnnnnnnnnnnnnnnnnnnnnnnnnnnnnnnnnnnnnnnnnnnnnnnnnnnnnnnnnnnnnnnnnnnnnnnnnnnnnnnnnnnnnnnnnnnnnnnnnnnnnnnnnnnnnnnnnnnnnnnnnnnnnnnnnnnnnnnnnnnnnnnnnnnnnnnnnnnnnnnnnnnnnnnnnnnnnnnnnnnnnnnnnnnnnnnnnnnnnnnnnnnnnnnnnnnnnnnnnnnnnnnnnnnnnnnnnnnnnnnnnnnnnnnnnnnnnnnnnnnnnnnnnnnnnnnnnnnnnnnnnnnnnnnnnnnnnnnnnnnnnnnnnnnnnnnnnnnnnnnnnnnnnnnnnnnnnnnnnnnnnnnnnnnnnnnnnnnnnnnnnnnnnnnnnnnnnnnnnnnnnnnnnnnnnnnnnnnnnnnnnnnnnnnnnnnnnnnnnnnnnnnnnnnnnnnnnnnnnnnnnnnnnnnnnnnnnnnnnnnnnnnnnnnnnnnnnnnnnnnnnnnnnnnnnnnnnnnnnnnnnnnnnnnnnnnnnnnnnnnnnnnnnaactccctgaaagatatgaaagacgtcggcattttacaagtgaaggttttaaaggcagcagatctcttagcggcagatttctcagnnnccagggaagagtgacccattttgcttgctggagttaggcaatgaccgacttcagacgcataccgtctacaaaaacctcaaccctgaatggaacaaagtttttacat

SEQ ID NO: 29465 - DNA, 489 bp, Macaca Mulatta
  misc_feature (1)...(489): n = A,T,C or G
accaatccaaaatgctggctttaaaatgtccctcttccaatggaaagcccaaccatgcagacatcttgctcataaacttacagtatgtttccgaagtggaaataattaatgaccgaacagaaacccctccttcccctagctgcactcaatngttagtaagcttgccagcaaagcacggacagagaaggaggaaaagctgagtcaggcctatgcaatcagtgctggtgtctctctagagggccagcagctcttctagaccaatcacaagaccattaaagactgtaaatggcaagaaaaaaacatcgtagtcatggaagaagttgttattacacccccatattatgtggaaaactgtaaatgcaaagaggggcgtgcactgagccatgtacgcaaaatagttgaaaaacattttagagacgtggaaagccaaaagatactgcaacgttcacaagcccagcaaccacagaaggaggctgccctgtcatcctg

SEQ ID NO: 29466 - DNA, 238 bp, Macaca Mulatta
tgccccgcctgctgcggtggccccagctagggggcggagtgaaagtggtcttagggcgggtatgggactagccggcgtgtgcgtcctgagacgctcagcgggctatatactcggtggggccgccggtcagtctgtggcagcgacagcagcaacaagacggcgaagtgaaggagggtgggcgtctggcggggtccgcagtttcaacagagccgctgcagccatggccccgatcaaggtg

SEQ ID NO: 29467 - DNA, 2576 bp, Macaca Mulatta
  misc_feature (1)...(2576): n = A,T,C or G
cgggactgtccagtgggagcaggcgggccggccagcgcagacctggtggtgcacgggcgccgcactgcacggttcagcgaggggtagagcggagccgcagccccacgcgcagcccaggacccactcgccaccgccgcttccgcagcacccatggggaccacgagactttaaaggagtttggggtttcgggagcagggaaatcacgnnnnnnnnnnnnnnnnnnnnnnnnnnnnnnnnnnnnnnnnnnnnnnnnnnnnnnnnnnnnnnnnnnnnnnnnnnnnnnnnnnnnnnnnnnnnnnnnnnnnnnnnnnnnnnnnnnnnnnnnnnnnnnnnnnnnnnnnnnnnnnnnnnnnnnnnnnnnnnnnnnnnnnnnnnnnnnnnnnnnnnnnnnnnnnnnnnnnnnnnnnnnnnnnnnnnnnnnnnnnnnnnnnnnnnnnnnnnnnnnnnnnnnnnnnnnnnnnnnnnnnnnnnnnnnnnnnnnnnnnnnnnnnnnnnnnnnnnnnnnnnnnnnnnnnnnnnnnnnnnnnnnnnnnnnnnnnnnnnnnnnnnnnnnnnnnnnnnnnnnnnnnnnnnnnnnnnnnnnnnnnnnnnnnnnnnnnnnnnnnnnnnnnnnnnnnnnnnnnnnnnnnnnnnnnnnnnnnnnnnnnnnnnnnnnnnnnnnnnnnnnnnnnnnnnnnnnnnnnnnnnnnnnnnnnnnnnnnnnnnnnnnnnnnnnnnnnnnnnnnnnnnnnnnnnnnnnnnnnnnnnnnnnnnnnnnnnnnnnnnnnnnnnnnnnnnnnnnnnnnnnnnnnnnnnnnnnnnnnnnnnnnnnnnnnnnnnnnnnnnnnnnnnnnnnnnnnnnnnnnnnnnnnnnnnnnnnnnnnnnnnnnnnnnnnnnnnnnnnnnnnnnnnnnnnnnnnnnnnnnnnnnnnnnnnnnnnnnnnnnnnnnnnnnnnnnnnnnnnnnnnnnnnnnnnnnnnnnnnnnnnnnnnnnnnnnnnnnnnnnnnnnnnnnnnnnnnnnnnnnnnnnnnnnnnnnnnnnnnnnnnnnnnnnnnnnnnnnnnnnnnnnnnnnnnnnnnnnnnnnnnnnnnnnnnnnnnnnnnnnnnnnnnnnnnnnnnnnnnnnnnnnnnnnnnnnnnnnnnnnnnnnnnnnnnnnnnnnnnnnnnnnnnnnnnnnnnnnnnnnnnnnnnnnnnnnnnnnnnnnnnnnnnnnnnnnnnnnnnnnnnnnnnnnnnnnnnnnnnnnnnnnnnnnnnnnnnnnnnnnnnnnnnnnnnnnnnnnnnnnnnnnnnnnnnnnnnnnnnnnnnnnnnnnnnnnnnnnnnnnnnnnnnnnnnnnnnnnnnnnnnnnnnnnnnnnnnnnnnnnnnnnnnnnnnnnnnnnnnnnnnnnnnnnnnnnnnnnnnnnnnnnnnnnnnnnnnnnnnnnnnnnnnnnnnnnnnnnnnnnnnnnnnnnnnnnnnnnnnnnnnnnnnnnnnnnnnnnnnnnnnnnnnnnnnnnnnnnnnnnnnnnnnnnnnnnnnnnnnnnnnnnnnnnnnnnnnnnnnnnnnnnnnnnnnnnnnnnnnnnnnnnnnnnnnnnnnnnnnnnnnnnnnnnnnnnnnnnnnnnnnnnnnnnnnnnnnnnnnnnnnnnnnnnnnnnnnnnnnnnnnnnnnnnnnnnnnnnnnnnnnnnnnnnnnnnnnnnnnnnnnnnnnnnnnnnnnnnnnnnnnnnnnnnnnnnnnnnnnnnnnnnnnnnnnnnnnnnnnnnnnnnnnnnnnnnnnnnnnnnnnnnnnnnnnnnnnnnnnnnnnnnnnnnnnnnnnnnnnnnnnnnnnnnnnnnnnnnnnnnnnnnnnnnnnnnnnnnnnnnnnnnnnnnnnnnnnnnnnnnnnnnnnnnnnnnnnnnnnnnnnnnnnnnnnnnnnnnnnnnnnnnnnnnnnnnnnnnnnnnnnnnnnnnnnnnnnnnnnnnnnnnnnnnnnnnnnnnnnnnnnnnnnnnnnnnnnnnnnnnnnnnnnnnnnnnnnnnnnnnnnnnnnnnnnnnnnnnnnnnnnnnnnnnnnnnnnnnnnnnnnnnnnnnnnnnnnnnnnnnnnnnnnnnnnnnnnnnnnnnnnnnnnnnnnnnnnnnnnnnnnnnnnnnnnnnnnnnnnnnnnnnnnnnnnnnnnnnnnnnnnnnnnnnnnnnnnnnnnnnnnnnnnnnnnnnnnnnnnnnnnnnnnnnnnnnnnnnnnnnnnnnnnnnnnnnnnnnnnnnnnnnnnnnnnnnnnnnnnnnnnnnnnnnnnnnnnnnnnnnnnnnnnnnnnnnnnnnnnnnnnnnnnnnnnnnnnnnnnnnnnnnnnnnnnnnnnnnnnnnnnnnnnnnnnnnnnnnnnnnnnnnnnnnnnnnnnnnnnnnnnnnnnnnnnnnnnnnnnnnnnnnnnnnnnnnnnnnnnnnnnnnnnnnnnnnnnnnnnnnntaagaattctgtttttgaatattgttaattttttggctttcaacagcagccctagtaatggtggagttgttaattaatgtgtatattgtactgaatntctgtcagttaaggggttcactgctttggtggaaattggtggaaattgctagcaggttccatgatgtttattt

SEQ ID NO: 29468 - DNA, 325 bp, Macaca Mulatta
  misc_feature (1)...(325): n = A,T,C or G
caggaaaggtatgaacccgaagttcaatatcagatgatcttaaatggagaagaaatcattctctccctacaaaaatccaannntcctggggccagactatactgaaacactgtactcacccagaggagaggaaatcaccacgaagcctgagaacatggnnnnnnnnnnnnnnnnnnnnnnnnnnnnnnnnnnnnnnnnnnnnnnnnnnnnnnnnnnnnnnnnnnnnnnnnnnagaggatacttcacacatcatcatcaaagatacctgataaaacctctgaaaagcacagacgagaaagaacatgccatctttacatctaaccag

SEQ ID NO: 29469 - DNA, 208 bp, Macaca Mulatta
  misc_feature (1)...(208): n = A,T,C or G
gaggcaggacacaatgtgtgagagaagtctgtcccattctctcctgtcccagcaccttagtcacatacccccaggacnnnnnnnnnnnnnnnnnnnnnnnnnnnnnnnnnnnnnnnnnnnnnnnnnnnnnnnnnnnnnnnnnnnnnnnnnnnnnnnnnnnnnnnnnnnnncatttctgtacgataactgcacagcttgcacctgcagg

SEQ ID NO: 29470 - DNA, 371 bp, Macaca Mulatta
  misc_feature (1)...(371): n = A,T,C or G
tgccttcagcttgtgggaaatcctgaagatggccaaagacgactccactgttcgttgcttccagggcctgctgatttttggaaatgtgattattggnnnnnnnnnnnnnnnnnnnnnnnnnnnnnnnnnnnnnnnnnnnnnnnnnnnnnnnnnnnnnnnnnnnnnnnnnnnnnnnnnnnnnnnnnnnnnnnnnnnnnnnnnnnnnnnnnnnnnnnnnnnnnnnnnnnnnnnnnnnnnnnnnnnnnnnnnnnnnnnnnnnnnnnnnnnnnnnnnnnnnnnnnnnnnnnnnnnnnnnngtatttcattctgatgtttatagtatatgcctttgaagtggcatcttgtatcacagcagcaacacaacgagactt

SEQ ID NO: 29471 - DNA, 202 bp, Macaca Mulatta
tccacacctgctctccctcctccaggtgaccccagccatgaggaccctcaccatccttgctgccattctcctcttcaccctgcaggcccaggctgagtcactccaggaaagagctgatgaggttgcaacccaggagcagcctggggaagatgaccaggaccttgctgtttcctttgaagaaagtggactctctactcttaga

SEQ ID NO: 29472 - DNA, 774 bp, Macaca Mulatta
  misc_feature (1)...(774): n = A,T,C or G
ggaatgatgttacagtcctgttctgggccgacctgtcgcactccaggggtttttgaccccagatacaggtttgacccccgcctcatgttcagcaaccgcggcagtgtcaggactcgaagattttccaaacatcttctgtagcgacctcacacagcctctgcagatggatccctgcacgcctctttctgatgaagtgattgtagtaggtgtctgtagctagtcttcaagaccacacctggaagagtttctggactggctttaagtcccgtttgaaaaagcagcccagtcggctgacttcctcgtgcaatgtgttaaactgtgaactctgcccatgtgtcaggagtggctgtctctggtctcttccttcagctgataaggacactcctgaggtctttgctctcaccatattctttttgtcctggggccacagttcttgattattcctcatgtggttaaagtctgaatttgtaaatccattcagataaatggcagtactttaggggnnnnnnnnnnnnnnnnnnnnnnnnnnnnnnnnnnnnnnnnnnnnnnnnnnnnnnnnnnnnngatacacacacagatacacagatacaccttttgatatataagcttgacctaaaatcaaaggacctgtgtagcatttcagattgagcacttcactatcaaaaatagtaacatcacatggcttgaagagtaaccatcagagctgaatcattcgagtaaagaaccagtaccattgtgatagaagaagtagagatccattttttttatgatgtt

SEQ ID NO: 29473 - DNA, 529 bp, Macaca Mulatta
cttctatctctgtgtggcttcactgaagatcagcccattgactctgtctccttctctctacaggccgtttttactatctgatccaccccaccaaactgacctatgatgaagcggtacaagcttgtctcaatgatggtgctcagattgcaagagtgggccagatatttgctgcctggaaacttcttggatatgaccgctgtgatgcgggctggttggcggatggcagcgtccgctaccctatctctaggccaagaaggcgctgcagtcctactgaggctgcagtgcgcttcgtgggtttcccagataaaaagcataagctgtatggtgtctactgcttcagagcatacaactgaatgtgcccctagagcacatcagttttaaagtcataaagaacatgtgaaaggtgttttttttttccaatatgaactcatgcaagttaccaaaactgtgattacccttttttacttactgtaaagagtcattttcataaagatcaattcattgatttgttttttgtaaagctatcatt

SEQ ID NO: 29474 - DNA, 1039 bp, Macaca Mulatta
  misc_feature (1)...(1039): n = A,T,C or G
gtggtaagcattgtctcaaaattatcagccacagccagaactgtgtacctactacatttcagccctagcctaaaaatgtacaatatgtgaaccagcttgcctgggcttctgtgtggttgttgcagatagaagaggcagcacttgtcttccttggagtaaatgatattatcagggaaatgggataaaaggacagcanataaaaggacagcaatgaacattagagtcattcagcagcttcccatccatcttccttttactacacactggaatgcagtgtggctccaaagagaaacaaacaccttgtttctgggaagttagcaagacctttggctaccattttatttcctcttcaaagctcatttaattcaatggcttatctcctggccctaagagaataacttagctcaaaacaaaggcaactgctgcttattttgctcatgatttgtaagcctgactgccgccctgctgcctgcctgcaacacatctcttggttctggaccatgcctagtaaacattctgggtaaatacaggacatttcctggagactctgctattggcctgccgcatgatagatgttttgtgttaagggataagacagtatttataaagatacctactctttggaatgttgcaaagtaagagaggtttaagggaaagaaattgcatagctaaagttatgaaaagctagctggatcattactacagtgnnnnnnnnnnnncttttcttggttgttgttttagggcctccatcctttatagatgatttataactgagagtgtcttatttacccaagtggctttaacatttccgttttaaaataaagccaactagatccaaaaatcatctgtgatatggaaaaagttggatgcacatttgaatgtatgtcattattacaactacgtaaaaggaaaagtccagggtaagaatcctggtgagaaatacatgacaatgggcaccattctttcttgcatttgtgggtattttctctgtgctttttcttcaaggccattactcactttttatgatgctggattattt

SEQ ID NO: 29475 - DNA, 293 bp, Macaca Mulatta
ggtttcttctgcataacgatttcgtttgtgggaatgagattgttacagggtcttatgaactgcttactgtagtgtgggaaggtaagtaaccagaattgagtttatagttaatataccttcaagtgttgcattgcgcaggaaagactgccttattcagattttcgtgaatgtttgggaaaagtgaggttttcagaattctgttcatggcattgcttaaagaagattagagcatttaaagaggtaacattgacccttatctcaggaacatttgtcttaatggatgctatctttgc

SEQ ID NO: 29476 - DNA, 1536 bp, Macaca Mulatta
  misc_feature (1)...(1536): n = A,T,C or G
gcaaactcagactgtcacagtgaacccaatcaggaggaggtcttcttcaaggatgtctctgngcctaaaccccagccctacgtgatgcctcccccaccacagctgcactataatggacattatacagaaccatatgcttcttcccaagnnnnnnnnnnnnnnnnnnnnnnnnnnnnnnnnnnnnnnnnnnnnnnnnnnnnnnnnnnnnnnnnnnnnnnnnnnnnnnnnnnnnnnnnnnnnnnnnnnnnnnnnnnnnnnnnnnnnnnnnnnnnnnnnnnnnnnnnnnnnnnnnnnnnnnnnnnnnnnnnnnnnnnnnnnnnnnnnnnnnnnnnnnnnnnnnnnnnnnnnnnnnnnnnnnnnnnnnnnnnnnnnnnnnnnnnnnnnnnnnnnnnnnnnnnnnnnnnnnnnnnnnnnnnnnnnnnnnnnnnnnnnnnnnnnnnnnnnnnnnnnnnnnnnnnnnnnnnnnnnnnnnnnnnnnnnnnnnnnnnnnnnnnnnnnnnnnnnnnnnnnnnnnnnnnnnnnnnnnnnnnnnnnnnnnnnnnnnnnnnnnnnnnnnnnnnnnnnnnnnnnnnnnnnnnnnnnnnnnnnnnnnnnnnnnnnnnnnnnnnnnnnnnnnnnnnnnnnnnnnnnnnnnnnnnnnnnnnnnnnnnnnnnnnnnnnnnnnnnnnnnnnnnnnnnnnnnnnnnnnnnnnnnnnnnnnnnnnnnnnnnnnnnnnnnnnnnnnnnnnnnnnnnnnnnnnnnnnnnnnnnnnnnnnnnnnnnnnnnnnnnnnnnnnnnnnnnnnngtgtaaaattctggaacaacgattagaacaaggaatggtattcacagaatatgaaagaattcttaagaaacggctagttgatggggagtgctcaacagcacgactccctgaaaatgcagaaagaaatcgattccaagatgttcttccttatgacaatgcgagagtggagttggtcccaactaaagaaaacaacactggttacatcaatgcatcacatattaaggtnnnnnnnnnnnnnnnnnnnnnnnnnnnnnnnnnnnnnnnnnnnnnnnnnnnnnnnnnnnnnnnnnnnnnnnnnnnnnnnnnnnnnnnnnnnnnnnnnnnnnnnnnnnnnnnnnnnnnnnnnnnnnaggagggtggaagggagaagagctttaggtattggccacgacttggttccaggcacaacactgtcacctatggaaggtttaagatcacgacccgcttccgcacagactctggctgctatgccaccacgggcctgaagatgaagcacctccttactgggcaagagaggaccgtctggcacctccagtacacagactggcctgagcatggctgtccagaagacctcaagggatttttatnntatcttgaagagatccagtctgttcgacgccatacaaatagcacaagtgatccccaaagcccaaaccctccgttgctggtccactgcagtgctggggtaggaaggactggcgtggttattttgtcggagatcatgatcgcctgcctggaacacaatgaggtg

SEQ ID NO: 29477 - DNA, 2792 bp, Macaca Mulatta
  misc_feature (1)...(2792): n = A,T,C or G
ttctgctaacagactccgagttcagtatgcaggagcctatggtgcctgccaagctggggacccaggcagagaaggaccggcggctaaagaagaannnnnnnnnnnnnnnnnnnnnnnnnnnnnnnnnnnnnnnnnnnnnnnnnnnnnnnnnnnnnnnnnnnnnnnnnnnnnnnnnnnnnnnnnnnnnnnnnnnnnnnnnnnnnnnnnnnnnnnnnnnnnnnnnnnnnnnnnnnnnnnnnnnnnnnnnnnnnnnnnnnnnnnnnnnnnnnnnnnnnnnnnnnnnnnnnnnnnnnnnnnnnnnnnnnnnnnnnnnnnnnnnnnnnnnnnnnnnnnnnnnnnnnnnnnnnnnnnnnnnnnnnnnnnnnnnnnnnnnnnnnnnnnnnnnnnnnnnnnnnnnnnnnnnnnnnnnnnnnnnnnnnnnnnnnnnnnnnnnnnnnnnnnnnnnnnnnnnnnnnnnnnnnnnnnnnnnnnnnnnnnnnnnnnnnnnnnnnnnnnnnnnnnnnnnnnnnnnnnnnnnnnnnnnnnnnnnnnnnnnnnnnnnnnnnnnnnnnnnnnnnnnnnnnnnnnnnnnnnnnnnnnnnnnnnnnnnnnnnnnnnnnnnnnnnnnnnnnnnnnnnnnnnnnnnnnnnnnnnnnnnnnnnnnnnnnnnnnnnnnnnnnnnnnnnnnnnnnnnnnnnnnnnnnnnnnnnnnnnnnnnnnnnnnnnnnnnnnnnnnnnnnnnnnnnnnnnnnnnnnnnnnnnnnnnnnnnnnnnnnnnnnnnnnnnnnnnnnnnnnnnnnnnnnnnnnnnnnnnnnnnnnnnnnnnnnnnnnnnnnnnnnnnnnnnnnnnnnnnnnnnnnnnnnnnnnnnnnnnnnnnnnnnnnnnnnnnnnnnnnnnnnnnnnnnnnnnnnnnnnnnnnnnnnnnnnnnnnnnnnnnnnnnnnnnnnnnnnnnnnnnnnnnnnnnnnnnnnnnnnnnnnnnnnnnnnnnnnnnnnnnnnnnnnnnnnnnnnnnnnnnnnnnnnnnnnnnnnnnnnnnnnnnnnnnnnnnnnnnnnnnnnnnnnnnnnnnnnnnnnnnnnnnnnnnnnnnnnnnnnnnnnnnnnnnnnnnnnnnnnnnnnnnnnnnnnnnnnnnnnnnnnnnnnnnnnnnnnnnnnnnnnnnnnnnnnnnnnnnnnnnnnnnnnnnnnnnnnnnnnnnnnnnnnnnnnnnnnnnnnnnnnnnnnnnnnnnnnnnnnnnnnnnnnnnnnnnnnnnnnnnnnnnnnnnnnnnnnnnnnnnnnnnnnnnnnnnnnnnnnnnnnnnnnnnnnnnnnnnnnnnnnnnnnnnnnnnnnnnnnnnnnnnnnnnnnnnnnnnnnnnnnnnnnnnnnnnnnnnnnnnnnnnnnnnnnnnnnnnnnnnnnnnnnnnnnnnnnnnnnnnnnnnnnnnnnnnnnnnnnnnnnnnnnnnnnnnnnnnnnnnnnnnnnnnnnnnnnnnnnnnnnnnnnnnnnnnnnnnnnnnnnnnnnnnnnnnnnnnnnnnnnnnnnnnnnnnnnnnnnnnnnnnnnnnnnnnnnnnnnnnnnnnnnnnnnnnnnnnnnnnnnnnnnnnnnnnnnnnnnnnnnnnnnnnnnnnnnnnnnnnnnnnnnnnnnnnnnnnnnnnnnnnnnnnnnnnnnnnnnnnnnnnnnnnnnnnnnnnnnnnnnnnnnnnnnnnnnnnnnnnnnnnnnnnnnnnnnnnnnnnnnnnnnnnnnnnnnnnnnnnnnnnnnnnnnnnnnnnnnnnnnnnnnnnnnnnnnnnnnnnnnnnnnnnnnnnnnnnnnnnnnnnnnnnnnnnnnnnnnnnnnnnnnnnnnnnnnnnnnnnnnnnnnnnnnnnnnnnnnnnnnnnnnnnnnnnnnnnnnnnnnnnnnnnnnnnnnnnnnnnnnnnnnnnnnnnnnnnnnnnnnnnnnnnnnnnnnnnnnnnnnnnnnnnnnnnnnnnnnnnnnnnnnnnnnnnnnnnnnnnnnnnnnnnnnnnnnnnnnnnnnnnnnnnnnnnnnnnnnnnnnnnnnnnnnnnnnnnnnnnnnnnnnnnnnnnnnnnnnnnnnngcagggggaatgtcccctgccccaaccatcgggtggagcttctgctgggctgtggggaagggaggttgtgtggatcttgactctggggcagaacagatctaaccatgcattgctagctctgctcccagcatccctttcccttctctcctcctctgcctcactttagtaatcccagccctataaaaatgaacatgatgggcggatggaatatacattgaccctaaagtcaagtttggggaaaaggcagactgaggcctcctttctctgacctcccaggaagaaaatagtttctcctacagtgattcatgtcccagattcaggaaaaccaatgttggtgaagtcagccactctcctgcttgtccccacatcacctaaccctcatccagagctcttttggtgtatagggactgcctcctcctggaattcctaagatccacccagcttccaccattttcattgctttccccagcagcatggtgggaacctgagctgagggatacaggtcctgttttggtaggaatattattcccaagaaacaccccctcctcacctactctctcatcctacctaggtgcctgaaaatgttcaagacttatgttcagggtgggatgatggaacctagggcttcatcaaagtgagaggaaaggaaaagcatctggcacgtgtttcttggagaggggccattgaagggccatcctgcaggtggctggagcagctgcattgcttaatggtcaccttgagttctgagcagg

SEQ ID NO: 29478 - DNA, 4478 bp, Macaca Mulatta
  misc_feature (1)...(4478): n = A,T,C or G
aaagaagtaaaaggcctactgtacctcatgaagaagactcttcagatgatattgctgnnnnnnnnnnnnnnnnnnnnnnnnnnnnnnnnnnnnnnnnnnnnnnnnnnnnnnnnnnnnnnnnnnnnnnnnnnnnnnnnnnnnnnnnnnnnnnnnnnnnnnnnnnnnnnnnnnnnnnnnnnnnnnnnnnnnnnnnnnnnnnnnnnnnnnnnnnnnnnnnnnnnnnnnnncagggatgtggtaaaaactcagaaagccagcattcactgaagcacttcaagaattccagaatagagccccattgtatcataattaatctgagcacatggattatatggtnnnnnnnnnnnnnnnnnnnnnnnnnnnnnnnnnnnnnnnnnnnnnnnnnnnnnnnnnnnnnnnnnnnnnnnnnnnnnnnnnnnnnnnnnnnnnnnnnnnnnnnnnnnnnnnnnnnnnnnnnnnnnnnnnnnnnnnnnnnnnnnnnnnnnnnnnnnnnnnnnnnnnnnnnnnnnnnnnnnnnnnnnnnnnnnnnnnnnnnnnnnnnnnnnnnnnnnnnnnnnnnnnnnnnnnnnnnnnnnnnnnnnnnnnnnnnnnnnnnnnnnnnnnnnnnnnnnnnnnnnnnnnnnnnnnnnnnnnnnnnnnnnnnnnnnnnnnnnnnnnnnnnnnnnnnnnnnnnnnnnnnnnnnnnnnnnnnnnnnnnnnnnnnnnnnnnnnnnnnnnnnnnnnnnnnnnnnnnnnnnnnnnnnnnnnnnnnnnnnnnnnnnnnnnnnnnnnnnnnnnnnnnnnnnnnnnnnnnnnnnnnnnnnnnnnnnnnnnnnnnnnnnnnnnnnnnnnnnnnnnnnnnnnnnnnnnnnnnnnnnnnnnnnnnnnnnnnnnnnnnnnnnnnnnnnnagcgaatacaagctagcattctaaaagcatttaacaacccaactactaaaactgctgatgatgaaactagnnnnnnnnnnnnnnnnnnnnnnnnnnnnnnnnnnnnnnnnnnnnnnnnnnnnnnnnnnnnnnnnnnnnnnnnnnnnnnnnnnnnnnnnnnnnnnnnnnnnnnnnnnnnnnnnnnnnnnnnnnnnnnnnnnnnnnnnnnnnnnnnnnnnnnnnnnnnnnnnnnnnnnnnnnnnnnnnnnnnnnnnnnnnnnnnnnnnnnnnnnnnnnnnnnnnnnnnnnnnnnnnnnnnnnnnnnnnnnnnnnnnnnnnnnnnnnnnnnnnnnnnnnnnnnnnnnnnnnnnnnnnnnnnnnnnnnnnnnnnnnnnnnnnnnnnnnnnnnnnnnnnnnnnnnnnnnnnnnnnnnnnnnnnnnnnnnnnnnnnnnnnnnnnnnnnnnnnnnnnnnnnnnnnnnnnnnnnnnnnnnnnnnnnnnnnnnnnnnnnnnnnnnnnnnnnnnnnnnnnnnnnnnnnnnnnnnnnnnnnnnnnnnnnnnnnnnnnnnnnnnnnnnnnnnnnnnnnnnnnnnnnnnnnnnnnnnnnnnnnnnnnnnnnnnnnnnnnnnnnnnnnnnnnnnnnnnnnnnnnnnnnnnnnnnnnnnnnnnnnnnnnnnnnnnnnnnnnnnnnnnnnnnnnnnnnnnnnnnnnnnnnnnnnnnnnnnnnnnnnnnnnnnnnnnnnnnnnnnnnnnnnnnnnnnnnnnnnnnnnnnnnnnnnnnnnnnnnnnnnnnnnnnnnnnnnnnnnnnnnnnnnnnnnnnnnnnnnnnnnnnnnnnnnnnnnnnnnnnnnnnnnnnnnnnnnnnnnnnnnnnnnnnnnnnnnnnnnnnnnnnnnnnnnnnnnnnnnnnnnnnnnnnnnnnnnnnnnnnnnnnnnnnnnnnnnnnnnnnnnnnnnnnnnnnnnnnnnnnnnnnnnnnnnnnnnnnnnnnnnnnnnnnnnnnnnnnnnnnnnnnnnnnnnnnnnnnnnnnnnnnnnnnnnnnnnnnnnnnnnnnnnnnnnnnnnnnnnnnnnnnnnnnnnnnnnnnnnnnnnnnnnnnnnnnnnnnnnnnnnnnnnnnnnnnnnnnnnnnnnnnnnnnnnnnnnnnnnnnnnnnnnnnnnnnnnnnnnnnnnnnnnnnnnnnnnnnnnnnnnnnnnnnnnnnnnnnnnnnnnnnnnnnnnnnnnnnnnnnnnnnnnnnnnnnnnnnnnnnnnnnnnnnnnnnnnnnnnnnnnnnnnnnnnnnnnnnnnnnnnnnnnnnnnnnnnnnnnnnnnnnnnnnnnnnnnnnnnnnnnnnnnnnnnnnnnnnnnnnnnnnnnnnnnnnnnnnnnnnnnnnnnnnnnnnnnnnnnnnnnnnnggtttgaaagaggctgatagtgaatcagcaggccagtgggtccatgttagtgacacttacgtacaggtggttccagaatcaagagcacttagtgcacaagcctaccttcttttctatgaaagagtattataactattaatggtaatgattatttaggtcatttgtttttgaatgctgcagtgataactataatatataacgtgcctttgtagtcttccctcttctgtaggaaaagcatgttcatcaaatagtcctgaacttttccaacattttggtgaacccttttaaagtaaatttactcaatgctttaaaattcatagtcttaaaataaatgtgaattttgtttccaggtatttattctgggttacaaaaacctcccagaatttatagtaggaaaggaaacccctttatgatgtggctcattattacaagcattcagaaatgatgctggctaagtcaaatcattccttaagacagtgtttcctaaatgtaataccaccttcctgaactctcacatattctgtatcatggttattttttaaaaaatatttttagccttttttaaccttagtcttgttttgagcaatcatattccatgttttatgtgcttttatattttttataataaatatnnnnnnnnnnnnnnnnnnnnnnnnnnnnnnnnnnnnnnnnnnnnnnnnnnnnnnnnnnnnnnnnnnnnnnnnnnnnnnnnnnnnnnnnnnnnnnnnnnnnnnnnnnnnnnnnnnnnnnnnnnnnnnnnnnnnnnnnnnnnnnnnnnnnnnnnnnnnnnnnnnnnnnnnnnnnnnnnnnnnnnnnnnnnnnnnnnnnnnnnnnnnnnnnnnnnnnnnnnnnnnnnnnnnnnnnnnnnnnnnnnnnnnnnnnnnnnnnnnnnnnnnnnnnnnnnnnnnnnnnnnnnnnnnnnnnnnnnnnnnnnnnnnnnnnnnnnnnnnnnnnnnnnnnnnnnnnnnnnnnnnnnnnnnnnnnnnnnnnnnnnnnnnnnnnnnnnnnnnnnnnnnnnnnnnnnnnnnnnnnnnnnnnnnnnnnnnnnnnnnnnnnnnnnnnnnnnnnnnnnnnnnnnnnnnnnnnnnnnnnnnnnnnnnnnnnnnnnnnnnnnnnnnnnnnnnnnnnnnnnnnnnnnnnnnnnnnnnnnnnnnnnnnnnnnnnnnnnnnnnnnnnnnnnnnnnnnnnnnnnnnnnnnnnnnnnnnnnnnnnnnnnnnnnttttaatgggacattaagctggcagtttttattttttaaataaataatagcaaaaatatcatttttccctctagaatacaaattatttagctgtcaaaacttggcatgaagaatattactattacttaggcttaaatatcaaaaaataatggctacttcagtgtcatattgttgaaacagaaacaaaactgcatgattcaagcatcctaatcattagtgccagtgaatgatagtgcaggcaagtgccgggtaaatgcctagtcccacttcattctcctcctgggaaagaaggatagtggctgcagataatgtatggaaatatttaatcaagactgactgtcttaaacacataagcatatataatgttatcaaggttaccagtgctgccttttgatatatggatgaacataactgattaaagatggtaatagtacacaaaatgcaaagcttaaaaatgtcattgcataaattctatttttaagatgttgaaatgttaatagtagtgtttttcttgatttttaacagtgaaataatcaagaaatgtatctttaagttaatctgcaaagtcaagctgtgttctgtaaaaggtattttacagcattttccgtttaactgtaatccgttatcattggagatctcagtaccagagcagtgaattttttgaaaaatattgaatgtctttattcaagtcagctatcttggtaagagcagttttcacctcccccccaactgcccaaatgtaaatataggtcacctaatttttcttacagaaaacatacttttaagaggcatgcacttttcatcagatggtcacttgtttcttgtttcaaagataaatatttggatagatacccatacttgctatgtcagtcacagtgctgacgctattttaacatcatttaaaatggaaagatctacgtatatttttgacattattccagaagtaacatgcaagtaagatatttttattttcattttattcatgttaaatgagcta

SEQ ID NO: 29479 - DNA, 367 bp, Macaca Mulatta
  misc_feature (1)...(367): n = A,T,C or G
gatttggaatgccctgacggataattatgggaatgtgatgcctgtagactggaagtcgtcgcatactaggaccttgcacttgcttactctgaacctctcagaaaaaggggtaagnnnnnnnnnnnnnnnnnnnnnnnnnnnnnnnnnnnnnnnnnnnnnnnnnnnnnnnnnnnnnnnnnnnnnnnnnnnnnnnnnnnnnnnnnnnnnnnnnnnnnnnnnnnnnggttattgaagaaattgaagaaatgatgcaggaatcaccggacccagaagatgatgaaacccctacacagtcagatcggctttcaatgctttcccaggaaattcaaactcttaagaggtctagtaccagcagttatgaagagag

SEQ ID NO: 29480 - DNA, 570 bp, Macaca Mulatta
  misc_feature (1)...(570): n = A,T,C or G
tcacaaggcacttaaagcattgttgaggtcattggtagatcttcaggaagagttgcttttccagtacccagacactagatatctagtagatgggacaaagcccaatgcgggaagnnnnnnnnnnnnnnnnnnnnnnnnnnnnnnnnnnnnnnnnnnnnnnnnnnnnnnnnnnnnnnnnnnnnnnnnnnnnnnnnnnnnnnnnnnnnnnnnnnnnnnnnnnnnnnnnnnnnnnnnnnnnnnnnnnnnnnnnnnnnnnnnnnnnnnnnnnnnnnnnnnnnnnnnnnnnnnnnnnnnnnnnnnnnnnnnnnnnnnnnnnnnnnnnnnnnnnnnnnnnnnnnnnnnnnnnnnnnnnnnnnnnnnnnnnnnnnnnnnnnnnnnnnnnnnnnnnnnnnnnnnnnnnnnnnnnnnnnnnnnnnnnnnnnnnnnnnnnnnnnnnnnnnnnnnnnnnnnnnnnnnnnnnnnnnnnnnnnnnnnnnnnnnnnnnnngagatccttcctcaagctcctgccaatgctcatctgaaggacttggatgaagaaatctttgatgatgatgacttttaccaccag

SEQ ID NO: 29481 - DNA, 863 bp, Macaca Mulatta
  misc_feature (1)...(863): n = A,T,C or G
agccaaacagcaggacggggcagccgccatggagatgcagcccctcaagagtgccgagggcggcgacgctgacgacaggaagaaggccagcatgcacaagaaggagaagtccgtgcttcagggcaagctcaccaagctggctgtgcagattgggaaggcnnnnnnnnnnnnnnnnnnnnnnnnnnnnnnnnnnnnnnnnnnnnnnnnnnnnnnnnnnnnnnnnnnnnnnnnnnnnnnnnnnnnnnnnnnnnnnnnnnnnnnnnnnnnnnnnnnnnnnnnnnnnnagttcttcatcattggcgtgacggtgctggtggtcgccgtgcccgaggggctccctctggccgtcaccatctcattggcctactcagtgaagnnnnnnnnnnnnnnnnnnnnnnnnnnnnnnnnnnnnnnnnnnnnnnnnnnnnnnnnnnnnnnnnnnnnnnnnnnnnnnnnnnnnnnnnnnnnnnnnnnnnnnnnnnnnnnnnnnnnnnnnnnnnnnnnnnnnnnnnnnnnnnnnnnnnnnnnnnnnnnnnnnnnnnnnnnnnnnnnnnnnnnnnnnnnnnnnnnnnnnnnnnnnnnnnnnnnnnnnnnnnnnnnnnnnnnnnnnnnnnnnnngcccccagagaaggagggtgccctgcctcggcaggtgggcaacaagacggagtgcggcctcctgggcttcgtgctggacctgaagcaggactacgagcccgtgcgcagccagatgccagaggagaagctatacaaagtgtacaccttcaactccgtgcgcaagtccatgagcactgtcatcaagctgcccgacgagagcttccgcatgtacagcaagggggcttctgagatcgtgctcaagaagt

SEQ ID NO: 29482 - DNA, 602 bp, Macaca Mulatta
  misc_feature (1)...(602): n = A,T,C or G
ctcatgtaattgcgaaggctaaaggccttgcaattctgtctgtgatcaaagctggcttcctnnnnnnnnnnnnnnnnnnnnnnnnnnnnnnnnnnnnnnnnnnnnnnnnnnnnnnnnnnnnnnnnnnnnnnnnnnnnnnnnnnnnnnnnntggtgggggatttgaaataggaattgaggtannnnaggtatcagacttggtgataattctgaattatgaccgtgctgtggaagcttttgcgaaaggcggaaatctaacccttggagggaacttgactgtggcggtcgggcccttgggaagnnaggaacttggaaggcaacgtggccctgagaagctcggccgccgtcttcacgtactgcaagtcgaggggactcttcgcaggcgtgtctttagaaggcagctgtttgattgaaaggaaagaaactaatagaattttattgtcaagatatccgagcttatgatattttatttggagatacaccgcggcctgctcaagctgaagatctttatgaaattcttgattcctttaccgaaaagtatgaaaatgaaggacaacgaatcaatgcaagaaaagcagcaagggagcagaggaagtcttctgn

SEQ ID NO: 29483 - DNA, 852 bp, Macaca Mulatta
  misc_feature (1)...(852): n = A,T,C or G
agctctgagccctggaggagcagcacggagtgggagagcgtggcgagagaatgaagaaaccaaccgcccgggagaagcatgaggtggcagtgtggcactcggtttagagggcttcggccggcagtggccccatggacagccctgctggcactgggcctgcctggctgggtgttggccgtctcagccacggcggctgctgtggtccccgagcagcatgcctccgtagctggccnnnnnnnnnnnnnnnnnnnnnnnnnnnnnnnnnnnnnnnnnnnnnnnnnnnnnnnnnnnnnnnnnnnnnnnnnnnnnnnnnnnnnnnnnnnnnnnnnnnnnnnnnnnnnnnnnnnnnnnnnnnnnnnnnnnnnnnnnnnnnnnnnnnnnnnnnnnnnnnnnnnnnnnnnnnnnnnnnnnnnnnnnnnnnnnnnnnnnnnnnnnnnnnnnnnnnnnnnnnnnnnnnnnnnnnnnnnnnnnnnnnnnnnnnnnnnnnnnnnnnnnnnnnnnnnnnnnnnnnnnnnnnnnnnnnnnnnnnnnnnnnnnnnnnnnnnnnnnnnnnnnnnnnnnnnnnnnnnnnnnnnnnnnnnnnnnnnnnnnnnnnnnnnnnnnnnnnnnnnnnnnnnnnnnnnnnnnnnnnnnnnnnnnnnnnnnnnnnnnnnnnnnnnnnnnnnnnnnnnnnnnnnnnnnnnnnnnnnnnnnnnnnnnnnnnnnnnnnnnnnnnnnnnnnnnnnnnnnnnnnnnnnnnnnnnnggtcaccgagaccaggaccggtcctctgggctgcagcaactatgacaatctggactcagtcagttctgtcctggtacagagtccggagaacaaagtgcagttacttgg

SEQ ID NO: 29484 - DNA, 465 bp, Macaca Mulatta
tggatccaaccatcccagccctgggtacatcacagacaccaatcaatggacgcgaggagactccttgctacaagcagaccctgagcctcacggtgctgacgtgcatcatttccctcgtggggctgacaggaaacgcggttgtgctctggctcctgggcttccgcatgcgcaggaacgctgtctccacctacatcctcaacctggccgcggtagacttcctcttcctcagcggccacattgtacgttcgccgttacgcctcatcagtatccgccatcccatctccaaaatcgtcaatcctgtgatgacctttccctactttataggcctgagcatgctgagcgccatcagcactgagcgctgcctgtgcgtcctgtggcccatgtggtaccgctgccgccgccccagacacctgtcagtggtcgtgtgtgtcctgctctgggtcctgtccctgctgcggagcatcc

SEQ ID NO: 29485 - DNA, 921 bp, Macaca Mulatta
gggtctttttctttcggcggagcgcggcggcaagatggccgtgcaaatttccaagaagaggaagtttgtcgctgatggcatcttcaaagctgaactgaatgagtttcttactcgggagctggctgaagatggctactctggagtcgaggcgcttttgttgttttccagggcagaaatcatgatcttagccaccatattatttactgttcttggagagaagggccggcggattccggaaccgactgctgcagttcgaaagaggtatggctttacatatggcagtgtagagctttgtgcatgaaaaggtggccaccgaaaggtctgtgtgccattgcaccagtcaggagcctgtgcggtaccaacctccttatggatggcatggctatgggaaaggagactgcatatagcgtggccgcagataaatatatgacagaaggtggggccataaagcatgcgaagcccgtcggtgaaatggggaaaaattcagttgaaaaaatgtgataaagaaccttgaaagattatgagaattggtgttaggcgtatcgccccaccaggaagaaactgaactggtggacgacagtgcgacactcgacggagccgccgatagaccaaaatctataaccgcgtgtggggatagaggaatagagggaggaacaaagcgtgaccggagctgagagaaaaacgggcttggaaagagactaagaccgtcttaggtgagcagaaaaagagggtggaaaatgtgggcgcgcgatgtacggagaacataacagatcagaataaacgcgttgcggcataatacgcgggctcagaagtagatacaacttgtaggggaagggtggagaacatgtgatacaagtagaggcgatagggcatagaacgagagttgcttcgggagaaatgtttgactgagggaccgtcctg

SEQ ID NO: 29486 - DNA, 2980 bp, Macaca Mulatta
  misc_feature (1)...(2980): n = A,T,C or G
tgtatccagagtcaacgacgggctccccggctcggctctccctgcggcagacgggctcccccgggatgatctacagnnnnnnnnnnnnnnnnnnnnnnnnnnnnnnnnnnnnnnnnnnnnnnnnnnnnnnnnnnnnnnnnnnnnnnnnnnnnnnnnnnnnnggaacatgggtgaccttcggaggccagatcaccgatgannnnnnnnnnnnnnnnnnnnnnnnnnnnnnnnnnnnnnnnnnnnnnnnnnnnnnnnnnnnnnnnnnnnnnnnnnnnnnnnnggctgaagtggtactgggaaacatcattaagaagaaaggatggagnnnnnnnnnnnnnnnnnnnnnnnnnnnnnnnnnnnnnnnnnnnnnnnnnnnnnnnnnnnnnnnnnnnnnnnnnnnnnnnnnnnnnnnnnnnnnnnnnnnnnnnnnnnnnnnnnnnnnnnnnnnnnnnnnnnnnnnnnnnnnnnnnnnnnnnnnnnnnnnnnnnnnnnnnnnnnnnnnnnnnnnnnnnnnnnnnnnnnnnnnnnnnnnnnnnnnnnnnnnnnnnnnnnnnnnnnnnnnnnnnnnnnnnnnnnnnnnnnnnnggaggcctactcggtggcccggcagttcaacctgacgccgcccatctgcgagcaggctgagtaccacatgttccagcgcgagaaggtggaggtgcagctgccggagctgttccacaagatagnnnnnnnnnnnnnnnnnnnnnnnnnnnnnnnnnnnnnnnnnnnnnnnnnnnnnnnnnnnnnnnnnnnnnnnnnnnnnnnnnnnnnnnnnnnnnnnnnnnnnnnnnnnnnnnnnnnnnnnnnnnnnnnnnnnnnnnnnnnnnnnnnnnnnnnnnnnnnnnnnnnnnnnnnnnnnnnnnnnnnnnnnnnnnnnnnnnnnnnnnnnnnnnnnnnnnnnnnnnnnnnnnnnnnnnnnnnnnnnnnnnnnnnnnnnnnnnnnnnnnnnnnnnnnnnnnnnnnnnnnnnnnnnnnnnnnnnnnnnnnnnnnnnnnnnnnnnnnnnnnnnnnnnnnnatatccacgagattgatagtattttggccataaaccctacagcaaaaaggactacagatnnnnnnnnnnnnnnnnnnnnnnnnnnnnnnnnnnnnnnnnnnnnnnnnnnnnnnnnnnnnnnnnnnnnnnnnnnnnnnnnnnnnnnnnnnnnnnnnnnnnnnnnnnnnnnnnnnnnnnnnnnnnnnnnnnnnnnnnnnnnnnnnnnnnnnnnnnnnnnnnnnnnnnnnnnnnnnnnnnnnnnnnnnnnnnnnnnnnnnnnnnnnnnnnnnnnnnnnnnnnnnnnnnnnnnnnnnnnnnnnnnnnnnnnnnnnnnnnnnnnnnnnnnnnnnnnnnnnnnnnnnnnnnnnnnnnnnnnnnnnnnnnnnnnnnnnnnnnnnnnnnnnnnnnnnnnnnnnnnnnnnnnnnnnnnnnnnnnnnnnnnnnnnnnnnnnnnnnnnnnnnnnnnnnnnnnnnnnnnnnnnnnnnnnnnnnnnnnnnnnnnnnnnnnnnnnnnnnnnnnnnnnnnnnnnnnnnnnnnnnnnnnnnnnnnnnnnnnnnnnnnnnnnnnnnnnnnnnnnnnnnnnnnnnnnnnnnnnnnnnnnnnnnnnnnnnnnnnnnnnnnnnnnnnnnnnnnnnnnnnnnnnnnnnnnnnnnnnnnnnnnnnnnnnnnnnnnnnnnnnnnnnnnnnnnnnnnnnnnnnnnnnnnnnnnnnnnnnnnnnnnnnnnnnnnnnnnnnnnnnnnnnnnnnnnnnnnnnnnnnnnnnnnnnnnnnnnnnnnnnnnnnnnnnnnnnnnnnnnnnnnnnnnnnnnnnnnnnnnnnnnnnnnnnnnnnnnnnnnnnnnnnnnnnnnnnnnnnnnnnnnnnnnnnnnnnnnnnnnnnnnnnnnnnnnnnnnnnnnnnnnnnnnnnnnnnnnnnnnnnnnnnnnnnnnnnnnnnnnnnnnnnnnnnnnnnnnnnnnnnnnnnnnnnnnnnnnnnnnnnnnnnnnnnnnnnnnnnnnnnnnnnnnnnnnnnnnnnnnnnnnnnnnnnnnnnnnnnnnnnnnnnnnnnnnnnnnnnnnnnnnnnnnnnnnnnnnnnnnnnnnnnnnnnnnnnnnnnnnnnnnnnnnnnnnnnnnnnnnnnnnnnnnnnnnnnnnnnnnnnnnnnnnnnnnnnnnnnnnnnnnnnnnnnnnnnnnnnnnnnnnnnnnnnnnnnnnnnnnnnnnnnnnnnnnnnnnnnnnnnnnnnnnnnnnnnnncccccacaatgtaggaaaagacctcagcgaacctctcccgggaaagatggccggggcttgtggcccctcccactgcccgacacctggaagagactggggagagggcagagagggcaggacaggccagagtgacacccctgtgcagcttgggccggagggctggggatgccaggaaatctgcaggtgcgggggtgtcacctacaggcccaggcctgtgtctcgagcagtacccaggctttgctgactgcgcagggcagggctccacctaagccacccccacccctcgccagctagctccatagggaagcctgtgtctcctgcccccaaggcacaccctcagcgcgagcacctccgttcccactttgcccttggaggagccactattccagaaggctccaccctgctgtccagcaggagcctgctgtccagtcctgggcgggccaaggcctgggaaacgtgtgtaagtcaggaaggccagcagggagaggctggagtgacgcaaggagagggatgcagtttctgctgttcctggcccaccttcatgccgcccctggcgcctagaaccctcgcccctcctcgtagaccaagtcccgggggactccacccagtcctactgcccacttcaccagaagcagccctgtgagtgtggggcgaggaagtcccttcccaacagaggtcccagcctatggccccgggcccaggtgggggtcgcaagcttccttccaggaca

SEQ ID NO: 29487 - DNA, 667 bp, Macaca Mulatta
  misc_feature (1)...(667): n = A,T,C or G
tgggaggaggtggtgagctggttcgtacgcgggtcgaggctgtagncgggattccagagaagatgttaccgagtacttcagtgaattcctcagtgcaggcgaacggagtcttgaattccaggaatgcagcaagacacacagccggagcgaaacgctacaaatatctgagaaggcttttccgctttcggcagatggactttgaatttgctgcctggcagatgctctacctgttcacatccccacagagagtttacagaaattttcattatcgaaaacagacgaaggaccagtgggccagagatgaccctgctttcttggtcctgttaagtatctggctctgtgtgtccactataggatttggctttgtgctggacatgggattctttgagacaataaagcttctcctttgggttgtattcatagattgtgtaggcgttggtcttctgatagcaactttaatgtggttcatctctaacaagtatttagtgaaacgacagagcagagactatgatgtggaatggggctatgcttttgatgtgcatctcaatgctttttatccactcctggtcattttgcattttatccagcttttattcatcaaccatgtaatcctgacagacacgttattggatatttagttggaaacaccttatggttggttgcagtt

SEQ ID NO: 29488 - DNA, 2585 bp, Macaca Mulatta
  misc_feature (1)...(2585): n = A,T,C or G
atgtgtgacttgcggcggccagcggcaggtgggatgatggacttggcctacgtctgtgagtgggagaaatggtccaagagcacccactgcccgtcggtgcccctggcctgcgcctggtctagccgaaatctcatcgccttcaccatggacctgcgcagcgacgaccagnnctgacccgtatgatccacatcctggacacggagcacccctgggacctgcactccatcccctcagaccaccgcgaggccatcacctgcctggagtgggatcagtcagnnnnnnnnnnnnnnnnnnnnnnnnnnnnnnnnnnnnnnnnnnnnnnnnnnnnnnnnnnnnnnnnnnnnnnnnnnnnnnnnnnnnnnnnnnnnnnnnnnnnnnnnnnnnnnnnnnnnnnnnnnnnnnnnnnnnnnnnnnnnnnnnnnnnnnnnnnnnnnnnnnnnnnnnnnnnnnnnnnnnnnnnnnnnnnnnnnnnnnnnnnnnnnnnnnnnnnnnnnnnnnnnnnnnnnnnnnnnnnnnnnnnnnnnnnnnnnnnnnnnnnnnnnnnnnnnnnnnnnnnnnnnnnnnnnnnnnnnnnnnnnnnnnnnnnnnnnnnnnnnnnnnnnnnnnnnnnnnnnnnnnnnnnnnnnnnnnnnnnnnnnnnnnnnnnnnnnnnnnnnnnnnnnnnnnnnnnnnnnnnnnnnnnnnnnnnnnnnnnnnnnnnnnnnnnnnnnnnnnnnnnnnnnnnnnnnnnnnnnnnnnnnnnnnnnnnnnnnnnnnnnnnnnnnnnnnnnnnnnnnnnnnnnnnnnnnnnnnnnnnnnnnnnnnnnnnnnnnnnnnnnnnnnnnnnnnnnnnnnnnnnnnnnnnnnnnnnnnnnnnnnnnnnnnnnnnnnnnnnnnnnnnnnnnnnnnnnnnnnnnnnnnnnnnnnnnnnnnnnnnnnnnnnnnnnnnnnnnnnnnnnnnnnnnnnnnnnnnnnnnnnnnnnnnnnnnnnnnnnnnnnnnnnnnnnnnnnnnnnnnnnnnnnnnnnnnnnnnnnnnnnnnnnnnnnnnnnnnnnnnnnnnnnnnnnnnnnnnnnnnnnnnnnnnnnnnnnnnnnnnnnnnnnnnnnnnnnnnnnnnnnnnnnnnnnnnnnnnnnnnnnnnnnnnnnnnnnnnnnnnnnnnnnnnnnnnnnnnnnnnnnnnnnnnnnnnnnnnnnnnnnnnnnnnnnnnnnnnnnnnnnnnnnnnnnnnnnnnnnnnnnnnnnnnnnnnnnnnnnnnnnnnnnnnnnnnnnnnnnnnnnnnnnnnnnnnnnnnnnnnnnnnnnnnnnnnnnnnnnnnnnnnnnnnnnnnnnnnnnnnnnnnnnnnnnnnnnnnnnnnnnnnnnnnnnnnnnnnnnnnnnnnnnnnnnnnnnnnnnnnnnnnnnnnnnnnnnnnnnnnnnnnnnnnnnnnnnnnnnnnnnnnnnnnnnnnnnnnnnnnnnnnnnnnnnnnnnnnnnnnnnnnnnnnnnnnnnnnnnnnnnnnnnnnnnnnnnnnnnnnnnnnnnnnnnnnnnnnnnnnnnnnnnnnnnnnnnnnnnnnnnnnnnnnnnnnnnnnnnnnnnnnnnnnnnnnnnnnnnnnnnnnnnnnnnnnnnnnnnnnnnnnnnnnnnnnnnnnnnnnnnnnnnnnnnnnnnnnnnnnnnnnnnnnnnnnnnnnnnnnnnnnnnnnnnnnnnnnnnnnnnnnnnnnnnnnnnnnnnnnnnnnnnnnnnnnnnnnnnnnnnnnnnnnnnnnnnnnnnnnnnnnnnnnnnnnnnnnnnnnnnnnnnnnnnnnnnnnnnnnnnnnnnnnnnnnnnnnnnnnnnnnnnnnnnnnnnnnnnnnnnnnnnnnnnnnnnnnnnnnnnnnnnnnnnnnnnnnnnnnnnnnnnnnnnnnnnnnnnnnnnnnnnnnnnnnnnnnnnnnnnnnnnnnnnnnnnnnnnnnnnnnnnnnnnnnnnnnnnnnnnnnnnnnnnnnnnnnnnnnnnnnnnnnnnnnnnnnnnnnnnnnnnnnnnnnnnnnnnnnnnnnnnnnnnnnnnnnnnnnnnnnnnnnnnnnnnnnnnnnnnnnnnnnnnnnnnnnnnnnnnnnnnnnnnnnnnnnnnnnnnnnnnnnnnnnnnnnnnnnnnnnngcacaggtccatgctcggtgtgggtgccattgggatggcagccactcccaggcnnnnnnnnnnnnnnnnnnnnnnnnnnnnnnnnnnnnnnnnnnnnnnnnnnnnnnnnnnnnnnnnnnnnnnnnnnnnnnnnnnnnnnnnnnnnnnnnnnnnnnnnnnnnnnnnnnnnnnnnnnnnnnnnnnnnnnnnnnnnnnnnnnnnnnnnnnnnnnnnnnnnnnnnnnnnnnnnnnnnnnnnnnnnnnnnnnnnnnnnnnnnnnnnnnnnnnnnnnnnnnnnnnnnnnnnnnnnnnnnnnnnnnnnnnnnnnnnnnnnnnnnnnnnnnnnnnnnnnnnnnnnnnnnnnnnnnnnnnnnnncaggtgcggctgcgtcaccatgctcaagtcgcccaacaggaccacagcggtgaagcagtgggaacagcgctggatcaagaactgcctgtgtggcgggctctggtggcgggtgcccctcagctacccctg

SEQ ID NO: 29489 - DNA, 781 bp, Macaca Mulatta
  misc_feature (1)...(781): n = A,T,C or G
ggattctagaggccgaggcggagaatcacttgagtgtaggaggcggaggttgcaggagccatgatcgtgnnnnnnnnnnnnnnnnnnnnnnnnnacagagtgaaactgtctcaaaaaataataacaaagtaaatgaacacatgtgctgctaagagtctgctgtgtggcagagcagaggacagcgtgcttttgtgtgctgttggaagactagctcctcctgtacagcacctctgagcccttgtgcactgccccaccctgccacaggcaccatccagtcctggccatgtgaccacccacagctgactgggcagcaggcacaggccctacccgagcagaccggagttggctagcctgactccagctgaggctgcctatgtacatttctccagataccctttggctaattttgttattactgcacagtggctgctgccattttgtattaaatatattgtgaaacaaacccatctgcttctaaagcagtgattttggggagaagcaatctacttgctgctgcttcctttctggatccagcttgtgtccttggagagtggctgggccaggtcctattcctgcccttcgccctgttatttcctgagggacaggaaaaataaaatcccccctttaggaaagaagtctcagcctcccctttccccaaatctcccagttgaggttttaaaagaaaccaggaagcaagcccggggcccggtgggctccccccctgtaaatccccaccccctttgggaaggcccaggccggccggaattcaaagggtcaggaa

SEQ ID NO: 29490 - DNA, 666 bp, Macaca Mulatta
  misc_feature (1)...(666): n = A,T,C or G
cagatacaaagctgtctggcttatcttcttcatgctgggtctgggaacgctgctcccatggaattttttcatgacggccactcagncagtatttcacaaaccgcctggacatgtcccagaatgtgtccttggtcactgctgaactgagcaaggacgcccaggcgtcagccgcccctgcagcacccttgcctgagcggaactctctcagtgtcatcttcaacaatgtcatgaccctatgtgccatgctgcccctgctgttattcacctacctcaactccttcctgcatnnnnnnnnnnnnnnnnnnnnnnnnnnnnnnnnnnnnnnnnnnnnnnnnnnnnnnnnnnnnnnnnnnnnnnnnnnnnnnnnnnnnnnnnnnnnnnnnnnnnnnnnnnnnnnnnnnnnnnnnnnnnnnnnnnnnnnnnnnnnnnnnnnnnnnnnnnnnnnnnnnnnnnnnnnnnnnnnnnnnnnnnnnnnnnnnnnnnnnnnnnnnnnnnnnnnnnnnnnnnnnnnnnnnnnnnnnnnnnnnnnnnnnnnnnnnnnnnnnnnnnnnnnnnnnnnnnnnnnnngtggctcggagctatcagaaagtgcctttggctactttatcacagcctgtgctgttatcattttgaccatcatctgttacctgggcctgccccgcctgg

SEQ ID NO: 29491 - DNA, 665 bp, Macaca Mulatta
  misc_feature (1)...(665): n = A,T,C or G
gggtggttgctgttattaacaacaatccaaaaatggtaaaatttcttctggagaaaggggctgatgtgaatgcttcagataattatcaaagaacagcccttattcttgctgtcagtggtgaaccaacacgtttagtaaagcttcttcttcagcaaggtgtggaattatcttgccgagatatttgtggattcacagctgaggaatatgcttatttcaatggttttactgtatatccacaattcactgcaagtcatggaaagaagaaacatgttaaatagacaccttattcttggcactgcatgtgactaaaggaagatatggaacccatttctacaatttctttgctgcttccttgaattggaaaaatatattttgaaagaaccattaagtgaactattttaacatttttgctgactacccagttgaagaaaagtttgttaaatggatgggatatttttttccacattagaagacatgaagaaattttaaaagataaacatctatattgtgaaccatcagcncaaaagatataatttgtgtttcacatataggcagaaaaaaatttgtgtcaaatattgaatggaataatatgaataactgtgttagcatgcattaaatattaaataaataaaatacatttcaccacaaatgaaggaaacatatan

SEQ ID NO: 29492 - DNA, 1469 bp, Macaca Mulatta
  misc_feature (1)...(1469): n = A,T,C or G
aaattcaaatagacataagacaagacatactggaaagaaacttttcaaatgtaaaaaatgtgacaaatcgttttgcatgcttttacacctaagtcaacataaaagaattcatattagagagaattcttaccaatgcgaagaatgtgacaaagtctttacgcggttctcaacccttactagacacaagagaattcatactggagagaaacccttcaaatgtaaagaatgtggcaaagcttttaagcactcttcaacccttactacacataagatgattcatactggagagaaaccctacagatgtgaagaatgtggcaaagccttctgccattcctcacaccttactacacataagataattcatactggagagaaaccttacaaatgtgaagaatgtggcaaagcttttaaccaatcctcaaaccttaggaaacataagataattcatactggagagaaactccacaaatgtgaagaatgtggcaaagcttttaaccgatcctcaaaccttactacacataagagaattcacactggagagagaccctacaaatgtgaagaatgtggcaaagcttttaaccgatcctcaaaccttgctaaacataacataattcatactggaaagaaatcttacaaacgtggagaatgtggtaaaacctttaaccagtcctcaactcttactaaacataagaaaattcagcaggacgtggtggctcacgcctgtaatcccagcacattgagaggnnnnnnnnnnnnnnnnnnnnnnnnnnnnnnnnnnnnnnnnnnnnnnnnnnnnnnnnnnnnnnnnnnnnnnnnnnnnnnnnnnnnnnnnnnnnnnnnnnnnnnnnnnnnnnnnnnnnnnnnnnnnnnnnnnnnnnnnnnnnnnnnnnnnnnnnnnnnnnnagcctttaccagtcctgaattcttactaaacataagaaaattcatactgaagaggaaccctatgaatgtgaagaatatggcaaagccttcaacnnnnnnnnnnnnnnnnnnnnnnnnnnnnnnnnnnnnnnnnnnnnnnnnnnnnnnnnnnnnnnnnnnnnnnnnnnnnnnnnnnnngtcctgaattcttactaaacataagaaaattcatactgaagaggaaccctatgaatgtgaagaatatggcaaagccttcaacgaagtcctcaattcttaccagacataaaataattcatgggctgggtgtagtggctcacgcctgtaatcccagcactttgggaggctgagacgggtgaatcacatgaggtcgagtgttcgagaccagcctgaccaacatggtgaaatcccgtctctactaaaaatacaaaattagccaggcgtggtggtgcatgcctgtaatcccagctacttgggaggctgaggcagaagaattgcttgaacccgggaggcagaggttgcagtgagccgagatcgtgccattgcactccagcctgggcaacaagagt

SEQ ID NO: 29493 - DNA, 1709 bp, Macaca Mulatta
  misc_feature (1)...(1709): n = A,T,C or G
agaccccataggtgaccagtgggaagaggaggaaagaggcttcaactacgcagtggacctggtgaagcacatccgaagtgagtttggtgactactttgacctctgtgtggcaggnnnnnnnnnnnnnnnnnnnnnnnnnnnnnnnnnnnnnnnnnnnnnnnnnnnnnnnnnnnnnnnnnnnnnnnnnnnnnnnnnnnnnnnnnnnnnnnnnnnnnnnnnnnnnnnnnnnnnnnnnnnnnnnnnnnnnnnnnnnnnnnnnnnnnnnnnnnnnnnnnnnnnnnnnnnnnnnnnnnnnnnnnnnnnnnnnnnnnnnnnnnnnnnnnnnnnnnnnnnnnnnnnnnnnnnnnnnnnnnnnnnnnnnnnnnnnnnnnnnnnnnnnnnnnnnnnnnnnnnnnnnnnnnnnnnnnnnnnnnnnnnnnnnnnnnnnnnnnnnnnnnnnnnnnnnnnnnnnnnnnnnnnnnnnnnnnnnnnnnnnnnnnnnnnnnnnnnnnnnnnnnnnnnnnnnnnnnnnnnnnnnnnnnnnnnnnnnnnnnnnnnnnnnnnnnnnnnnnnnnnnnnnnnnnnnnnnnnnnnnnnnnnnnnnnnnnnnnnnnnnnnnnnnnnnnnnnnnnnnnnnnnnnnnnnnnnnnnnnnnnnnnnnnnnnnnnnnnnnnnnnnnnnnnnnnnnnnnnnnnnnnnnnnnnnnnnnnnnnnnnnnnnnnnnnnnnnnnnnnnnnnnnnnnnnnnnnnnnnnnnnnnnnnnnnnnnnnnnnnnnnnnnnnnnnnnnnnnnnnnnnnnnnnnnnnnnnnnnnnnnnnnnnnnnnnnnnnnnnnnnnnnnnnnnnnnnnnnnnnnnnnnnnnnnnnnnnnnnnnnnnnnnnnnnnnnnnnnnnnnnnnnnnnnnnnnnnnnnnnnnnnnnnnnnnnnnnnnnnnnnnnnnnnnnnnnnnnnnnnnnnnnnnnnnnnnnnnnnnnnnnnnnnnnnnnnnnnnnnnnnnnnnnnnnnnnnnnnnnnnnnnnnnnnnnnnnnnnnnnnnnnnnnnnnnnnnnnnnnnnnnnnnnnnnnnnnnnnnnnnnnnnnnnnnnnnnnnnnnnnnnnnnnnnnnnnnnnnnnnnnnnnnnnnnnnnnnnnnnnnnnnnnnnnnnnnnnnnnnnnnnnnnnnnnnnnnnnnnnnnnnnnnnnnnnnnnnnnnnnnnnnnnnnnnnnnnnnnnnnnnnnnnnnnnnnnnnnnnnnnnnnnnnnnnnnnnnnnnnnnnnnnnnnnnnnnnnnnnnnnnnnnnnnnnnnnnnnnnnnnnnnnnnnnnnnnnnnnnnnnnnnggattgagcagtggggcaagctgtatgaggaggagtctccatcccgcacgatcatccagtacatccacgacaactacttcctggtcaacctggtggacaatgacttcccacaggacaactgcctgtggcaggtggtggaagatgcacttgagcttctcaacaggcccacccagaatgagagagagacggaggctccgtgaccctgtgtcctgacgccatgcgctggagccactcctgtcccaccttcctcctccacgatgctacttctctgggaatcccactctccttcatgtctctcccacccctggcctccactccccgacctgacgatggcagctagactggagtgaggcttccaggctctggctggacttgagttggccccacatgggaacctagtactccctgctct

SEQ ID NO: 29494 - DNA, 2500 bp, Macaca Mulatta
  misc_feature (1)...(2500): n = A,T,C or G
agaactcgatccgccacaacctgtccctgcacagcaagttcatcaaggttcacaacgaggccactggcaaaagctcttggtggatgctgaaccctgagggaggcaagagcggcaaggcccctcgccgccgggccgcctccatggatagcagcagcaagctgctccggggccgcagtaaagcccccaagaagaagccacctgtgctgccagctccacccgaaggtgccactccgacgagccctgccggccactttgccaagtggtcaggcagcccttgctctcgaaaccgtgaagaagccgatatgtggaccaccttccgtccacgaagcagttcaaatgccagcaccgtcagcacccggctgtcccccttgaggccagagtctgaggtgctggcggaggaaataccagcttcagtcagcagctatgcagggggtgtccctcccaccctcaatgaaggtctagagctgttagatgggctcaatctcacctcatcccattccctgctatctcggagtggtctctctggcttctctttgcagcatcctggggttaccggccccttacacacctacagcagctctcttttcagcccagccagaggggcccctgtcagcaggagaagggtgcttctccagctcccaggctctggaggccctgctcacctctgatacgccaccaccccctgctgacgtcctcatgacccaggtagatcccattctgtcccaggctcctactcttctgttgctgggggggcttccttcctccagtaagctggccacgggtgtcggcctgtgtcccaagcccctagaggctccaggccccagcagtctggttcccaccctttctatgatagcaccacctccagtcatggcaagtgcccccatccccaaggctctggggacgcctgtgctcacaccccctactgaagctgcaagccaagacagaatgcctcaggatctagatcttgatatgtatatggagaacctggagtgtgacatggataacatcatcagtgacctcatggatgagggcgagggactggacttcaactttgagccgatccctgagccatggctggaagctttctcccctgcttcggaggtggagccaggcgtgtccatatctgttctttacccttgagccctccccaggaatttgggaccctgctttagagctagggtgggtctggtcacacacaggtgttgaagaaattataaagataaagctgccgcatctggggacaatatggggagggannnnnnnnnnnnnnnnnnnnnnnnnnnnnnnnnnnnnnnnnnnnnnnnnnnnnnnnnnnnnnnnnnnnnnnnnnnnnnnnnnnnnnnnnnnnnnnnnnnnnnnnnnnnnnnnnnnnnnnnnnnnnnnnnnnnnnnnnnnnnnnnnnnnnnnnnnnnnnnnnnnnnnnnnnnnnnnnnnnnnnnnnnnnnnnnnnnnnnnnnnnnnnnnnnnnnnnnnnnnnnnnnnnnnnnnnnnnnnnnnnnnnnnnnnnnnnnnnnnnnnnnnnnnnnnnnnnnnnnnnnnnnnnnnnnnnnnnnnnnnnnnnnnnnnnnnnnnnnnnnnnnnnnnnnnnnnnnnnnnnnnnnnnnnnnnnnnnnnnnnnnnnnnnnnnnnnnnnnnnnnnnnnnnnnnnnnnnnnnnnnnnnnnnnnnnnnnnnnnnnnnnnnnnnnnnnnnnnnnnnnnnnnnnnnnnnnnnnnnnnnnnnnnnnnnnnnnnnnnnnnnnnnnnnnnnnnnnnnnnnnnnnnnnnnnnnnnnnnnnnnnnnnnnnnnnnnnnnnnnnnnnnnnnnnnnnnnnnnnnnnnnnnnnnnnnnnnnnnnnnnnnnnnnnnnnnnnnnnnnnnnnnnnnnnnnnnnnnnnnnnnnnnnnnnnnnnnnnnnnnnnnnnnnnnnnnnnnnnnnnnnnnnnnnnnnnnnnnnnnnnnnnnnnnnnnnnnnnnnnnnnnnnnnnnnnnnnnnnnnnnnnnnnnnnnnnnnnnnnnnnnnnnnnnnnnnnnnnnnnnnnnnnnnnnnnnnnnnnnnnnnnnnnnnnnnnnnnnnnnnnnnnnnnnnnnnnnnnnnnnnnnnnnnnnnnnnnnnnnnnnnnnnnnnnnnnnnnnnnnnnnnnnnnnnnnnnnnnnnnnnnnncttccccttccctgactgcagggcttatgtggaagtgtgtgtggcagcagggaggggagcaacacgtaagggggagctggggagcttggctgagggtctgggaaatgagcagggatgggggggaatgtggatcaggttctctagganctgccagggaggccatctggggctccttctccaccccagnnnnnnnnnnnnnnnnnnnnnnnnnnnnnnnnnnnnnnnnnnnnnnnnnnnnnngctgtgggttcccatcatttcctgtgtcagcgcctggcctacccagattgtatcatgtgctagattggagtggggaagtgtgtcaaatcaataaatgaatgaattcaataaatgcctat

SEQ ID NO: 29495 - DNA, 208 bp, Macaca Mulatta
tggttctcacctcaccggttgtctctttgtattatggtacagtcatgggcatgtacttccgccctttgaccaattatagcctaaaagatgcagtgatcactgtaatgtacatggcagtgaccccaatgttaaatcctttcatctacagtctgagaaatcgggacatgaaggcggccctgcggaaactcttcaacaagagaatctcctc

SEQ ID NO: 29496 - DNA, 2954 bp, Macaca Mulatta
  misc_feature (1)...(2954): n = A,T,C or G
ggcttgctcagactggagatttctacagctccagagatcatcaattgctgtctgactcctgaaatgctgcccgtgaaaccctttcctgaaaaccggacacgcccgcacaaagagattttggaatttccaacacgagaagtatatgtccctcatacagtgtacagnnnnnnnnnnnnnnnnnnnnnnnnnnnnnnnnnnnnnnnnnnnnnnnnnnnnnnnnnnnnnnnnnnnnnnnnnnnnnnnnnnnnnnnnnnnnnnnnnnnnnnnnnnnnnnnnnnnnnnnnnnnnnnnnnnnnnnnnnnnnnnnnnnnnnnnnnnnnnnnnnnnnnnnnnnnnnnnnnnnnnnnnnnnnnnnnnnnnnnnnnnnnnnnnnnnnnnnnnnnnnnnnnnnnnnnnnnnnnnnnnnnnnnnnnnnnnnnnnnnnnnnnnnnnnnnnnnnnnnnnnnnnnnnnnnnnnnnnnnnnnnnnnnnnnnnnnnnnnnnnnnnnnnnnnnnnnnnnnnnnnnnnnnnnnnnnnnnnnnnnnnnnnnnnnnnnnnnnnnnnnnnnnnnnnnnnnnnnnnnnnnnnnnnnnnnnnnnnnnnnnnnnnnnnnnnnnnnnnnnnnnnnnnnnnnnnnnnnnnnnnnnnnnnnnnnnnnnnnnnnnnnnnnnnnnnnnnnnnnnnnnnnnnnnnnnnnnnnnnnnnnnnnnnnnnnnnnnnnnnnnnnnnnnnnnnnnnnnnnnnnnnnnnnnnnnnnnnnnnnnnnnnnnnnnnnnnnnnnnnnnnnnnnnnnnnnnnnnnnnnnnnnnnnnnnnnnnnnnnnnnnnnnnnnnnnnnnnnnnnnnnnnnnnnnnnnnnnnnnnnnnnnnnnnnnnnnnnnnnnnnnnnnnnnnnnnnnnnnnnnnnnnnnnnnnnnnnnnnnnnnnnnnnnnnnnnnnnnnnnnnnnnnnnnnnnnnnnnnnnnnnnnnnnnnnnnnnnnnnnnnnnnnnnnnnnnnnnnnnnnnnnnnnnnnnnnnnnnnnnnnnnnnnnnnnnnnnnnnnnnnnnnnnnnnnnnnnnnnnnnnnnnnnnnnnnnnnnnnnnnnnnnnnnnnnnnnnnnnnnnnnnnnnnnnnnnnnnnnnnnnnnnnnnnnnnnnnnnnnnnnnnnnnnnnnnnnnnnnnnnnnnnnnnnnnnnnnnnnnnnnnnnnnnnnnnnnnnnnnnnnnnnnnnnnnnnnnnnnnnnnnnnnnnnnnnnnnnnnnnnnnnnnnnnnnnnnnnnnnnnnnnnnnnnnnnnnnnnnnnnnnnnnnnnnnnnnnnnnnnnnnnnnnnnnnnnnnnnnnnnnnnnnnnnnnnnnnnnnnnnnnnnnnnnnnnnnnnnnnnnnnnnnnnnnnnnnnnnnnnnnnnnnnnnnnnnnnnnnnnnnnnnnnnnnnnnnnnnnnnnnnnnnnnnnnnnnnnnnnnnnnnnnnnnnnnnnnnnnnnnnnnnnnnnnnggtgaaaagcatggcccagcatgtacataacatggacaaacgggacagttttcggaggactcgtttttctgaccgtttcatggatgacataaccactattgttaatgtggtcacctcggaaattgcagcccttttagtaaaaccacagaagnnnnnnnnnnnnnnnnnnnnnnnnnnnnnnnnnnnnnnnnnnnnnnnnnnnnnnnnnnnnnnnnnnnnnnnnnnnnnnnnnnnnnnnnnnnnnnnnnnnnnnnnnnnnnnnnnnnnnnnnnnnnnnnnnnnnnnnnnnnnnnnnnnnnnnnnnnnnnnnnnnnnnnnnnnnnnnnnnnnnnnnnnnnnnnnnnnnnnnnnnnnnnnnnnnnnnnnnnnnnnnnnnnnnnnnnnnnnnnnnnnnnnnnnnnnnnnnnnnnnnnnnnnnnnnnnnnnnnnnnnnnnnnnnnnnnnnnnnnnnnnnnnnnnnnnnnnnnnnnnnnnnnnnnnnnnnnnnnnnnnnnnnnnnnnnnnnnnnnnnnnnnnnnnnnnnnnnnnnnnnnnnnnnnnnnnnnnnnnnnnnnnnnnnnnnnnnnnnngtacaaaggaaagctgtctgtgctttccacaccctgctaagttctcatgacctnnnnnnnnnnnnnnnnnnnnnnnnnnnnnnnnnnnnnnnnnnnnnnnnnnnnnnnnnnnnnnnnnnnnnnnnnnnnnnnnnnnnnnnnnnnnnnnnnnnnnnnnnnnnnnnnnnnnnnnnnnnnnnnnnnnnnnnnnnnnnnnnnnnnnnnnnnnnnnnnnnnnnnnnnnnnnnnnnnnnnnnnnnnnnnnnnnnnnnnnnnnnnnnnnnnnnnnnnnnnnnnnnnnnnnnnnnnnnnnnnnnnnnnnnnnnnnnnnnnnnnnnnnnnnnnnnnnnnnnnnnnnnnnnnnnnnnnnnnnnnnnnnnnnnnnnnnnnnnnnnnnnnnnnnnnnnnnnnnnnnnnnnnnnnnnnnnnnnnnnnnnnnnnnnnnnnnnnnnnnnnnnnnnnnnnnnnnnnnnnnnnnnnnnnnnnnnnnnnnnnnnnnnnnnnnnnnnnnnnnnnnnnnnnnnnnnnnnnnnnnnnnnnnnnnnnnnnnnnnnnnnnnnnnnnnnnnnnnnnnnnnnnnnnnnnnnnnnnnnnnnnnnnnnnnnnnnnnnnnnnnnnnnnnnnnnnnnnnngggaacgaccgatttccaggcctaaatgaaaatttgagatggaagaaagagcagacacattggcggcaagctaatgagaagctagataannnnnnnnnnnnnnnnnnnnnnnnnnnnnnnnnnnnnnnnnnnnnnnnnnnnnnnnnnnnnnnnnnnnnnnnnnnnnnnnnnnnnnnnnnnnncaggcgagctcggctctggactgtaaagacagcctgctgggaggtgttctgagggtgctggtgaattctctgaactgtgatcagagtaccacctacctgactcactgctttgcaacactccgtgctctcatcgccaag

SEQ ID NO: 29497 - DNA, 3060 bp, Macaca Mulatta
  misc_feature (1)...(3060): n = A,T,C or G
ggtggctccggaagcagttttactcagtggatcggaatcgtgaggatcgnnnnnnnnnnnnnnnnnnnnnnnnnnnnnnnnnnnnnnnnnnnnnnnnnnnnnnnnnnnnnnnnnnnnnnnnnnnnnnnnnnnnnnnnnnnnnnnnnnnnnnnnnnnnnnnnnnnnnnnnnnnnnnnnnnnnnnnnnnnnnnnnnnnnnnnnnnnnnnnnnnnnnnnnnnnnnnnnnnnnnnnnnnnnnnnnnnnnnnnnnnnnnnnnnnnnnnnnnnnnnnnnnnnnnnnnnnnnnnnnnnnnnnnnnnnnnnnnnnnnnnnnnnnnnnnnnnnnnnnnnnnnnnnnnnnnnnnnnnnnnnnnnnnnnnnnnnnnnnnnnnnnnnnnnnnnnnnnnnnnnnnnnnnnnnnnnnnnnnnnnnnnnnnnnnnnnnnnnnnnnnnnnnnnnnnnnnnnnnnnnnnnnnnnnnnnnnnnnnnnnnnnnnnnnnnnnnnnnnnnnnnnnnnnnnnnnnnnnnnnnnnnnnnnnnnnnnnnnnnnnnnnnnnnnnnnnnnnnnnnnnnnnnnnnnnnnnnnnnnnnnnnnnnnnnnnnnnnnnnnnnnnnnnnnnnnnnnnnnnnnnnnnnnnnnnnnnnnnnnnnnnnnnnnnnnnnnnnnnnnnnnnnnnnnnnnnnnnnnnnnnnnnnnnnnnnnnnnnnnnnnnnnnnnnnnnnnnnnnnnnnnnnnnnnnnnnnnnnnnnnnnnnnnnnnnnnnnnnnnnnnnnnnnnnnnnnnnnnnnnnnnnnnnnnnnnnnnnnnnnnnnnnnnnnnnnnnnnnnnnnnnnnnnnnnnnnnnnnnnnnnnnnnnnnnnnnnnnnnnnnnnnnnnnnnnnnnnnnnnnnnnnnnnnnnnnnnnnnnnnnnnnnnnnnnnnnnnnnnnnnnnnnnnnnnnnnnnnnnnnnnnnnnnnnnnnnnnnnnnnnnnnnnnnnnnnnnnnnnnnnnnnnnnnnnnnnnnnnnnnnnnnnnnnnnnnnnnnnnnnnnnnnnnnnnnnnnnnnnnnnnnnnnnnnnnnnnnnnnnnnnnnnnnnnnnnnnnnnnnnnnnnnnnnnnnnnnnnnnnnnnnnnnnnnnnnnnnnnnnnnnnnnnnnnnnnnnnnnnnnnnnnnnnnnnnnnnnnnnnnnnnnnnnnnnnnnnnnnnnnnnnnnnnnnnnnnnnnnnnnnnnnnnnnnnnnnnnnnnnnnnnnnnnnnnnnnnnnnnnnnnnnnnnnnnnnnnnnnnnnnnnnnnnnnnnnnnnnnnnnnnnnnnnnnnnnnnnnnnnnnnnnnnnnnnnnnnnnnnnnnnnnnnnnnnnnnnnnnnnnnnnnnnnnnnnnnnnnnnnnnnnnnnnnnnnnnnnnnnnnnnnnnnnnnnnnnnnnnnnnnnnnnnnnnnnnnnnnnnnnnnnnnnnnnnnnnnnnnnnnnnnnnnnnnnnnnnnnnnnnnnnnnnnnnnnnnnnnnnnnnnnnnnnnnnnnnnnnnnnnnnnnnnnnnnnnnnnnnnnnnnnnnnnnnnnnnnnnnnnnnnnnnnnnnnnnnnnnnnnnnnnnnnnnnnnnnnnnnnnnnnnnnnnnnnnnnnnnnnnnnnnnnnnnnnnnnnnnnnnnnnnnnnnnnnnnnnnnnnnnnnnnnnnnnnnnnnnnnnnnnnnnnnnnnnnnnnnnnnnnnnnnnnnnnnnnnnnnnnnnnnnnnnnnnnnnnnnnnnnnnnnnnnnnnnnnnnnnnnnnnnnnnnnnnnnnnnnnnnnnnnnnnnnnnnnnnnnnnnnnnnnnnnnnnnnnnnnnnnnnnnnnnnnnnnnnnnnnnnnnnnnnnnnnnnnnnnnnnnnnnnnnnnnnngagcctgactacggggccctgtatgagggacgcaaccctggcttctatgtagaggcaaaccctatgccaactttcaannnnnnnnnnnnnnnnnnnnnnnnnnnnnnnnnnnnnnnnnnnnnnnnnnnnnnnnnnnnnnnnnnnnnnnnnnnnnnnnnnnnnnnnnnnnnnnnnnnnnnnnnnnnnnnnnnnnnnnnnnnnnnnnnnnnnnnnnnnnnnnnnnnnnnnnnnnnnnnnnnnnnnnnnnnnnnnnnnnnnnnnnnnnnnnnnnnnnnnnnnnnnnnnnnnnnnnnnnnnnnnnnnnnnnnnnnnnnnnnnnnnnnnnnnnnnnnnnnnnnnnnnnnnnnnnnnnnnnnnnnnnnnnnnnnnnnnnnnnnnnnnnnnnnnnnnnnnnnnnnnnnnnnnnnnnnnnnnnnnnnnnnnnnnnnnnnnnnnnnnnnnnnnnnnnnnnnnnnnnnnnnnnnnnnnnnnnnnnnnnnnnnnnnnnnnnnnnnnnnnnnnnnnnnnnnnnnnnnnnnnnnnnnnnnnnnnnnnnnnnnnnnnnnnnnnnnnnnnnnnnnnnnnnnnnnnnnnnnnnnnnnnnnnnnnnnnnnnnnnnnnnnnnnnnnnnnnnnnnnnnnnnnnnnnnnnnnnnnnnnnnnnnnnnnnnnnnnnnnnnnnnnnnnnnnnnnnnnnnnnnnnnnnnnnnnnnnnnnnnnnnnnnnnnnnnnnnnnnnnnnnnnnnnnnnnnnnnnnnnnnnnnnnnnnnnnnnnnnnnnnnnnnnnnnnnnnnnnnnnnnnnnnnnnnnnnnnnnnnnnnnnnnnnnnnnnnnnnnnnnnnnnnnnnnnnnnnnnnnnnnnnnnnnnnnnnnnnnnnnnnnnnnnnnnnnnnnnnnnnnnnnnnnnnnnnnnnnnnnnnnnnnnnnnnnnnnnnnnnnnnnnnnnnnnnnnnnnnnnnnnnnnnnnnnnnnnnnnnnnnnnnnnnnnnnnnnnnnnnnnnnnnnnnnnnnnnnnnnnnnnnnnnnnnnnnnnnnnnnnnnnnnnnnnnnnnnnnnnnnnnnnnnnnnnnnnnnnnnnnnnnnnnnnnnnnnnnnnnnnnnnnnnnnnnnnnngtggacaatggactcaaccctgtatggccggccaagcccttccacttccagatcagtaaccctgaatttgcctttctgcgctttgtggtgtatgaggaagacatgtttagtgaccagaatttcctggctca

SEQ ID NO: 29498 - DNA, 656 bp, Macaca Mulatta
agtgaggctccaagtaagtaggcaagatagggcagttaactaaagagcactttatttctttgaagcctttgtaagaaagaaatgggggtgcgagtggcttgaatctcccatgacgttggagggcacttagtggggttgaagtatgacataatatttcccattggggaaaggagaatttctcttagagggtggcaaaatgcctttgcccagtgtctctattttaggcatcttttccttccttattccttccagtcagggtgtgtcctacacataacttcccattagttctcctcaatgttccccctttgtaaatgatcactcctcttttctaaacccttttcctgttcagatccatacaggatttgcaagggtagactgaattatacatgcaaatgccccttgttcatctgtgtcttctgcaaactagtctcatgaagaattctggtgtgcagccagggtagtgaagtttggttctgggactggagattggccatttggcctcctgagattccagctcccttccaccaagcccagtcttgctacatggcacaggacaaacctgactccctttgggcctcagtttcccctccccttcatgaaacaaaaagaatactactttttcttgttggtctagcattgctggacacaaagtgtag

SEQ ID NO: 29499 - DNA, 595 bp, Macaca Mulatta
  misc_feature (1)...(595): n = A,T,C or G
ttaatccatgttcatccctangcagtttaaccagagtttgacctagagggagtccagcttttcacagtntanccntggagcaggtgggtcactcttagggattcngtatcatccatggtagatgtgtataatgtattcactnggagctgcaagnacagtatgccattattctcctctctttattctttccctcctttcagggtttcctggagctctncaaggagcaggagctggtgatttntgaggaggattntgattcctcggtgaagtggaagctcctccccaaggaagagccttaaaaccccaaattctgtgttcctgtttaaacccgtggtgttcttttttaatacatttatttttatagcatcaatgttctatttttagaaactatattataagtacagaaatggttcttcgtgtggtggaaggaggtatgggtgatgggtaagtgccgtgtcagtgtggacagaggcatttgactaagccaagctcctctcacagcctctgtatctctgcaggccaccctggttccatttttctgtgtgataccgaatagaacaaaatttacttttatatgatggtataagtttgtaga

SEQ ID NO: 29500 - DNA, 923 bp, Macaca Mulatta
cacagctacaagagaaagaaaagatgaagaaggaactgaaaaacttactaacgaacagatgggttagtgaagaaaaatgcaaagtagcaatgagaagggttatggagtaaaaatgaagtcagttggtatttaatcccaaagtgttgttctgatgatctaaaatttgacatggtagaccttgtaatttagaatcaagtgggtgagacggaaagaagtatgcctgcttaattacttaaactgtgtacttttgttttgacactgaatattttaaacagcaaataataaaataactaagcatttgaggaaagttttaaggataaattgaggaaactgattaacagagatagaaagagataactgaataaatattccctatgtagcaatagtggttagatgacctttgtctgaatgtaattaaactttgaagagttttagtgtccttaaagccaagtatatgctttaacatcaaatggaagtcaaattcctaatgcaaagatagagctaaactgtgcaatttaatggtaccttctttgctggatgtggcagaatccacaccagcttatcaatcaacacagctaattttagcctagatgcttttatctttcatatggcacacataagaaagtgtttttctactattaatattaaattaaaacctttaattttgtataataaattaaaactcagaataaacctgtgactatgtatatttccattcactttattactttagagaacacgttgtaaagatcagtaagaaacagagcacgactaaaataaataagatttatacccacaccaataggctaagtgtaaatgtaaagtatgttttactgtttaagattaataatattcatcttttctataaatactacttactggaacattaacaacaagtactcaagggttgattaatatttgga

SEQ ID NO: 29501 - DNA, 145 bp, Macaca Mulatta
gaggccctgaatgtgctgtgaatagaccgatatccagggagcccctgcgagtggacctcgctgacctgctgacagagaatccggagctgttcagaaagaatgctgaagagttcaccctccaatatggagtggaccggccctccta

SEQ ID NO: 29502 - DNA, 168 bp, Macaca Mulatta
ccatgttgtaaaccacatagtaagcttgaatcagtcttagagtctcattgatctttccttacatacatgggtcggatttacagaatggaaatagttatctggagtgagagtaatcaaaaaggttttctgaaaaagcacaatttgaactggaccttaaagggtggggag

SEQ ID NO: 29503 - DNA, 774 bp, Macaca Mulatta
  misc_feature (1)...(774): n = A,T,C or G
agagccagtgaaaccaagagttaattataaaatggcaaattcttcagaatgtgaaaaacccaagataaatgggaaagtttgtggacagtgtgaaaacaaagctgctctactagtatgnnnnnnnnnnnnnnnnnnnnnnnnnnnnnnnnnnnnnnnnnnnnnnnnnnnnnnnnnnnnnnnnnnnnnnnnnnnnnnnnnnnnnnnnnnnnnnnnnnnnnnnnnnnnnnnnnnnnnnnnnnnnnnnnnnnnnnnnnnnnnnnnnnnnnnnnnnnnnnnnnnnnnnnnnnnnnnnnnnnnnnnnnnnnnnnnnnnnnnnnnnnnnnnnnnnnnnnnnnnnnnnnnnnnnnnnnnnnnnnnnnnnnnnnnnnnnnnnnnnnnnnnnnnnnnnnnnnnnnnnnnnnnnnnnnnnnnnnnnnnnnnnnnnnnnnnnnnnnnnnnnnnnnnnnnnnnnnnnnnnnnnnnnnnnnnnnnnnnnnnnnnnnnnnnnnnnnnnnnnnnnnnnnnnnnnnnnnnnnnnnnnnnnnnnnnnnnnnnnnnnnnagactcactggaagaatgtgaagtgcagactaatctgaaaatttggagagaaccacttaatattgaaattaaagaagatattctatcctatatggaaaaattatggcttaaaaaacacaggagnagaacaccacaagaacaactttttaatctgctaccagatacattcccacatccatgtgaaaccactggtgatgtacagtgttctcaaaatgaaaatgatgaagatagtga

SEQ ID NO: 29504 - DNA, 828 bp, Macaca Mulatta
gggggagtctcagggcaaaccctttcaagcagcgcctcccagtggccagtagctgaaatgacggcagtggtgccgcctggtgaatgaattggttgggaccccggaagctgtggttggccctaatttcttctttggaggctcagaaacatttcctctcttctgttcttcacgccccatgcccctgctagcgtattactgttctgtgacttccccatgacctctgcaggactcctcctcctgtgtttggtctccaggtgtcgcctttctgccgtgttcctaacgttttgattcctgtcttgaaaaaaagcaccggctgcaccgtaagcccagggatgtggcatctgcagcaggcttggctttgtgaggaactgagtgtgtccacgttgggggaacatcatacttgatacacacgtttttatttgtgcaaagaaaatgctattttgggagccagaattttcacgtctgatttatggtgattttcttaagaccagaactgctggcagaaagggggcacccccacgcttagacagccgatgtcttattagagggcagtttgtggttcctggtttggaatttaacattctttcaaccttccattccactgaaagttttatccggctttcccataaaaaaaatctttcccccgattatggacttgaattctcacaagttacctttggaaagggcttgttggtgagggcctaacagtgtgaggggttcaaaaattggccatttcccaaaagcctcccttcggggggaatccgcccaacctttaactcctccccaaaagccttcagccccttttaaaaggggtttgggaaattaaac

SEQ ID NO: 29505 - DNA, 173 bp, Macaca Mulatta
aactggtaacagggcaatataaacataacactcaacccaaacaaaactacttcatgaggctttcagcaaaaatgctgcttaaaagtatgaacccgggatgcagagcagcttttatgcacagttcaaattactgtaattgtatccggttctttcctctaacaccttccatgtat

SEQ ID NO: 29506 - DNA, 617 bp, Macaca Mulatta
  misc_feature (1)...(617): n = A,T,C or G
cccgtagtcccatcattcagccccctaggggcaccgccgcggcggtggcctcgcagggcgctgggttccactctccagctctcctccccctggccccgtcgccccgccctcgtcgggctgggctgcggggtcaggggccgagcggagnnnnnnnnnnnnnnnnnnnnnnnnnnnnnnnnnnnnnnnnnnnnnnnnnnnnnnnnnnnnnnnnnnnnnnnnnnnnnnnnnnnnnnnnnnnnnnnnnnnnnnnnnnnnnnnnnnnnnnnnnnnnnnnnnnnnnnnnnnnnnnnnnnnnnnnnnnnnnnnnnnnnnnnnnnnnnnnnnnnnnnnnnnnnnnnnnnnnnnnnnnnnnnnnnnnnnnnnnnnnnnnnnnnnnnnnnnnnnnnnnnnnnnnnnnnnnnnnnnnnnnnnnnnnnnnnnnnnnnnnnnnnnnnnnnnnnnnnnnnnnnnnnnnnnnnnnnnnnnnnnnnnnnnnnnnnnnnnnnnnnnnnnnnnnnnnnnnnnnnnnnnnnnnnnagatggaagacctttaactctgaaggacatatgggaaggagttcatgagtgctataagacgcgactgctacagggaccatgggacactattacacaacagg

SEQ ID NO: 29507 - DNA, 144 bp, Macaca Mulatta
acccgaagtacacagggaatgttttcactccacactttgctacagccttgacctcagcaaccctgaaccagccactctggctcaacctgaactatccacctccaccagtgttcacgaatcactctaccttcctgcagtatcagg

SEQ ID NO: 29508 - DNA, 425 bp, Macaca Mulatta
aagtatattagagttaaaatctaacaaccaaatgaaaactagacaactttcaagttatttgttttagataaaatgtagttataggaagctaatcagtatgtggaggggaggaaacattataaaatgctctttcttgaaaatttctgtaagcaggataaaaaaactcatattttagtataggcatttgaatctttgcagtttattgtctgctttcaccttccatccttctcataatcccaataaaacaattgacactataaataaataaaaaaccttaattctgagtaaacaatggagctattagcatacgcaagaaaaactccccgtggaccatggtgaaattgtaagaagaataaacttggttaaataaaccataacaacccccttctccaataaaccaaagaagtgaccttgaccacatatac

SEQ ID NO: 29509 - DNA, 756 bp, Macaca Mulatta
  misc_feature (1)...(756): n = A,T,C or G
ggagactggggcatttaagcaacacatcttgctacgaaacgatggcagatgcctccaccgagcttcagcaagtcatcctgatctccgtgggaacattttcgttgctgtcggtgctggcaggggcctgtttcttcctggtcctgaaatacagaggcctgattaaatactggtttcacactccaccaagcattccgttacagatagaagagtatttaaaggacccaacccagcccatcttagaggtcttggacaaggacagctcaccaaaggatgacgtcagggactctgtgtccatcatttcctttccagaaaaggagcaagatgatgttctccaaacactttgaaccaaagcatgggtctagcccactggccccctggaagagatcgtcgaaccagtggagctgctggaattctgtctggacttcccagagaccagtattcccttttcctgcctctaaaaggcctgtccctgccttgtgagagacagtgggtctcatgggggtgaaaannnnnnnnnnnnnnnnnnnngagaattttccaaatgaaacaagtttttagaaatgattctatgggaaatatcccaagaaaaaattaagggcttcctctttaacacttaaaaaagtcccggtaaatttgccttggttaagccaaaaatgggaatttgggaccccaacccccctggnnnnnnnnnnnnnnnnnncatggctttggttggccggaaacccaatttcaagaaagaaaacatgtggggtccct

SEQ ID NO: 29510 - DNA, 368 bp, Macaca Mulatta
  misc_feature (1)...(368): n = A,T,C or G
tgaggaacttgaggcgcatcactagcccctgatcatttcacctaaaagaacaaggacgagagttcctgacctccaggccagtccctgatccctgacctaatgtnnnnnnnnnnnnnnnnnnnnnnntctacggnggcctggggctgggcgggctcctgctgctggctgtggtccttctgtccacctgcctgtatcggctgcatcgnnnnnnnnnnnnnntcctcagagcaggagatccactatgcatctctgcagaggctgccagtgtccagcagtgaaggacctgacctcagggacagagacaagagaggcaccaaggaggatcccagagctgactatgcctgcattgctgagaacaaacccacctg

SEQ ID NO: 29511 - DNA, 175 bp, Macaca Mulatta
ctgctgctaagtaatttctgctcagccatgtcgccggctccagatgcagcccaggctcctgcgtcgatctccctgtttgacctcagcgcggatgctccgatccttcagggcctgagcctggtgagccacgcgcctggggaggctctggcccgggctccgcgtacttcctgttcag

SEQ ID NO: 29512 - DNA, 217 bp, Macaca Mulatta
aggtgtggtatctgtgcgctttgaagaagatgaagacaggaacttgtgtctaatagcatatccattaaaaggggaccatggaattgtggacattgtagataattcagactgtgaaccaaaaagtaagctcctaaggtggacaacaaacaaaaaacatcatgtcttagaaacagaaaagacccctaaggactgggtgcgtcagcaccgtaaagaggag

SEQ ID NO: 29513 - DNA, 401 bp, Macaca Mulatta
  misc_feature (1)...(401): n = A,T,C or G
tggcgaccaggcgccttggggttggggagacgctgggggccctcaacgcggccctggggcctggcagtccggtatggatcaaggagacgcgcacccgccacctgcgttcccgagactttctggcaccgcaccgcgcgctgcaggcgcgcttcgatgacggccaggtncaggtacccgagcatttgctccatgccctcgcctgcctgcagggtcccggcgtggccccggtgctgcgctgcgcgccgactcccgcgggtctgtctctccaactgcagcggcccgcggtcttcgagcgcgtcctcagcgccgtggccgcctatgccacgcccgccttgcctgccttgccgggccagcgcgtcttactacactgcccagccctgcgcagctccccttgcgcactc

SEQ ID NO: 29514 - DNA, 720 bp, Macaca Mulatta
  misc_feature (1)...(720): n = A,T,C or G
ggctcaattaagaaacatcagggagataaattcaaccnnnnnnnnnnnnnnnnnnnnnnnnnnnnnnnnnnnnnnnnnnnnnnnnnnnnnnnnnnnnnnnnnnnnnnnnnnnnnnnnnnnnnnnnnnnnnnnnnnnnnnnnnnnnnnnnnnnnnnnnnnnnnnnnnnnnnnnnnnnnnnnnnnnnnnnnnnnnnnnnnnnnnnnnnnnnnnnnnnnnnnnnnnnnnnnnnnnnnnnnagcaactttttaactgtcagtctttacacaaactgagtttgccagacaatgatttaacaacgttaccagcatccattgcaaaccttattaatctcagggaactggatgtcagcaagaatgnnnnnnnnnnnnnnnnnnnnnnnnnnnnnnnnnnnnnnnnnnnnnnnnnnnnnnnnnnnnnnnnnnnnnnnnnnnnnnnnnnnnnnnnnnnnnnnnnnnnnnnnnnnnnnnnnnnnnnnnnnnnnnnnnnnnnnnnnnnnnnnnnnnnnnnnnnnnnnnnnnnnnnnnnnnnnnnnnnnnnnnnnnnnnnnnnnnnnnnnnnnnnnnnnnnnnnnnnnnnnnnnnnnnnnnnnnnnnnnnnnnnnnnnnnnnnnnnnnnnnnnnnnnnnnnnnnnnnnnnnnnnnnnngcctgaagtacttgagcaactaagtggattgaaagagttttggatggatgctaatagactgacttttattccagg

SEQ ID NO: 29515 - DNA, 215 bp, Macaca Mulatta
gctgcattgtgcagatggaaaagggcagaagctgcctgttgcctgtggaactgtcgcaagacactggcactgtggaacgggccctgctcttgcgggcacagctgcacccagcagtctccgtgtcaagaccaagggcctcctggaaacaccagctctgacgacaaggaatcatctgggagccctagaaacctcctcctggccaggcgcagtggctc

SEQ ID NO: 29516 - DNA, 123 bp, Macaca Mulatta
ggtacatggaaggccgcaggaagaaacaagatcttgagctgagccagaacatcccagcatcttcgttgactttaaaagtgtgttctggagtcttctgtggttcactgttccagtgctacagag

SEQ ID NO: 29517 - DNA, 828 bp, Macaca Mulatta
cgcggggctgggcttcgtggggatcaagcttcgtggctttttatgaagaatcccgaaccccgcctaggagcccgccccaccctcccaggggctccatcttcagccctctgcccactgggcccagggaccacagtggctggaccaacccaggaccagggcgcctgggcctctcccctttcccagcggctgggtaggggagatgggggcttcccctcaccacacctgtggctgttcccatatccccttgagtatcccaggaaaaataaaacggcagaactgcactcgagccaactgctctctccagaagaggccacctccgtcccatgtgtgggaggacgggggtgaagggagaaggggccgggagcccactctcttggtttggagacagcaggggtgttgcctgagctcctcccagggatgggccagctggtggaaaggagattcggccccctgatgcccacagtaaggacctggaccctcctggaggggcccaggtggggtgaaggggggagggtgtcaatttctccgctcttccggtttcgctgtatcccattctgcctcccagtccccagggttcccccagagagggaagtccggagctcgctgagcacacagcatgtgcttgataaaccgggagtgtggtgattgttaggtgttgacaaataactggtttcccttcccctagggacgcaatgttccttctgctccagtcattcctgatcagcagcagaaaaacttcagtcctgccacattttctgatgcctcctatgggtggccaccttggtggaggctggggtgggggaagaggaagtacaaagaacagagctc

SEQ ID NO: 29518 - DNA, 597 bp, Macaca Mulatta
  misc_feature (1)...(597): n = A,T,C or G
aatgacacactaatcgacactatgaactacaaggcttctatcccaggaggtggctatggccaccccttctgctggcctggatctccccactctaggggtcaggctccattaggatttgcccattcccatctcttcctacccaaccactcaaattaatttttccttacctgagaccagttgggagcactggagtgcagggaggagaggggaagggccagtctgggctgccgggttctagtctcctttgcactgagggccacactgtcaccatgagaagagggcctgtgggagcctgcaaactcactgctcaagaagacacggagactcctgccctgttgtgtatagatgcaagatatttatatatattttttggttgtcaatattaaatacagacactaagttatagtatatctggacaagccaacttgtaaatacaccacctcactcctgttacttacctaaacagatataaatggctggttnnnnnnnnnnnnnnnnnnnnnnnnnnnnnnnnnnnnnnnnnnnnnnnnnnnnnnnnnnnnnnnnnnnnnnnnnnnnnnnnnnnnnnnnnnnnnnnnnnnnnttggccgtcgttta

SEQ ID NO: 29519 - DNA, 798 bp, Macaca Mulatta
  misc_feature (1)...(798): n = A,T,C or G
ggacagtgtggccgagcagatggttatgtgctagagggcaaagagttggagttctatcttaggaaaatcaaagcccggaaaggcaaataaatcctcgttttgtcttcacccgtgtaataaaggtgtttattgttctgnnnnnnnnnnnnnnnnnnnnnnnnnnnnnnnnnnnnnnnnnnnnnnnnnnnnnnnnnnnnnnnnnnnnnnnnnnnnnnnnnnnnnnnnnnnnnnnnnnnnnnnnnnnnnnnnnnnnnnnnnnngggcccccccgcccccctaaaaactttttaaacactttttttggggcgcgggccccatgggggaaggaaaaggggccaaacgttttcccaggaaatcccgggccagaacaagggcgtgggttcnnnnnnnnnnnnnnnnnnnggggggaaaccagagttttgaaaaaaacccaagggggttttgaggggtttttggggatctttcaacaggggtcccaggggagccctatatctaattttagcccccccctttccatttttgggagaattgttgtatttttttaagctttttgccccaatgggaacccttccaaaaggggtgtgttaaacctgaatttcccggggggttaagacccttgtgcccttgggaataaaattttccccaggggaaaaagggggggaaaaatattttcccctttgggcccctttttaaaacaaaatgggggaaaacctcccccgggggttgcgggaagnnnnnnnnnnnnnnnnnntcaaataaaacccctttttgggaaaaaaagcgccccgtgttttctct

SEQ ID NO: 29520 - DNA, 293 bp, Macaca Mulatta
  misc_feature (1)...(293): n = A,T,C or G
agttcattcagcagacaacacaagaatggaattaatcattcccggagagcagcatttctacatgaaggcagtgaatgcagctgaaagacagaggtggctggttgctctggggagctccaaagcatgtttgactgacacaaggacnnnnnnnnnnnagaaataagtgaaaccagtgaatcgctgaaaaccaaaatgtctgaacttcgcctctactgtgacctcttaatgcagcaagttcatacaatacaggaatttgttcaccatgatgagaatcattcatctaatagtgcaga

SEQ ID NO: 29521 - DNA, 598 bp, Macaca Mulatta
  misc_feature (1)...(598): n = A,T,C or G
atagctattaggggttagcactgtacaaagcccagtttccttctgtgtttgaaaaagatttgatccccttggaatattaagaggtcaacacgtgattgttgtacctccacattgtgctctggagtccctatttattgaaatcattgtaagacctgttataaatataagtctatttaaaactaaacttgtaatatattctgaaaatcatttagagagtcttttatttataaattaaaaatcacttcatttccagcaaaatgttttggtgtggaattatttgaaagcaaaagaaatctaattttgttgttttctccattacctcatttttagtattcatttttacttggtataatatacatggttaaaatgcttatatgacttcgagtatgtgaatcttataagaaataaaattcaagtgannnnnnnnnnnnnnnnnnnnnnnnnnnnnnnnnnnnnnnnnnnnnnnnnnnnnnnnnnnnnnnnnnnnnnnnnnnnnnnnnnnnannnnnnnnnnnnnnnnnnnnnnnnnnnnnnnnnnnnnnnnnnnnnnnnnnnnnnnnnnnnnnnnnnnnnnnnnnnnnnnnnnnnnnnnnnnnnn

SEQ ID NO: 29522 - DNA, 109 bp, Macaca Mulatta
cagggacttcattgagaaacgctatgtggagctaaagaaggcgaatcccgacctacccatcctaatccgcgaatgctccgatgtgcagcccaagctctgggcccgctac

SEQ ID NO: 29523 - DNA, 244 bp, Macaca Mulatta
aggactggtcggccaacctgctgtttgaaagaaaggacaataagaaagaggccctgttagacttggatggaagaattgccaacctcagcaagcgctacacagcagtcagggatgctggcgtgaagatccaagccatggttgcagtaaggaaacacccaggaggttttttaagaacccacttgcttttagcagggaggagagagtaaaggcagagctggagatttcataaaaatgattagtgaca

SEQ ID NO: 29524 - DNA, 679 bp, Macaca Mulatta
gcagtgactgtgggaaaaccttcagcaattcctcatacctcagaccgcacttgagaattcacactggagaaaaaccctacaaatgtaaccagtgttgtcgtgagttccgcactcagtcaatcttcacaaggcacaagagagttcatacaggggagagtcattatgtatgtaatcagtgtggaaaggctttcagcacagggtcatctctttctttgcactatagcattcatacaggggagaacccttacgaatgccacaattgtgggaaaaccttcaggaggagctcgaatctgacacagcacgtaagaactcatactggagaaaagccctacaagtgtaatgagtgtgggatatccttcaccagtagcttttctcttacagttcacaggagaatacataatagagagaaatcctatgagtgcagtgactgtggaaaagcctttaatgttctgtcatctgttaagaaacacaggagaactcacagtggaaaaagaccctatgaatgtaattattgtgggaaattcttcacaagtaacgggtacctttctgtgcatatgagaacgcatattaggcagatgtgaattcaataactgtgcgaaaagcattcatcgatctttcatgcctcagatacatgaaagaactcttcaccagatgtatgaattccctgctactgtataac

SEQ ID NO: 29525 - DNA, 795 bp, Macaca Mulatta
  misc_feature (1)...(795): n = A,T,C or G
agtgcggaccaggctctggaccggtttgcaatgaagcggttctatgaggataagattgtgcccattggccagccatcccaaagaaggtnnnnnnnnnnnnnnnnnnnnnnnnnnnnnnnnnnnnnnnnnnnnnnnnnnnnnnnnnnnnnnnnnnnnnnnnnnnnnnnnnnnnnnnnnnnnnnnnnnnnnnnnnnnnnnnnnnnnnnnnnnnnnnnnnnnnnnnnnnnnnnnnnnnnnnnnnnnnnnnnnnnnnnnnnnnnnnnnnnnnnnnnnnnnnnnnnnnnnnnnnnnnnnnnnnnnnnnnnnnnnnnnnnnnnnnnnnnnnnnnnnnnnnnnnnnnnnnnnnnnnnnnnnnnnnnnnnnnnnnnnnnnnnnnnnnnnnnnnnnnnnnnnnnnnnnnnnnnnnnnnnnnnnnnnnnnnnnnnnnnnnnnnnnnnnnnnnnnnnnnnnnnnnnnnnnnnnnnnnnnnnnnnnnnnnnnnnnnnnnnnnnnnnnnnnnnnnnnnnntcttatgggccagagaaaattcaagnnnnnnnnnnnnnnnnnnnnnnnnnnnnnnnnnnnnnnnnnnnnnnnnnnnnnnnnnnnnnnnnnnnnnnnnnnnnnnnnnnnnnnnnnnnnnnnnnnnnnnnnnnnnnnnnnnngaggtggtgggacacacgcaggggccactagatgggagcgtgtatgccaaggtgaagaagaaagactccgtgcatggcagcaccggggttgtcaatgccacacgtcatacactgtcggccacccccaaccacgtggaacacacacttt

SEQ ID NO: 29526 - DNA, 346 bp, Macaca Mulatta
agacacctgaactctcaaccgacaaagaattcaccagggcaacatgtactgactcatgtaccagccccatcctggatcaagaggacagctggagggacagtgcctccccagaagcaggggaaggcctgggtctcaggccagagtcttcccaaaaggccatcagagcagcacaatggggccaaaatagagagagaccttgggccagttccttgacacattctcctgagtcccaccctcatttatgcaaacttcaccaagaaagggatgcatcaacattggagacctctttggaaaaggatgtgaggcaaaactgctattcagtttgtgatatcatgagacttggaag

SEQ ID NO: 29527 - DNA, 2397 bp, Macaca Mulatta
  misc_feature (1)...(2397): n = A,T,C or G
agggaaatttggcactgggattcagtcctatttctccttcttgagattcctggtgttactgaatttggtgatatttctgatcatctttatgctggttttgctcccaatcttactcacgaaatacaagatcaccaacagcagctttgtgctcattcctttcaaagacannnnnnnnnnnnnnnnnnnnnnnnnnnnnnnnnnnnnnnnnnnnnnnnnnnnnnnnnnnnnnnnnnnnnnnnnnnnnnnnnnnnnnnnnnnnnnnnnnnnnnnnnnnnnnnnnnnnnnnnnnnnnnnnnnnnnnnnnnnnnnnnnnnnnnnnnnnnnnnnnnnnnnnnnnnnnnnnnnnnnnnnnnnnnnnnnnnnnnnnnnnnnnnnnnnnnnnnnnnnnnnnnnnnnnnnnnnnnnnnnnnnnnnnnnnnnnnnnnnnnnnnnnnnnnnnnnnnnnnnnnnnnnnnnnnnnnnnnnnnnnnnnnnnnnnnnnnnnnnnnnnnnnnnnnnnnnnnnnnnnnnnnnnnnnnnnnnnnnnnnnnnnnnnnnnnnnnnnnnngcagatctggaggaagaaagaatacggcagaaaatagcagaaaggacctcagaagaaacaatacgcatttactctttgagactgtttttgaactgtattgttctggctgttttaggggcatgcttttatgcaatatatgtagcaaccgtcttctctcaagagcacatgaaaaaggnnnnnnnnnnnnnnnnnnnnnnnnnnnnnnnnnnnnnnnnnnnnnnnnnnnnnnnnnnnnnnnnnnnnnnnnnnnnnnnnnnnnnnnnnnnnnnnnnnnnnnnnnnnnnnnnnnnnnnnnnnnnnnnnnnnnnnnnnnnnnnnnnnnnnnnnnnnnnnnnnnnnnnnnnnnnnnnnnnnnnnnnnnnnnnnnnnnnnnnnnnnnnnnnnnnnnnnnnnnnnnnnnnnnnnnnnnnnnnnnnnnnnnnnnnnnnnnnnnnnnnnnnnnnnnnnnnnnnnnnnnnnnnnnnnnnnnnnnnnnnnnnnnnnnnnnnnnnnnnnnnnnnnnnnnnnnnnnnnnnnnnnnnnnnnnnnnnnnnnnnnnnnnnnnnnnngctcctggtgacctactgttcctcttggaagctgattcagtgctggggtcagcaggagtttgccattcctgataacgtcctggggatagtttatgggcaaaccatctgctggatcggagcctttttctcaccccttctccctgcaattgcaaccttgaaattcattatcatcttctatgtgaaagagnnnnnnnnnnnnnnnnnnnnnnnnnnnnnnnnnnnnnnnnnnnnnnnnnnnnnnnnnnnnnnnnnnnnnnnnnnnnnnnnnnnnnnnnnnnnnnnnnnnnnnnnnnnnnnnnnnnnnnnnnnnnnnnnnngcatcccttcctcgaaagcctgtgggccgttcaccaacttcaacaccacctgggaggtcatccccaagacggtgagcaccttccccagctcgctgcagtccttcatccacggcgtcacttccgaagcctttgcagttcctttcttcatgattatttgnnnnnnnnnnnnnnnnnnnnnnnnnnnnnnnnnnnnnnnnnnnnnnnnnnnnnnnnnnnnnnnnnnnnnnnnnnnnnnnnnnnnnnnnnnnnnnnnnnnnnnnnnnnnnnnnnnnnnnnnnnnnnnnnnnnnnnnnnnnnnnnnnnnnnnnnnnnnnnnnnnnnnnnnnnnnnnnnnnnnnnnnnnnnnnnnnnnnnnnnnnnnnnnnnnnnnnnnnnnnnnnnnnnnnnnnnnnnnnnnnnnnnnnnnnnnnnnnnnnnnnnnnnnnnnnnnnnnnnnnnnnnnnnnnnnnnnnnnnnnnnnnnnnnnnnnnnnnnnnnnnnnnnnnnnnnnnnnnnnnnnnnnnnnnnnnnnnnnnnnnnnnnnnnnnnnnnnnnnnnnnnnnnnnnnnnnnnnnnnnnnnnnnnnnnnnnnnnnnnnnnnnnnnnnnnnnnnnnnnnnnnnnnnnnnnnnnnnnnnnnnnnnnnnnnnnnnnnnnnnnnnnnnnnnnnnnnnnnnnnnnnnnnnnnnnnnnnnnnnnnnnnnnnnnnnnnnnnnnnnnnnnnnnnnnnnnnnnnnnnnnnnnnnnnnnnnnnnnnnnnnnnnnnnnnnnnnnnnnnnnnnnnnnnnnnnnnnnnnnnnnnnnnnnnnnnnnnnnnnnnnnnnnnnnnnnnnnnnnnnccgtctctgctaaaatacaaaaattagctgggtgtggtggcgtatccctgtaacgccagctactagggaggctgaggcacgagaatcacttgaacctgggaggtggaggttacagtgagctgagatcacgccattgcactcaagcctgggcaataagagtgaaactct

SEQ ID NO: 29528 - DNA, 719 bp, Macaca Mulatta
cgtgttccagggccaggcccctgagttagcgctggctctgcctgatcggctatggcgtgcccctgctcatcgtgggcgtctcggctgccgtctacagcaagggctacggccgccccagatactgctggctggactttgagcagggcttcctctggagcttcctggggcctgtgacctttatcattttgtgcaatgctgtcattttcgtgactaccgtctggaagctcactcagaagttttctgaaatcaatccagacatgaagaaattaaagaaggcgagggcgctgaccatcacggccatcgcgcagctcttcctgttgggctgcacctgggtctttggcctgttcatcttcgatgatcggagcttggtgctgacctatgtgttcaccatcctcaactgcctgcagggcgccttcctctacctgctgcactgcctgctcaacaagaaggttcgggaggaataccggaagtgggcctgcctagttgccagcgggagcaagtactcagaattcacctctaccacgtctggcactggccacaatcagacccgggccctccgggcgtcagagtctggcatatgaaagcacatggttctggacggtccagcagctcctgtggccgcagcagctttgtacacgaagaccatccatcttcccttcgtccaccgcttctgtcccttccacctccctccctaagcccgtgtgtgccaccggagggag

SEQ ID NO: 29529 - DNA, 127 bp, Macaca Mulatta
ggtggcagccttgtgctttgttctggtgctgggctccctcgtgccctgccttcccgagttctcctccggctcccagactgtgaaggaagaccccatggccgcagacagcatctacacggccagccag

SEQ ID NO: 29530 - DNA, 1316 bp, Macaca Mulatta
  misc_feature (1)...(1316): n = A,T,C or G
gggaaggagaagatgactaatagaacactgatggattccaaccttcctttttttaaattttctccagtccctgggagcaagttgcannnnnnnnnnnnnnnnnnnnnnnnnnnnnnnnncttgtgctcagtcaccctgttcttgaggtctcttttctctactccatggttctcaacttatttggggggaaataccttgagcagaatacaatgggaaaagagtctctacccctttctgttcgaagttcatttttatcccttcctgtctcaacaaaaactgtatggaatcaccaccaccgagctctgtgggaaaaaagaaaaccctgctcccttcgctctgctggaagctggagggtgccgggcccctgtgtagtagtgcatagaattctagcttttttcctcctttctctgtatatcgggctcagagagtacactgtgtctctatgtgaatatggacagttagcatttaccaacatgtatctgtctactttctcttgtnnnnnnnnnnnnnnnnnnnttaaaaaaatggggttatagaaggtcagcaaagggtgggtttgagatgtttgggtgggttaagtgggcattttgacaacatggcttctcctttggcatgtttaattgtgatatttgacagacatccttgcagtttaagatgacacttttaaaaataaaattctctcctaatgatgacttgagccctgccactcaatgggagaatcagcagaacctgtaggatcttatttggaattgacattctctattgtaattttgttcctgtttatttttaaattttctttttgtttcactggaaaaggaaagatgatgctcagtttttaaacgttaaaaagtgtaacaaagttgcttttggtacaataaaaactaaattggtgtacaacaaagggattttgaaggctttttcctctccagccaaaaggaatgccttaactaatgaaccctttcccacggtttgggactttggtattaaaatatccctgggtcaaaaaccttttgtccaaccccaaaaccttccccaaaatttttttgagaaaacccacactttttgcccgggaatgaacccctccaggggcctatagttggggaattgggagnnnnnnnnnnnnnnnnnnnnnncccatggggatattaaaaaatcccccccacaaaactgggggaaaaaaccggggggtttccaattttttccacaattggggttttcccacaaaaaaggggttccccacaccaatttttggggaaaaacaaccaaaatgggcggnnnnnnnnnnnnnnnnnnnnnnnnnnnatataatggggtgc

SEQ ID NO: 29531 - DNA, 596 bp, Macaca Mulatta
  misc_feature (1)...(596): n = A,T,C or G
ctaaagctccatggaatagagattcctgaaaggagagattatgaaatggacaggcaatttctcatggaaataatggaaatcaatgaaaaacttgcagaagaggaaagtgaagctgccatgaaagagattgaatccatnnnnnnnnnnnnnnnnnnnnnnnnnnnnnnnnnnnnnnnnnnnnnnnnnnnnnnnnnnnnnnnnnnnnnnnnnnnnnnnnnnnnnnnnnnnnnnnnnnnnnnnnnnnnnnnnnnnnnnnnnnnnnnnnnnnnnnnnnnnnnnnnnnnnnnnnnnnnnnnnnnnnnnnnnnnnnnnnnnnnnnnnnnnnnnnnnntggctcacgcctgtaatcccagcactttgggaggccgaggcaggtggatcacgaggtcaggagttcaagaccagcctggtcaaggtggtgaaaccctgcctctacaaaaaatacaaaataattagccagacgtggtggcaggtgcctctaatcccagctacttgagaggctgaggcagagaattgcttccccaggaggcagaggttgcagtgagctgagatcatgccactgcactccagcctgggtaacagagcgagacttcatc

SEQ ID NO: 29532 - DNA, 145 bp, Macaca Mulatta
  misc_feature (1)...(145): n = A,T,C or G
agaactgtcacatgcttactttaaagaatatatgcttattggtaaggagatatatgtcaagttttaagaggtttgaaaaacaaatgcctcccattataagcgttcatacttcaccctcccaccactgtaaancccacaatccatg

SEQ ID NO: 29533 - DNA, 291 bp, Macaca Mulatta
atgtgctgtaccaagagtttgctcctggctgctttgatgtcagtgctgctactctacctctgcagtgaatcagaagcagcaagcaactttgactgctgtcttcgatatacagaccgtatccttcatcctaaatttattgtgggcttcacacagcagctggccaatgaaacctgtgacatcaatgctgtcgtctttcacacaaagaaagggttatctgtgtgcgcaaatccaaagcagacctgggtgaaacttattgtacgtcgcctcagcaaaaaaatcaacaagatgtaa

SEQ ID NO: 29534 - DNA, 680 bp, Macaca Mulatta
tcttatgaatagagacatattaaaataatgtttacatcttagaaaaaacatagatagtgctagtaatattacttataattccagtatatagattcagaaatacattttcattgtccaaaatcagcttcaacaaatggtttctggagacaaatcatttttttcattatcattgcataattagaactacaggttaatgatttattttttgactaaatgtgcaatttcttatcactagataactttcagtatcagtggtggttacttactacttaaatcagaggaaggattttataaaaataataaatttaattttaccaataaatattcccataatttagaaaaggatgtcaacttgctaatttcagaaataattattcattttttaaaaaccccttcttttaaagcatctacttgaagattggtataattttcataaaatgtcttttttttagtgtcccaaagatatcttggataaactattttgaacttcagatttcagatgaggcaacattttcttgagataattagccaaatttcttccatgttgaatggcacaaaatatttctgtgaaactaacaggaagatattttcagataactaggataacttgttgctttgtcacccagcctaattgaagagtggcagaagctactacaaaaagcaaccttttcattttcact

SEQ ID NO: 29535 - DNA, 813 bp, Macaca Mulatta
atcaggacttgagggatccgatcccctatggaatcccccagtctccatcctccatatcgtctttgccatcccacgctcctttgctcaatgggctggattacacggtggacagtaatttgggcatcattgcgcatgcagggcagggagtaagccagacgctgagagccatggctgggggacccacctctgacatctccacaggaagcagtgtaggctatcccgactttccaactagcccagcctcttggctcgatgaaatggatcatcctcctttttaaacttctctcctccccaccctacctgccatcctggcttgagagaatatcttcaaggatcaaaagagacttaccttttaaggatcgaaagtacgccaatgtgaatttccattattttcaatggaagtcctccgctgattcctagaaggctgtgagaccacagggcattgttttcctggggaagcagtgggagagcagcctcatctcagaacacagcacagggggtaatggcctagagctctagggacactggcttgttgggtctctcccctcctgttctgcttaggggcttgcctgctcagtgctttggtagcacaaggtgactgtgataggcccccttgggctttgggaactttgctccaactggtgtgtctcatgcaatgcctcccaaaatactgctctcatgagaactgagattcctgaggtagaggccacacagcccttgagtaaaataaaagtgatttctggaccacccatattgaaccctatatttcaaaatgaaaagatcagttattaaaggttagtgaacactttgatg

SEQ ID NO: 29536 - DNA, 413 bp, Macaca Mulatta
agactacgctgaattcgccgctttgaccaacccagtgtaccccagcgaccagaccacggcggagaagcagtccactgactcgggggccttctccataggccactaggcctctgtccagggacccacactcacaaaggctccaggcctccccacaggggaccctgcctgagcaagggggcatgggagggaagaggggctctcattgctgctgctcactccatgagcacagctgggacccgggtgtctgggcctcccactgctccagcggacaggcagtgccccctgctgagaccccaatctcaccttcactccttgcctgaccccatctgcttcctaggacctctggggcaggagcacctaagccgtccctttcccaaagagtagagatgatgatgtagaacagatggccacaa

SEQ ID NO: 29537 - DNA, 407 bp, Macaca Mulatta
  misc_feature (1)...(407): n = A,T,C or G
tgacaccgccatgatcaaccactctcgaaacctcaacatccagctcaagtggaagagacccccatagaatgnnnnnnnnnnnnnnnnnnnnnnnnnnnnnnnnnnnnnnnnnnnnnnnnnnnnnnnnnnnnnnnnnnnnnnnnnnnnnnnnnnnnnnnnnnnnnnnnnnnnnnnnnnnnnnnnnnnnnnnnnnnnnnnnnnnnnnnnnnnnnnnnnnnnnnnnnnnnnnnnnnnnnnnnnnnnnnnnnnnnnnnnnnnnnnnnnnnnnnnnngttacatccactaccagcctgcccaggaccggctgcaaccccacctcctggagatgctgattcagctgccagccaactcagtcaccaaggtttccatacggtttgagcgggcgctgctgaagtggaccgaataca

SEQ ID NO: 29538 - DNA, 348 bp, Macaca Mulatta
  misc_feature (1)...(348): n = A,T,C or G
gctgacaaaaactctgtgaaaacggatctgatgaaagcgccgatggtcatcatggactgggaggagtgttcaaagnnnnnnnnnnnnnnnnnnnnnnnnnnnnnnnnnnnnnnnnnnnnnnnnnnnnnnnnnnnnnnnnnnnnnnnnnnnnnnnnnnnnnnnnnnnnnnnnnnnnnnnnnnnnnnnnnnnnnnnnnnnnnncctgggtctcacacctttcatctgcaaaattggtgctttgctctttcttctacatggagtcatttttgaggcagaaaacatacccttggtcatagccttgagttgaaaatctttgagggcattttctgtccaaatgactgaaaaaat

SEQ ID NO: 29539 - DNA, 136 bp, Macaca Mulatta
aggagttttgtttgctttgaaagttcttaacaaccattattgccctggaggctttgtcaacattttgggctttcctgtaccgaacagatttgcttgttgggtcgaacttgtggctattcatttattctcaccaggg

SEQ ID NO: 29540 - DNA, 1077 bp, Macaca Mulatta
  misc_feature (1)...(1077): n = A,T,C or G
tagatgggaataaagaaagcgtgattactcatttcaaagaagagattggcaggctgcagttatgtttggctgaaaaggaaaatctgcaaaggactttcctgcttacaacctcaagtaaagaagnnnnnnnnnnnnnnnnnnagcaacttcgtaaggcagaggaacaggttcaggccactcggcaagaagttgtctttctggctaaagaacttagcgatgctgtcaatgtacgagacagaacaatggcagacctgcatactgcacgcttggaaaatgagaaagtgaaaaagcagttagctgatgcagtggcagaacttaaactgaatgctatgaaaaaagatcaggacaagactgatacactggaacacgaactaagaagagaagttgaagatctgaaactccgtcttcagatggctgcagaccattataaagaaaaatttaaggaatgccaaagactccaaaaacaaataaacaaactttcagatcaatcagctaataataataatgtcttcacaaagaaaatggggaatcaacagaaagtgaatgatgcttcagtaaacacagacccagccacttctgcctctactgtagatgtaaagccatcagcttctgcagcagagacagattttgacatagtaacaaaggggcaagtctgtgaaatgaccaaagaaattgctgacaaaacagaaaagtataataaatgtaaacaactcttgcaggatgagaaagcaaaatgcaataaatatgctgatgaacttgcaaaaatggagctgaaatggaaagaacaagtgaaaattgctgaaaatgtaaaatttgaactagctgaagtacaggacaattataaacttcaattggcagagaaagacaaagaaataagtggtctgacttcacatttggaaaacctctccaggggagaaggaacttaaaaggagtctagaanatcaagcagaaaggaaaatggaaggtcagaatttccagagtcctcaatgtctcaacacatgctcagagcaaaaatggttatgttctaacactatcaaatgcacaaccagtttctgcaatatgggtaatcccttatgc

SEQ ID NO: 29541 - DNA, 645 bp, Macaca Mulatta
ctctaaggccgaattcacttgtcggtaggaaatataaactggtacggaagatcgggtctggctccttcggggacatctatctggcgatcaacatcaccaacggcgaggaagtggcagtgaagctagaatctcagaaggccaggcatccccagttgctgtacgagagcaagctctacaagattcttcaaggtggggttggcatcccccacatacggtggtatggtcaggaaaaagactacaatgtactagtcatggatcttctgggacctagcctcgaagacctcttcaatttctgttcaagaaggttcacaatgaaaactgtacttatgttagctgaccagatgatcagtagaattgaatatgtgcatacaaagaattttatacacagagacattaaaccagataacttcctaatgggtattgggcgtcactgtaataagttattccttattgattttggtttggccaaaaagtacagagacaacaggacaaggcaacacataccatacagagaagataaaaacctcactggcactgcccgatatgctagcatcaatgcacatcttggtattgagcagagtcgccgagatgacatggaatcattaggataatgttcgatgtattttaatagaaccagcctgccat

SEQ ID NO: 29542 - DNA, 730 bp, Macaca Mulatta
  misc_feature (1)...(730): n = A,T,C or G
gggatccaagaacttttattggggaaaaactttttgaatgtcacctctgaggaaaatcttttgcaagaggaagcatcttacatggcatctgatcatacataccaaagagaaaccccacaagtgtcttcactgtgagaaaaccttctgttgccaaatgccatttgtcacctaaggagtcatattagaaaatcacacagcttagagccttattctccatctgaattcatcctggaaaaacacccagtggttattatgcacttaggaaaacctttagctccatctttgtcgttagtttacagtgcagtgttatctcaggaatttttataaaaagaggtgacagaaaaaatgaaatgcagacactgcttcttttatactgttgtcttatatgtacgtttctgtcccacatcaggaaagttagtaaggcaaggtctggaaacttactgaatgtctttgttctacaacattgtctcttctaaagaagcattgtttttatgagaaatatgaaagcttgagttatgaaatacttttatatttaaaggattaaaggaaaacatgaatgcgcacgtttttattccacccccttaaaactggtttaaagtctttgannnnnnnnnnnnnnnnnnnnnnntttttttaagggggtattgggaacactttaacccagaaatttttccttgggatccccatccggttggttttacttgaattggccaaaacctggtttggggaa

SEQ ID NO: 29543 - DNA, 745 bp, Macaca Mulatta
  misc_feature (1)...(745): n = A,T,C or G
tctccacccaggccattagggacccagaaatggctgatggcaccctggagctcgctcacaccagacccagctggactcacagcaaaccgcagggtccaagnggaagctgggtcctgcccaccaaggtcccagggaccctcctctgaggccccctctctcctttgtgtttagtcaatgtcagcagatggggagaggactgaaaggtctccctaaaggtacaagctgagaaacctgaatttnnnnnnnnnnnnnnnnnnnnnnnnnnnnnnnnnnnnnnnatgcagattgtgtaggggtcccccgcggatgcacaccggtgtgcactgatgtggagctgctccttcctgcttcctgggctccagacagaaacaccatatccctgcaccagcctctgcctcagctcttcacagtcagcacaccctctgcttcctgtcagggtcttctctgctgagtctggttatgggatccctttccatgcagagccatgctcccgtgccactgggtgtcaccttcaagcnnnnnnnnnnnnnnnnnnnnnnnnnnnnnnnnnnnnnnnngtttgccatcaaaggaagacttttattttggctgataaaattcagaaacatttaaagaacaaactatcttttgaaaaacatcgaaggttcagaaaacaagacaagaaacaaattgttgtaaaatttcaactcccctaaatttatctatgaacttagaactaatctaataaaaatagtatgatgtttca

SEQ ID NO: 29544 - DNA, 679 bp, Macaca Mulatta
acgagcgggcttctgggaacttggcagaggcagattagaaatactcaccagcgagcatcattgttgtctttctgggaactcattcccatgagatcagaacctcttcgaaagaagaagaaggtagatcctaaaaaagaccaagcagcaaaggagcgcttgaaaagaaggatccgaaaactggaaaaggctagtcaagagctaattcctattgaagattttattacccctctaaagttcttggataaagcaagacagcggcctcaggtggagctcacctttgaggagactgagaggagagctctgcttctgaagaagtggtccttgtacaagcagcaagagcataagatggagagggacaccatcagggccatgctagaagcccagcaggaagctcttgaggaactgcgactcgagtccccgaagctccatgctgaggccatcaagcgggatcccaacctgttcccctttgagagggaagggccatgttacacaccaccgatccctaactaccagccccctgaaggcaagtacagtgacgtcaccaaggtgtacacacaagtggagtttaagaaatagacttgcaggctgctatccttaacgtgctgcccctgagagtaggaatgaccagggttcaagtctgctttccgcagaatcaggcatgctgttattaaatactggt

SEQ ID NO: 29545 - DNA, 137 bp, Macaca Mulatta
agggaagtgccagtgaagccaccctggtggccctgctggccgctcggaccaaagcgatccatcggctgcaagcagcgtccccagagctcacacaggccgctatcatggagaagctggtggcttactcatcggatcag

SEQ ID NO: 29546 - DNA, 654 bp, Macaca Mulatta
  misc_feature (1)...(654): n = A,T,C or G
ggaaaccagaaggcggggttggtggtgtcctgggagcagtctggggagctggcaccacagccctggttttcctatgtgttggcttcatcttcannnnnnnnnnnnnnnnnnnnnnnnnnnnnnnnnnnnnnnnnnnnnnnnnnnnnnnnnnnnnnnnnnnnnnnnnnnnnnnnnnnnnnnnnnnnnnnnnnnnnnnnnnnnnnnnnnnnnnnnnnnnnnnnnnnnnnnnnnnnnnnnnnnnnnnnnnnnnnnnnnnnnnnnnnnnnnnnnnnnnnnnnnnnnnnnnnnnnnnnnnnnnnnnnnnnnnnnnnnnnnnnnnnnnnnnnnnnnnnnnnnnnnnnnnnnnnnnnnnnnnnnnnnnnnnnnnnnnnnnnnnnnnnnnnnnnnnnnnnnnnnnnnnnnnnnnnnnnnnnnnnnnnnnnnnnnnnnnnnnnnnnnnnnnnnnnnnnnnnnnnnnnnnnnnnnnnnnnnnnnnnnnnnnnnnnnnnnnnnnnnnnnnnnnnnnnnnnnnnnnnnnnnnnnnnnnnnnnnnnnnnnnnnnnnnnnnnnnnnnnnnnnnnnnnnnnnnnnnnnnnnnnnnnnnnnnnnnnnnnnnnnnnnnnnnnnnnnnnnnnnnnnnnnnnttataaggacagtagtcatattggattaggg

SEQ ID NO: 29547 - DNA, 1435 bp, Macaca Mulatta
  misc_feature (1)...(1435): n = A,T,C or G
gagactctacaggggcaggtaattcactggtccacaagcggtctcctttacgtcgaaaccaaaagaccccaacatccttgaccaagctgtctttacaggatggacataaagccaaaaagccagcatgtaaatttgaagagggtcaggatgtcctagctagatggtcagatggcttgttttatcttggcactatcaaaaaggcaagttactttaatnnnnnnnnnnnnnnnnnnnnnnnnnnnnnnnnnnnnnnnnnnnnnnnnnnnnnnnnnnnnnnnnnnnnnnnnnnnnnnnnnnnnnnnnnnnnnnnnnnnnnnnnnnnnnnnnnnnnnnnnnnnnnnnnnnnnnnnnnnnnnnnnnnnnnnnnnnnnnnnnnnnnnnnnnnnnnnnnnnnnnnnnnnnnnnnnnnnnnnnnnnnnnnnnnnnnnnnnnnnnnnnnnnnnnnnnnnnnnnnnnnnnnnnnnnnnnnnnnnnnnnnnnnnnnnnnnnnnnnnnnnnnnnnnnnnnnnnnnnnnnnnnnnnnnnnnnnnnnnnnnnnnnnnnnnnnnnnnnnnnnnnnnnnnnnnnnnnnnnnnnnnnnnnnnnnnnnnnnnnnnnnnnnnnnnnnnnnnnnnnnnnnnnnnnnnnnnnnnnnnnnnnnnnnnnnnnnnnnnnnnnnnnnnnnnnnnnnnnnnnnnnnnnnnnnnnnnnnnnnnnnnnnnnnnnnnnnnnnnnnnnnnnnnnnnnnnnnnnnnnnnnnnagattttatacgtttatatgctctgtctgcagttctggaccagaatacctcaaacgtctaccattacagtgnnnnnnnnnnnnnnnnnnnnnnnnnnnnnnnnnnnnnnnnnnnnnnnnnnnnnnnnnnnnnnnnnnnnnnnnnnnnnnnnnnnnnnnnnnnnnnnnnnnnnnnnnnnnnnnnnnnnnnnnnnnnnnnnnnnnnnnnnnnnnnnnnnnnnnnnnnnnnnnnnnnnnnnnnnnnnnnnnnnnnnnnnnnnnnnnnnnnngtctgggaaagaaataaagaagaagaagcatttgtttgggttgcgaattcgtgttcctcctgtgccaccaaatgtggctttcaaagcagagaaagaacctgaaggaacatctcatgaatttaaaattaaaggcagaaaggcatccaaacctatatctgattcaagnnnnnnnnnnnnnnnnnnnnnnnnnnnnnnnnnnnnnnnnnnnnnnnnnnnnnnnnnnnnnnnnnnnnnnnnnnnnnnnnnnnnnnnnnnnnnnnnnnnnnnnnnnnnnnnnnnnnnnnnnnnnnnnnnnnnnnnnnnnnnnnnnnnnnnnnnnnnngagaactgagggaactgcacattcatctaatacctcagatgtggatttcacgggtgcttccagtgcaaaagaaactacctcgtctagcatttccaggcattatgg

SEQ ID NO: 29548 - DNA, 834 bp, Macaca Mulatta
  misc_feature (1)...(834): n = A,T,C or G
ctcttcattgtgtctctgnttacactcggcgcggtttcctgggaagagtttagaggactctgagttcgggcacaagcaggcgactggtacccagattcacaaaacgtattatgattgatgagttctctgggtggaacgttggcttgacagctgaggacgaggatggacctaagataagatgtgagggattcatctaggaagttgggccttgtagctgaagcaatctgggcagaacctttactatattttattggtctcctttgagttttgctttatgtagtgcggagagcgagctgtccgctggtttgagtaactttgttgggatattgggatttttgtgtgacatagattaaatgtaaacatggattaaattgcttacacttaggggataaatgttcctgtttttattctacgatttaattccagaactgaaggatcatttgagttactgttaatgtttttaaaaaccttttatttctagtaaaatgtttattggaggcttgagctgggatacaagcaaaaaagatctgacagagtatttgtctcgatttggggaagttgtagactgcacaattaaaacagatccagtcactgggagatcaagaggatttggatttgtgcttttcaaagatgctgctagtgttgataaggttttggaactgaaagaacacaaactggatggcaaattgatagatcccaaaagggccaaagctttaaaagggaaagaaccccccaaaaaggttaaagtgggtggattgagcccggatacttctgaagaacaaattaaagaatattctggagcctttggagagattgaaaatattgaacttccca

SEQ ID NO: 29549 - DNA, 123 bp, Macaca Mulatta
aggtttctcaagatggcggccttcaagggtttggtgtccgcctatggggggcttctccgtgggctcctagcgggcccggcagcgaccagctggtctcggcttccagctcgcgggttcagggaa

SEQ ID NO: 29550 - DNA, 257 bp, Macaca Mulatta
gtagttgtgagacaacttcagcagaaacgaaatgatgtcttaaacaaacaatcgtcaacaaaagctttgctggatgcttcatcgcgtcactgcgtccatttagaaaatgagatgcaggattcaaggaagaaattagaccagataagaagtcaagtatgtatgaaactttgcacgccgaacaactgttaatctggagctggttaactcaatataaagtgtcggggtactaattttagtggatggcttcttttgtattt

SEQ ID NO: 29551 - DNA, 196 bp, Macaca Mulatta
atcctgcagacactgaaggagcaccaggtggtggtagtggccggtgacaccggctgtggcaagtccactcaggtgccccagtacctgctgactgctggcttcagtcacgtggcgtgtacccagccccggcggatcgcctgcatctcactggccaagcgtgtaggctttgagagccttagtcagtatggctcacagg

SEQ ID NO: 29552 - DNA, 969 bp, Macaca Mulatta
  misc_feature (1)...(969): n = A,T,C or G
gtgtccctgacaatggagacagccgacagtaatgagatggccctggaggccccacaacccacccacgtccatgtgcacatccaccaggagtctgcactggccaagctcctgctgacctgctgctctgcacaaaaaccccgggccacccaggccaggggcagcagccggctgctggtggcctcgtgggtgnnnnnnnnnnnnnnnnnnnnnnnnnnnnnnnnnnnnnnnnnnnnnnnnnnnnnnnnnnnnnnnnnnnnnnnnnnnnnnnnnnnnnnnnnnnnnnnnnnnnnnnnnnnnnnnnnnnnnnnnnnnnnnnnnnnnnnnnnnnnnnnnnnnnnnnnnnnnnnnnnnnnnnnnnnnnnnnnnnnnnnnnnnnnnnnnnnnnnnnnnnnnnnnnnnnnnnnnnnnnnnnnnnnnnnnnnnnnnnnnnnnnnnnnnnnnnnnnnnnnnnnnnnnnnnnnnnnnnnnnnnnnnnnnnnnnnnnnnnnnnnnnnnnnnnnnnnnnnnnnnnnnnnnnnnnnnnnnnnnnnnnnnnnnnnnnnnnnnnnnnnnnnnnnnnnnnnnnnnnnnnnnnnnnncccttcatgccatgctcttgggtgtctggattctgctgtttctggcatctctggcccctctgtggctgtactgctggagaaagttcccaaccaaagggngaaaagacaccagaaggagatgttggaagtgagctgaatctagccatgcctctcctgattattagcgcctggtgcttctgcactgcgcattcctgcatctgactgctggaagaannnnnnnnnnnnnnnnnnnnnnnnnnnnnnnnnnnnnnnnnnnnnnnnnnccatgaccatggccacaaccctgctccagcagcacttgcccattccttacgtcccttccccatcctgctccgcttcatgtcccctcctgagcagtcatgtgataataaactctcatgttattgttccc

SEQ ID NO: 29553 - DNA, 1595 bp, Macaca Mulatta
  misc_feature (1)...(1595): n = A,T,C or G
gggacaaggattcagacagagcccagagccctgaaaactttggtcacgcgctttcccgcagcagccacgggcaccggcaacttctgagagccagataaaagtggaatgaggaatgcagccgttctgaacaccaccctccatttcattctggaaccaggaaggtacacccaggcatgacaatagcttctctcctcacagaaaattaactgatttgttattaggcaccagcaaatgaaactgacagaagaaagattagcaagagaaaacaaaatttaattgctggagtgcaatggtacgatcttggctcactacaacctccacctcccaggttcaagcaattctcctgtctcagcttcccgggcnnnnnnnnnnnnnnnnnnnnnnnnngtgatctcnnnnnnnnnnnnnnnnnnnnnnnnnnnnnnnnnnatgtgagtcactgtgcctggctgaaatacagattgtgaagttatcactctatttcttcattctccatttagcaaagtcatggaagatttggaggaaacattatttgaagaatttgaaaactattcctatgccctagactattactctctggagtctgatttggaggaaaaagtccagctgggagttgttcactgggtctccctgggtgttatattgtttaatcttttgtcctggggaattccaggaaaatgccattggttatttgggttcaccgggggttcaagtggaagaagacagtcagcactctgtggttcctcaatctagccattgcggatttcatctttcttctcttcctgcccctgtacatctcctatgtggtcatgaatttccactggccctttggcatctggctgtgcaaagccaattccttcactgcccagttgaacatgtttgccagtgtttttttcctgacagtgatcagtctggaccactatatccacttgatccatcctgtcttatctcatcggcatcgaaccctcaagaactctctgattgtcattatattcatctggcttttggcttctctaattggcggtcctgccctatacttccgggacactgtggagtttaataatcatactctttgctataacaattttcagaagcatgatcctgacctcactgtgatcaggcaccatgttctgacctgggtgaaatttattgttggctatctcttccctttgctaacaatgagtatttgctacttgtgtctcatcttcaaggtgaagaagcgaagcatcctgatctccagtaggcatttctggacaattctggctgtggttgtggcctttgtggtttgctggactccttatcacctgtttagcatttgggagctcaccattcaccacaatagctattcccaccacgtgatgcaggctggaatccctctctccactggtttggcattcctcaatagttgcttgaaccccatcctttatgtcctaattagtaagaagttccaagctcgcttccggtcctcagttgctgagatactcaagtacacactgtgggaagtcagctgttctggcacagtgagtgaacagctcaggaactcagaaaccaagaatctgtgtctcctggaaacagcccaataagttattactttt

SEQ ID NO: 29554 - DNA, 819 bp, Macaca Mulatta
  misc_feature (1)...(819): n = A,T,C or G
taggtcccatagcaattttctgccctgagttcctcatggtcttgctttttgtgtctggtttctgctcacagattatggtgacaaactgaacatggaactgagtgagaatacaagctggacaaagagagctacccagtcttctacctcttccgggatggggactttgagaacccagtcccatacactggggcagttaaggttggagccatccagcgctggctgaaggggcaaggggtctacctaggtatgcctggttgcctgcctgtatatgacgctctcgccggggagttcatcaaggcctctggtgtggagggccgccaggccctcttgaagcgggggcaggacaacctctcaagtgtgaaggagactgagaagaagtgggccgagcaatacctgaagatcatggggaagatcttagaccaaggggaggacttcccagcatcagagatgactcggattgccaggctgattgacaagaacaagatgagtgatgggaagaaggaggagctccagaagagcttanacatcctgactgccttccagaagaaggtggccgagaaagaggagctttaaaaggccgtctgtggttttccagggtttgggtggggataggggaggcgcagagttacacctgctggctgctgagtcccttgtggaatataatggaggtagtcgtgaaaaatggtactaacccacgagtctgagccctgagtatgcctggacattgatgctgatgtgaccatgcttgggatgtctctagctggtctgggatagctggagcacttactcaggtggctggatgaatgacccctcagaagc

SEQ ID NO: 29555 - DNA, 1825 bp, Macaca Mulatta
  misc_feature (1)...(1825): n = A,T,C or G
agccatccctgggcgcctgcgtggtggagctggagcttccctcgcactggttctcccaggcctccaccacacnnnnnnnnnnnnnnnnnnnnnnnnnnnnnnnnnnnnnnnnnnnnnnnnnnnnnnnnnnnnnnnnnnnnnnnnnnnnnnnnnnnnnnnnnnnnnnnnnnnnnnnnnnnnnnnnnnnnnnnnnnnnnnnnnnnnnnnnnnnnnnnnnnnnnnnnnnnnnnnnnnnnnnnnnnnnnnnnnnnnnnnnnnnnnnnnnnnnnnnnnnnnnnnnnnnnnnnnnnnnnnnnnnnnnnnnnnnnnnnnnnnnnnnnnnnnnnnnnnnnnnnnnnnnnnnnnnnnnnnnnnnnnnnnnnnnnnnnnnnnnnnnnnnnnnnnnnnnnnnnnnnnnnnnnnnnnnnnnnnnnnnnnnnnnnnnnnnnnnnnnnnnnnnnnnnnnnnnnnnnnnnnnnnnnnnnnnnnnnnnnnnnnnnnnagtccccttgaactgtttgagttcctgtgggtggacttcgtggtggagaatagcactggtgggggcgtagcggtcactcgccccgtcacgtggcagctggagtaccccggccaggcccctgaagcagagaaggacaaaatggtgtgggaaatcctggtgtcagagcgagacatcagagcccttatcccactggccaaggtaaggagacctccatctctgccggggaaggctggaggccaagtcccaggagcccatgctgagggacctggggctgagcccctcctccacccccaggctgaggagctggtgaatacagcaccactgactggagtgccccagcatgtccccgtgcgccttgtcactgtggacggcgggggggccttggtggaggtgacagagcatgtcggctgtgagtcggccaacacgcaggtcctgcaggtgagtggcaggtacccagctcatgtgagtctgcatttgtgtgggcacagttacacacacacccctttcctccttcctcatgtgggtccccaagagaacagcttcttcttgagaccagaaacctcatgggaggaaccacagcttcaatttcttttgttccagccacctctctcccaaatcaagtncaagtaaccctaacagtccccaaccttagacactttcatgctcattattgcatgggcaggtgagctggcctgagagttgagagcacgtactttgtgatcagaaagttttagtttgaaacacatccttgttgtcaaccagctgtgtgatcatgggctgatctcctaacctctctgagcctcgttccctaaattttaaaatgggaacatatctttgggttgttgtaagaattaaaagcaccttaagacaatattcggcagacagcaggggctgaaacaatggcgcctattgctgttataatatgatgtaataattatataatggtaaaaattattattattattnnnnnnnnnnnnnnnnnnnnnnnnnnnnnnnnnnnnngtagaggaactttcttatcttgaagttctaagaggggaagcatggagcctgcatgtatgcaaatcgcagccacctgaagggagaaggtgcctttccccacttgtggcgccctttgctcaaatgtgtgtggttcctgctggagggccttggtggggagatctgctttgccccacctctgcctacctggctgtagctggctgccagggggctccaagagcaatgtcaaaggccagcacgaataaggagccaaagttttgggttcacacccctgctctgccaggaggcagactggtatgcaatggccagttcccctgactgaaccccagggaaactcaaggaatg

SEQ ID NO: 29556 - DNA, 848 bp, Macaca Mulatta
gggtataatatgctattaatacacattagatgatgacaattgttccatgaatgattctatgaagctatgcatcttagacctcttgagctgtgaattagcactattttctatagttacttattctctggatcattttataatttccatatttcaaatatgctcgtgttattcttcagtgatttccacaattgtgcattttattctttggtttaagtactgaagcatataatgaaagtaattgctaagtagcagcttaaaaattcaattatcagattgtatttaacatctttaagagcatgatcatgaagagctatttttgacaccccccctccctacttttttaacatttagagttaataagggttttatatttcatctgtccatactgttttcaaaggaatgaggtgtttaggtaggtggaaaagcatttgtaggaagttaaatttgaatatagacaaggtgggttattcacgttgagaatgttatttgaaaaacgcctgtgaaaccaggggtggggttctaccttagtgcaaaaaaaggaactgatccttcccctgtaggtcaacctttacaaagaaattttggattcctgaatttcccaataaaattaattgaatttagaccggacctctaattttttaaattcgggtaacttaaatttatttttgaagttcttaaggattgaattaaaatatttgccgagattaaaaattattattttagggcctttccttttaaatgggcactaaaatgtcctcgggataatagtaatttgtttataaaaaaaggcatacggtaaacctctttataccttcttctgaacgtaaatagtaccacacatttttttt

SEQ ID NO: 29557 - DNA, 477 bp, Macaca Mulatta
  misc_feature (1)...(477): n = A,T,C or G
gatccacatccagcgaactgaagcacgngcccatatgacctgctcacaatgtaacactaatttttgttaccgatgtggtgannnnnnnnnnnnnnnnnnnnnnnnnggagaccacacatcaaacctcagtatatttggatgcaaatatcgctacctcccagagagacctcatttaaggagattagtgcgagggtcagtctgtnnnnnnnnnnnnnnnnnnnnnnnnnnnnnnnnnnnnnnnnnnnnnnnnnnnnnnnnnnnnnnnnnnnnnnnttgaagaaattaagacttactaggacctcataagtggtagaactggcaatcaaacccaacatttggctccacagcctgtattgttaagtgatacgccatactgcctgaaacaagtngtttatttgtatttcctatctattgcctttgtaaaaaacagagaaaacgatcacggacaggtatgcactggtagcacgcggatgattt

SEQ ID NO: 29558 - DNA, 625 bp, Macaca Mulatta
  misc_feature (1)...(625): n = A,T,C or G
gtggcggaggctatggtagcggaggctatggtggcagccccaactcctttcgaggcaggatatggtgcaggtgttggtggaggctatagaggagttcccgaggtggctttagaggcaactctggaggagactacagagggcctagtggaggctacagaggatctgggggattccagcgaggaggtggtaggggggcctatggaggtggctactttggacaggggagaggaggtggtggctattaaatcttggttatgtcagttcctgtgtgtagacagtaaggaaaaaaaggcatgctatgtgttacgtgttttttccaatatgtttatttgccaccaaaaagtaaatgcattttcacccattctgtggttcattgtagtttaaggaaaccaagcatatagatgcattagtgattttgtttatattatgtaaaatataacgatctatcttaaaaataccacagtttgtatttattactttaaggagtaaagatttgcctttaaataacttggtattttcctggctttcgtttaatacagtagaaaataaagtattacaccgnnnnnnnnnnnnnnnnnnnnnnnnnnnnnnnnnnnnnnnnnnnnnnnnnnnnnnnnnnnnnnnn

SEQ ID NO: 29559 - DNA, 1016 bp, Macaca Mulatta
  misc_feature (1)...(1016): n = A,T,C or G
cagggcctctgactcgcgccggcccgcattcctgctcctgtgccacttgcccctgcagctctgcttgctggcgtcgtctggggctgtgccatagccgcaagttcgatgtccttctgcctcgggactggcagatggcgccagggagaggactccccaacctgctcaccttctnnnnnnnnnnnnnnnnnnnnnnnnnnnnnnnnnnnnnnnnnnnnnnnnnnnnnnnnnnnnnnnnnnnnnnnnnnnnnnnnnnnnnnnnnnnnnnnnnnnnnnnnnnnnnnnnnnnnnnnnnnnnnnnnnnnnnnnnnnnnnnnnnnnnnnnnnnnnnnnnnnnnnnnnnnnnnnnnnnnnnnnnnnnnnnnnnnnnnnnnnnnnnnnnnnnnnnnnnnnnnnnnnnnnnnnnnnnnnnnnnnnnnnnnnnnnnnnnnnnnnnnnnnnnnnnnnnnnnnnnnnnnnnnnnnnnnnnnnnnnnnnnnnnnnnnnnnnnnnnnnnnnnnnnnnnnnnnnnnnnnnnnnnnnnnnnnnnnnnnnnnnnnnnnnnnnnnnnnnnnnnnnnnnnnnnnnnnnnnnnnnnnnnnnnnnnnnnnnnnnnnnnnnnnnnnnnnnnnnnnnnnnnnnnnnnnnnnnnnnnnnnnnnnnnnnnnnnnnnnnnnnnnnnnnnnnnnnnnnnnnnnnnnnnnnnnnnnnnnnnnnnnnnnnnnnnnnnnnnnnnnnnnnnnnnnnnnnnnnnnnnnnnnnnnnnnnnnnnnnnnnnnnnnnnnnnnnnnnnnnnnnnnnnnnnnnnnnnnnnnnnnnnnnnnnnnnnnnnnnnnnnnnnnnnnnnnnnnnnnnnnnnnnnnnnnnnnnnccctcaatgtcctcctcagatttgtcctgcccttcttgttccatacttggggtcccaagaactgctgcctgatgcctctactatcattacctctgttggggcccagaaaccaataccccaaaatatggtgcctggacatcctgaattgaagaagatgcctcaaggcaag

SEQ ID NO: 29560 - DNA, 474 bp, Macaca Mulatta
tcatacagagcagcaaactctgtttctttggcattctgtttaatgggctgactctgggccttcagaggagtaactgtgatcagattaagaactgtggaatttattatggccacaatgcattttcagtagcccttatttttgtaactgcattccagggcctttcagtggttttcactctgaagttcctggacaacatgttccatgtcttaagggcccagaataccactgtcattatcacaacagtgtctgtcctggtctttgacttcaggccctccctggaatttttcttggaagccccatcagtccttgtctctatatttatttatattgccagcaagcctcaaggtccagaatacacacctaggcaagaaaggatccgagatctaagtggcaatctttgagagagttccagtggggatggagaagaactagaaagacttgccaaacccaagagtgatgaatcagatgaagata

SEQ ID NO: 29561 - DNA, 358 bp, Macaca Mulatta
  misc_feature (1)...(358): n = A,T,C or G
agtgtgatgggcaatatattcctcttcccagcgtgcaaggcatagctgtgttgaacattcccagctatgaggaggcactaacttttggggtgnnnnnnnnnnnnnnnnnnnnnnnnnnnnnnnnnnnnnnnnnnnnnnnnnnnnnnnnnnnnnnnnnnnnnnnnnnnnnnnnnnnnnnnnnnnnnnnnnnnnnnnnnnnnnnnnnnnnnnnnnnnnnnncagtgccgtacagtaaaaatcactatatttggtgacgaaggagtcccagtgcaagtggatggtgaagcatgggttcagcctccagggattatcaaaattgtgcacaaaaacagagcacaaatgctaacaagggacagag

SEQ ID NO: 29562 - DNA, 554 bp, Macaca Mulatta
gtgtctccaacattctgaatcactattactgtgactatgggcctctcatggagcttgcctgctcagacacaagactcttagaactgatggtcattctcctggctgttgtgactcttgtggttactctggtactggtgacactttcttacatatacattatcaggactattctgatgatcccttctgtccagcaaaggacaaaggccttttccacttgttcctcccacatgattgtcatttcgctctcttatggaagctgcatgtttatgtacattaatccttctgcaaaagaaggaggtgctttcaacaaaggaatagctgtactcattacttcagttactcccctgttgaatcccttcatatatactttaagaaatcagcaagtgaaacaagctttcaaggactcggtcaaaaagattgtgaaactttaaaaacggagattacacttcaataaaaaatatattttcacttaacaaatatgcattgaatgtctgtatttccagtgctaaattggcccttgaagataaaaataggaaaagtatatgtcttaatta

SEQ ID NO: 29563 - DNA, 551 bp, Macaca Mulatta
  misc_feature (1)...(551): n = A,T,C or G
tagcaactgtaaactattgctcagtgagaatcactcaacagtaaaagtttgttccagttacgaagtggacacaaagttactttctttgatacatttacctgttaaagagtctcatgattattattcattgggtgacattgtttgcaatggacacagtctnnnnnnnnnnnnnnnnnnnnnnnnnnnnnnnnnnnnnnnnnnnnnnnnnnnnnnnnnnnnnnnnnnnnnnnnnnnnnnnnnnnnnnnnnnnnnnnnnnnnnnnnnnnnnnnnnnnnnnnnnnnnnnnnnnnnnnnnnnnnnnnnnnnnnnnnnnnnnnnnnnnnnnnnnnnnnnnnnnnnnnnnnnnnnnnnnnnnnnnnnnnnnnnnnnnnnnnnnnnnnnnnnnnnnnnnnnnnnnnnnnnnnnnnnnnnnnnnnnnnnnnnnnnnnnnnnnnnnnnnnnnnnnnnnnnnnnnccagaagctaacattctactgaattttatacgagaaaataaagaaacaaatgttctggatgacgaaattgaaagttatttcaaagaatccataaatt

SEQ ID NO: 29564 - DNA, 359 bp, Macaca Mulatta
  misc_feature (1)...(359): n = A,T,C or G
gaaatttcagcagatttcaaggagccgccatccctgccagggaaggagaagccatccccgaagacagcctgtgggtcccccctggcagcacagccatcaccctctgctgagctcccccaggctgccccacctccgccgggctcaccctccctccctgggcgcctggaggacttcctggagagcagcacggggctgcccctgctgacagtgngcatgaggngccagagcccctttccctcattgatgacctccatagccagatgctgagcagcactgccatccnntggacaccccctgtcaccatggacacctcggaattgcactttgctcctgagcccagcagcacatgggcctggact

SEQ ID NO: 29565 - DNA, 6278 bp, Macaca Mulatta
  misc_feature (1)...(6278): n = A,T,C or G
agcttttcttagtgacactaaagatcgaggccctccagtgcagtcacagatctggagaagtggcgaaaaggtcccctttgtgcagacatattccttgagagcatttgagaaacctcctcaggtacagacccaggctcttcgagactttgagaagnnnnnnnnnnnnnnnnnnnnnnnnnnnnnnnnnnnnnnnnnnnnnnnnnnnnnnnnnnnnnnnnnnnnnnnnnnnnnnnnnnnnnnnnnnnnnnnnnnnnnnnnnnnnnnnnnnnnnnnnnnnnnnnnnnnnnnnnnnnnnnnnnnnnnnnnnnnnnnnnnnnnnnnnnnnnnnnnnnnnnnnnnnnnnnnnnnnnnnnnnnnnnnnnnnnnnnnnnnnnnnnnnnnnnnnnnnnnnnnnnnnnnnnnnnnnnnnnnnnnnnnnnnnnnnnnnnnnnnnnnnnnnnnnnnnnnnnnnnnnnnnnnnnnnnnnnnnnnnnnnnnnnnnnnnnnnnnnnnnnnnnnnnnnnnnnnnnnnnnnnnnnnnnnnnnnnnnnnnnnnnnnnnnnnnnnnnnnnnnnnnnnnnnnnnnnnnnnnnnnnnnnnnnnnnnnnnnnnnnnnnnnnnnnnnnnnnnnnnnnnnnnnnnnnnnnnnnnnnnnnnnnnnnnnnnnnnnnnnnnnnnnnnnnnnnnnnnnnnnnnnnnnnnnnnnnnnnnnnnnnnnnnnnnnnnnnnnnnnnnnnnnnnnnnnnnnnnnnnnnnnnnnnnnnnnnnnnnnnnnnnnngcccgtgactgaagagttactcaaacaacaaaagctgaattcacatgagaccactataactcagcagtctgtatctgattcccacttggcagaactccaggaaaaaatccagcaaacagaggccaccaacaagnnnagattcttcaagagaaacttaatgaaatgagctatgaactaaagtgtgctcaggagtcgtctcaaaagcaagatggtacaattcagaacctcaaggaaactctgaagagcagggaaagtgannnnnnnnnnnnnnnnnnnnnnnnnnnnnnnnnnnnnnnnnnnnnnnnnnnnnnnnnnnnnnnnnnnnnnnnnnnnnnnnnnnnnnnnnnnnnnnnnnnnnnnnnnnnnnnnnnnnnnnnnnnnnnnnnnnnnnnnnnnnnnnnnnnnnnnnnnnnnnnnnnnnnnnnnnnnnnnnnnnnnnnnnnnnnnnnnnnnnnnnnnnnnnnnnnnnnnnnnnnnnnnnnnnnnnnnnnnnnnnnnnnnnnnnnnnnnnnnnnnnnnnnnnnnnnnnnnnnnnnnnnnnnnnnnnnnnnnnnnnnnnncaggaattgcggaaagccttgcagcagctacaagaagaattgcagaataagagccaacagcttcgtgcccgggaggctgaaaaatacaatgagattcgaacccaggaacaaaacatccagcacctaaaccatagtctgagtcacaaggagcaattgcttcagnnnnnnnnnnnnnnnnnnnnnnnnnnnnnnnnnnnnnnnnnnnnnnnnnnnnnnnnnnnnnnnnnnnnnnnnnnnnnnnnnnnnnnnnnnnnnnnnnnnnnnnnnnnnnnnnnnnnnnnnnnnnnnnnnnnnnnnnnnnnnnnnnnnnnnnnnnnnnnnnnnnnnnnnnnnnnnnnnnnnnnnnnnnnnnnnnnnnnnnnnnnnnnnnnnnnnnnnnnnnnnnnnnnnnnnnnnnnnnnnnnnnnnnnnnnnnnnnnnnnnnnnnnnnnnnnnnnnnnnnnnnnnnnnnnnnnnnnnnnnnnnnnnnnnnnnnnnnnnnnnnnnnnnnnnnnnnnnnnnnnnnnnnnnnnnnnnnnnnnnnnnnnnnnnnnnnnnnnnnnnnnnnnnnnnnnnnnnnnnnnnnnnnnnnnnnnnnnnnnnnnnnnnnnnnnnnnnnnnnnnnnnnnnnnnnnnnnnnnnnnnnnnnnnnnnnnnnnnnnnnnnnnnnnnnnnnnnnnnnnnnnnnnnnnnnnnnnnnnnnnnnnnnnnnnnnnnnnnnnnnnnnnnnnnnnnnnnnnnnnnnnnnnnnnnnnnnnnnnnnnnnnnnnnnnnnnnnnnnnnnnnnnnnnnnnnnnnnnnnnnnnnnnnnnnnnnnnnnnnnnnnnnnnnnnnnnnnnnnnnnnnnnnnnnnnnnnnnnnnnnnnnnnnnnnnnnnnnnnnnnnnnnnnnnnnnnnnnnnnnnnnnnnnnnnnnnnnnnnnnnnnnnnnnnnnnnnnnnnnnnnnnnnnnnnnnnnnnnnnnnnnnnnnnnnnnnnnnnnnnnnnnnnnnnnnnnnnnnnnnnnnnnnnnnnnnnnnnnnnnnnnnnnnnnnnnnnnnnnnnnnnnnnnnnnnnnnnnnnnnnnnnnnnnnnnnnnnnnnnnnnnnnnnnnnnnnnnnnnnnnnnnnnnnnnnnnnnnnnnnnnnnnnnnnnnnnnnnnnnnnnnnnnnnnnnnnnnnnnnnnnnnnnnnnnnnnnnnnnnnnnnnnnnnnnnnnnnnnnnnnnnnnnnnnnnnnnnnnnnnnnnnnnnnnnnnnnnnnnnnnnnnnnnnnnnnnnnnnnnnnnnnnnnnnnnnnnnnnnnnnnnnnnnnnnnnnnnnnnnnnnnnnnnnnnnnnnnnnnnnnnnnnnnnnnnnnnnnnnnnnnnnnnnnnnnnnnnnnnnnnnnnnnnnnnnnnnnnnnnnnnnnnnnnnnnnnnnnnnnnnnnnnnnnnnnnnnnnnnnnnnnnnnnnnnnnnnnnnnnnnnnnnnnnnnnnnnnnnnnnnnnnnnnnnnnnnnnnnnnnnnnnnnnnnnnnnnnnnnnnnnnnnnnnnnnnnnagctctgagagagaccgaactctgcaggtggaactggaaggggctcaggtgttacgcagtcggctagaagaagttcttggaagaagcttggaccgcttaaacaggctggagaccctggccgccattggaggtnnnnnnnnnnnnnnnnnnnnnnnnnnnnnnnnnnnnnnnnnnnnnnnnnnnnnnnnnnnnnnnnnnnnnnnnnnnnnnnnnnnnnnnnnnnnnnnnnnnnnnnnnnnnnnnnnnnnnnnnnnnnnnnnnnnnnnnnnnnnnnnnnnnnnnnnnnnnnnnnnnnnnnnnnnnnnnnnnnnnnnnnnnnnnnnnnnnnnnnnnnnnnnnnnnnnnnnnnnnnnnnnnnnnnnnnnnnnnnnnnnnnnnnnnnnnnnnnnnnnnnnnnnnnnnnnnnnnnnnnnnnnnnnnnnnnnnnnnnnnnnnnnnnnnnnnnnnnnnnnnnnnnnnnnnnnnnnnnnnnnnnnnnnnnnnnnnnnnnnnnnnnnnnnnnnnnnnnnnnnnnnnnnnnnnnnnnnnnnnnnnnnnnnnnnnnnnnnnnnnnnnagttggataaccagtcccagcctcgtgaccctgggcctcagtcagcgtttagcctactagggtccacccagcacctgcgctcccagctgtcacaatgcaaacaacgctatcaagatctccaggagaagctgctgctatcagaagccactgtctttgctcaggctaatgagctggagaaatacagagttatacttnnnnnnnnnnnnnnnnnnnnnnnnnnnnnnnnnnnnnnnnnnnnnnnnnnnnnnnnnnnnnnnnnnnnnnnnnnnnnnnnnnnnnnnnnnnnnnnnnnnnnnnnnnnnnnnnnnnnnnnnnnnnnnnnnnnnnnnnnnnnnnnnnnnnnnnnnnnnnnnnnnnnnnnnnnnnnnnnnnnnnnnnnnnnnnnnnnnnnnnnnnnnnnnnnnnnnnnnnnnnnnnnnnnnnnnnnnnnnnnnnnnnnnnnnnnnnnnnnnnnnnnnnnnnnnnnnnnnnnnnnnnnnnnnnnnnnnnnnnnnnnnnnnnnnnnnnnnnnnnnnnnnnnnnnnnnnnnnnnnnnnnnnnnnnnnnnnnnnnnnnnnnnnnnnnnnnnnnnnnnnnnnnnnnnnnnnnnnnnnnnnnnnnnnnnnnnnnnnnnnnnnnnnnnnnnnnnnnnnnnnnnnnnnnnnnnnnnnnnnnnnnnnnnnnnnnnnnnnnnnnnnnnnnnnnnnnnnnnnnnnnnnnnnnnnnnnnnnnnnnnnnnnnnnnnnnnnnnnnnnnnnnnnnnnnnnnnnnnnnnnnnnnnnnnnnnnnnnnnnnnnnnnnnnnnnnnnnnnnnnnnnnnnnnnnnnnnnnnnnnnnnnnnnnnnnnnnnnnnnnnnnnnnnnnnnnnnnnnnnnnnnnnnnnnnnnnnnnnnnnnnnnnnnnnnnnnnnnnnnnnnnnnnnnnnnnnnnnnnnnnnnnnnnnnnnnnnnnnnnnnnnnnnnnnnnnnnnnnnnnnnnnnnnnnnnnnnnnnnnnnnnnnnnnnnnnnnnnnnnnnnnnnnnnnnnnnnnnnnnnnnnnnnnnnnnnnnnnnnnnnnnnnnnnnnnnnnnnnnnnnnnnnnnnnnnnnnnnnnnnnnnnnaggatcataaaagtgagaaagatcaagctggacttgagccactggccctcagnnnnnnnnnnnnnnnnnnnnnnnnnnnnnnnnnnnnnnnnnnnnnnnnnnnnnnnnnnnnnnnnnnnnnnnnnnnnnnnnnnnnnnnnnnnnnnnnnnnnnnnnnnnnnnnnnnnnnnnnnnnnnnnnnnnnnnnnnnnnnnnnnnnnnnnnnnnnnnnnnnnnnnnnnnnnnnnnnnnnnnnnnnnnnnnnnnnnnnnnnnnnnnnnnnnnnnnnnnnnnnnnnnnnnnnnnnnnnnnnnnnnnnnnnnnnnnnnnnnnnnnnnnnnnnnnnnnnnnnnnnnnnnnnnnnnnnnnnnnnnnnnnnnnnnnnnnnnnnnnnnnnnnnnnnnnnnnnnnnnnnnnnnnnnnnnnnnnnnnnnnnnnnnnnnnnnnnnnnnnnnnnnnnnnnnnnnnnnnnnnnnnnnnnnnnnnnnnnnnnnnnnnnnnnnnnnnnnnnnnnnnnnnnnnnnnnnnnnnnnnnnnnnnnnnnnnnnnnnnnnnnnnnnnnnnnnnnnnnnnnnnnnnnnnnnnnnnnnnnnnnnnnnnnnnnnnnnnnnnnnnnnnnnnnnnnnnnnnnnnnnnnnnnnnnnnnnnnnnnnnnnnnnnnnnnnnnnnnnnnnnnnnnnnnnnnnnnnnnnnnnnnnnnnnnnnnnnnnnnnnnnnnnnnnnnnnnnnnnnnnnnnnnnnnnnnnnnnnnnnnnnnnnnnnnnnnnnnnnnnnnnnnnnnnnnnnnnnnnnnnnnnnnnnnnnnnnnnnnnnnnnnnnnnnnnnnnnnnnnnnnnnnnnnnnnnnnnnnnnnnnnnnnnnnnnnnnnnnnnnnnnnnnnnnnnnnnnnnnnnnnnnnnnnnnnnnnnnnnnnnnnnnnnnnnnnnnnnnnnnnnnnnnnnnnnnnnnnnnnnnnnnnnnnnnnnnnnnnnnnnnnnnnnnnnnnnnnnnnnnnnnnnnnnnnnnnnnnnnnnnnnnnnnnnnnnnnnnnnnnnnnnnnnnnnnnnnnnnnnnnnnnnnnnnnnnnnnnnnnnnnnnnnnnnnnnnnnnnnnnnnnnnnnnnnnnnnnnnnnnnnnnnnnnnnnnnnnnnnnnnnnnnnnnnnnnnnnnnnnnnnnnnnnnnnnnnnnnnnnnnnnnnnnnnnnnnnnnnnnnnnnnnnnnnnnnnnnnnnnnnnnnnnnnnnnnnnnnnnnnnnnnnnnnnnnnnnnnnnnnnnnnnnnnnnnnnnnnnnnnnnnnnnnnnnnnnnnnnnnnnnnnnnnnnnnnnnnnnnnnnnnnnnnnnnnnnnnnnnnnnnnnnnnnnnnnnnnnnnnnnnnnnnnnnnnnnnnnnnnnnnnnnnnnnnnnnnnnnnnnnnnnnnnnnnnnnnnnnnnnnnnnnnnnnnnnnnnnnnnnnnnnnnnnnnnnnnnnnnnnnnnnnnnnnnnnnnnnnnnnnnnnnnnnnnnnnnnnnnnnnnnnnnnnnnnnnnnnnnnnnnnnnnnnnnnnnnnnnnnnnnnnnnnnnnnnnnnnnnnnnnnnnnnnnnnnnnnnnnnnnnnnnnnnnnnnnnnnnnnnnnnnnnnnnnnnnnnnnnnnnnnnnnnnnnnnnnnnnnnnnnnnnnnnnnnnnnnnnnnnnnnnnnnnnnnnnnnnnnnnnnnnnnnngctactgatggctcctttgccaataagcatggccgccatgtcattggccacatggatgactacagtgccctaagacagcagattgtggagggcaagctgctggccaaaaagagtgtctcttgtgaggtcagcgtgcagcttccctggccttgaagcccaaggcacagagg

SEQ ID NO: 29566 - DNA, 349 bp, Macaca Mulatta
actggaagctgctggtcatatgtcttcatctctgactctggagaggtgggataaaaggatgttccactttgtctccctcttttttgtcccagagagttagggaaattgaaaagggacagtccagacctcacactggtaggggagatcccttggataggtgtcctgctcccccctgcaaattcctttgtgccctgtttccccaaccccagttcatgatttggcagatcccctctccacagaaggtagcatgtagatggagaaactgaggcacaaactagggatgcaaacacctcttgctctttgattctctgaatcagtttctcttgagggtcataagaatgttctcctc

SEQ ID NO: 29567 - DNA, 495 bp, Macaca Mulatta
  misc_feature (1)...(495): n = A,T,C or G
gaaatccacagactttaactcgtttctataaattatgattttaaattttcagataagaattgcatggggttatggatgtatgtgcccttaaaagctacagataccaaattttccttgtccaggtctattcggatgaattttcccccttaatctggccttaaactgaaactcagccctcgagagccagggcctggcccagcagtagttgctcatagaactgggaagcaggggcctgctggaaagaatcactggatcactgcaaaaactcacataatccacaggttacnnnnnnnnnnnnnnnnnnnngttatcaaaatgttttaaaaacactttatgagaccatagtactcagtgccttttgtgagatggtgggtcatttagttttcagcttccctgttattgatgtagagaaagcttctaatttcactgggcctcatcccacaagattgtgcgacctttccctgttacagcctgtcggtgaacatcatgctattg

SEQ ID NO: 29568 - DNA, 1912 bp, Macaca Mulatta
  misc_feature (1)...(1912): n = A,T,C or G
acaaatgcaagattattatctgatcatgccaaaccaactgctgaaatggtagcacccgacaacactgcaatccccaatttaagggctgaagatgcagaaaatgaaaaagaaacagcagtatccccagaagaccattcccaccgtaaggnnnnnnnnnnnnnnnnnnnnnnnnnnnnnnnnnnnnnnnnnnnnnnnnnnnnnnnnnnnnnnnnnnnnnnnnnnnnnnnnnnnnnnnnnnnnnnnnnnnnnnnnnnnnnnnnnnnnnnnnnnnnnnnnnnnnnnnnnnnnnnnnnnnnnnnnnnnnnnnnnnnnnnnnnnnnnnnnnnnnnnnnnnnnnnnnnnnnnnnnnnnnnnnnnnnnnnnnnnnnnnnnnnnnnnnnnnnnnnnnnnnnnnnnnnnnnnnnnnnnnnnnnnnnnnnnnnnnnnnnnnnnnnnnnnnnnnnnnnnnnnnnnnnnnnnnnnnnnnnnnnnnnnnnnnnnnnnnnnnnnnnnnnnnnnnnnnnnnnnnnnnnnnnnnnnnnnnnnnnnnnnnnnnnnnnnnnnnnnnnnnnnnnnnnnnnnnnnnnnnnnnnnnnnnnnnnnnnnnnnnnnnnnnnnnnnnnnnnnnnnnnnnnnnnnnnnnnnnnnnnnnnnnnnnnnnnnnnnnnnnnnnnnnnnnnnnnnnnnnnnnnnnnnnnnnnnnnnnnnnnnnnnnnnnnnnnnnnnnnnnnnnnnnnnnnnnnnnnnnnnnnnnnnnnnnnnnnnnnnnnnnnnnnnnnnnnnnnnnnnnnnnnnnnnnnnnnnnnnnnnnnnnnnnnnnnnnnnnnnnnnnnnnnnnnnnnnnnnnnnnnnnnnnnnnnnnnnnnnnnnnnnnnnnnnnnnnnnnnnnnnnnnnnnnnnnnnnnnnnnnnnnnnnnnnnnnnnnnnnnnnnnnnnnnnnnnnnnnnnnnnnnnnnnnnnnnnnnnnnnnnnnnnnnnnnnnnnnnnnnnnnnnnnnnnnnnnnnnnnnnnnnnnnnnnnnnnnnnnnnnnnnnnnnnnnnnnnnnnnnnnnnnnnnnnnnnnnnnnnnnnnnnnnnnnnnnnnnnnnnnnnnnnnnnnnnnnnnnnnnnnnnnnnnnnnnnnnnnnnnnnnnnnnnnnnnnnnnnnnnnnnnnnnnnnnnnnnnnnnnnnnnnnnnnnnnnnnnnnnnnnnnnnnnnnnnnnnnnnnnnnnnnnnnnnnnnnnnnnnnnnnnnnnnnnnnnnnnnnnnnnnnnnnnnnnnnnnnnnnnnnnnnnnnnnnnnnnnnnnnnnnnnnnnnnnnnnnnnnnnnnnnnnnnnnnnnnnnnnnnnnnnnnnnnnnnnnnnnnnnnnnnnnnnnnnnnnnnnnnnnnnnnnnnnnnnnnnnnnnnnnnnnnnnnnnnnnnnnnnnnnnnnnnnnnnnnnnnnnnnnnnnnnnnnnnnnnnnnnnnnnnnnnnnnnnnnnnnnnnnnnnnnnnnnnnnnnnnnnnnnnnnnnnnnnnnnnnnnnnnnnnnnnnnnnnnnnnnnnnnnnnnnnnnnnnnnnnnnnnnnnnnnnnnnnnnnnnnnnnnnnnnnnnnnnnnnnnnnnnnnnnnnnnnnnnnnnnnnnnnnnnnnnnnnnnnnnnnnnnnnnnnnnnnnnnnnnnnnnnnnnnnnnnnnnnnnnnnnnnnnnnnnnnnnnnnnnnnnnnnnnnnnnnnnnnnnnnnnnnnnnnnnnnnnnnnnnnnnnnnnnnnnnnnnnnnnnnnnnnnnnnnnnnnnnnnnnnnnnnnnnnnnnnnnnnnnagagtcctgacacattccgaacttgctcctctgcgagcatctctggtgcccatggaacactgcataacccgtttctttgaggagtgtgaccccaacaaggataaacatatcaccctgaaggagtggggccactgctttggaattaaagaag

SEQ ID NO: 29569 - DNA, 105 bp, Macaca Mulatta
agcatgttggctaaaactggagcaaagtgcactaaaacaatttcctgaactcagctgttgtactattcaccttttaaaacataaattctgtatagccatttgtag

SEQ ID NO: 29570 - DNA, 100 bp, Macaca Mulatta
aaaataccagagcagagtgttcttcttctgcatgcctgcgcccacaatcccacgggagtggacccgcgtccggaacaatggaaggaaatagcaacagtgg

SEQ ID NO: 29571 - DNA, 207 bp, Macaca Mulatta
aggtttgctgtgaactttcagaccggcttcagtggaaacgacattgccttccacttcaaccctcggtttgaagacggagggtacgtggtgtgcaacacaaggcagaatggaagctgggggcccgaggagaggaagatgcacatgcccctccagaaggggatgccctttgacctctgcttcctggtgcagagctcggatttcaaggtg

SEQ ID NO: 29572 - DNA, 72 bp, Macaca Mulatta
  misc_feature (1)...(72): n = A,T,C or G
tttatcatgaagagctcaacgcacccatccggagaaacaaagaagagcccaaggcccgncccttgagagtag

SEQ ID NO: 29573 - DNA, 95 bp, Macaca Mulatta
gccaagttcaagtccctgatggtggtcagcacctttgagctgggaaccgaggagggcagtgtcctacagctgactgaagcctcccgttggagtga

SEQ ID NO: 29574 - DNA, 291 bp, Macaca Mulatta
  misc_feature (1)...(291): n = A,T,C or G
cagggcttccgaagtctggaagacatccgcagccaggcctccctgacaacccagcaggccattggcctgaagcattacaatgacttcctggaacgcatgcccagggaggaggctacagagattgagcagacagnagaaagcatgccaggcctttagctccggactgctatgtgtggcatgtggttcataccgacgtggaaaggcaacctgtgctgatgacgacgtgatcatcactcacccagatggactgacccaccggagaatcttcagccgtctgcttgagagacttcg

SEQ ID NO: 29575 - DNA, 119 bp, Macaca Mulatta
  misc_feature (1)...(119): n = A,T,C or G
acagatttaccgtatgagcctcccaggagatcagcctggaccggtcacggccaccccacgccccagtcgaaagnagctgctcaaccatctccttccacaggcccaaaacgaagaccagc

SEQ ID NO: 29576 - DNA, 158 bp, Macaca Mulatta
agtgtcaacatttcagacaacacagacagtacaatgacaaattggggatcagctccaatctcagccccccatttaatatgttgctgaatattcttctgaacagagtccatcccacactgtcccatggtacaagacgctccaaggggcgaagagagagg

SEQ ID NO: 29577 - DNA, 281 bp, Macaca Mulatta
acgccttcgaccagctgcgcaatgttatcccgtcgttcaacaacgacaagaagctgtccaaatatgagaccctgcagatggcccaaatctacatcaatgccttgtctgagctgctacaaacgcccagcggaggggaacagccaccgccgcctccagtctcctgcaaaagccaccaccaccaccttcgcaccgccgcctcctatgaagggggcgcaggcaacgcgaccgcagctggggctcagcaggcttccggagggagtcagcggccgaccccgcccggg

SEQ ID NO: 29578 - DNA, 160 bp, Macaca Mulatta
tggccagaattagatgtcttctatatcgctggaaagctatatgaacatagaggagatacagtacattctcaataacaagtaataaataatgaaagacaaaatttaaccaaggcctatatttttctccaacataatcactgtcccacaatcacattcagga

SEQ ID NO: 29579 - DNA, 1061 bp, Macaca Mulatta
ggataggattttactgtcgaaatgttcaggacttcgaacgagcttctgaagaaatcaccaagatgctgaaattttcttctaaggagaaatatcccttatttacttttgtaaatggtcattccagagactatgattttacatctactacaaccaatgaagaagaccttttttcagaggatgaaaagaaacgattaaaaagatttagcatggaagagtttgtcttgctttaaagattagcacatttgtgcttgatgagaagaattccgttgaaaggggaaaatgaagagaaacaagtgttttcgaaacgtttattttcacaaatatcttaatttttttatgttctttaagaaaaagaacatttgaaaatataaaagtttaaagatatttttctaaaagaggaatgatttaatgaatcttgctttctaataaataaattgagtgattctggttgcattcctatttccctaagatctactagtgataattttaccttaactgtaagccttttagtcttcaaagtcttccacctgagcccattgttctcatggaggttttgtgatattaaccctcccccaaagactgggatcaccaaatagtttcaaatttctcggtttgtactaatgacctgaagatcagagaaggaaactttaatgctgtctagcctactgctattaattgcaatcaaagaatgcttttgcatatggtcttgataattaaatagtattttgtttaactgtggatatgcatacaccttttttaagcacgaattatgagttaaagtaaaatttttgcaatatgatttttataatggctcctcattatgcttgctgttgaaccttttatgaggagtgaatataaagtattggttttccctccccaaatttaaaggttatggttattaaatactaattaataaactggcatccaaatccaaatccagattaaaaggcaaacttactaaaaataagttagttagttggttttggttttccctaatcgcccaagggggccaaaaaattttgtaataggggaaacttcccacattttaatttaagtggccc

SEQ ID NO: 29580 - DNA, 419 bp, Macaca Mulatta
  misc_feature (1)...(419): n = A,T,C or G
ctgtgttgacagcgtgcacatgggtgagccggaaaggagacctgcagagaatgaaacagacaaagaaaggaaannnnnnnnnnnnnnnnnnnnnnnnnnnnnnnnnnnnnnnnnnnnnnnnnnnnnnnnnnnnnnnnnnnnnnnnnnnnnnnnnnnnnnnnnnnnnnnnnnnnnnnnnnnnnnnnnnnnnnnnnnnnnnnnnnnnnnnnnnnnnnnnnnnnnnnnnnnnnnnnnnnnnnnnnnnnnnnnnnnnnnnnnnnnnnnnnnnnnnnnnnnnnnnnnnnnnnnnnnnnnnnnnnnnnnnnnnnnnnnnnnnnnnnnnnnnnggccaccgtgcaaatggagggcgggaagctggtggtgaatttccccaactatcaccagacctcagagatcgtgggtgacaagctggtggaggt

SEQ ID NO: 29581 - DNA, 92 bp, Macaca Mulatta
agcatgcctcttccgatgttgaaagaatgatcctgggtaacaaatgtgatatgaatgacaaaagacaagtgtcaaaagaaagaggggagaag

SEQ ID NO: 29582 - DNA, 1380 bp, Macaca Mulatta
  misc_feature (1)...(1380): n = A,T,C or G
tccagatcatttatagtgacaaannnnnnnnnnnnnnnnnnnnnnnnnnnnnnnnnnnnnnnnnnnnnnnnnnnnnnnnnnnnnnnnnnnnnnnnnnnnnnnnnnnnnnnnnnnnnnnnnnnnnnnnnnnnnnnnnnnnnnnnnnnnnnnnnnnnnnnnnnnnnnnnnnnnnnnnnnnnnnnnnnnnnnnnnnnnnnnnnnnnnnnnnnnnnnnnnnnnnnnnnnnnnnnnnnnnnnnnnnnnnnnnnnnnnnnnnnnnnnnnnnnnnnnnnnnnnnnnnnnnnnnnnnnnnnnnnnnnnnnnnnnnnnnnnnnnnnnnnnnnnnnnnnnnnnnnnnnnnnnnnnnnnnnnnnnnnnnnnnnnnnnnnnnnnnnnnnnnnnnnnnnnnnnnnnnnnnnnnnnnnnnnnnnnnnnnnnnnnnnnnnnnnnnnnnnnnnnnnnnnnnnnnnnnnnnnnnnnnnnnnnnnnnnnnnnnnnnnnnnnnnnnnnnnnnnnnnnnnnnnnnnnnnnnnnnnatccnatacactctagaaatgattaaactcttaccacataatgaaagtgcgtggaactatttgaaaggnnnnnnnnnnnnnnnnnnnnnnnnnnnnnnnnnnnnnnnnnnnnnnnnnnnnnnnnnnnnnnnnnnnnnnnnnnnnnnnnnnnnnnnnnnnnnnnnnnnnnnnnnnnnnnnnnnnnnnnnnnnnnnnnnnnnnnnnnnnnnnnnnnnnnnnnnnnnnnnnnnnnnnnnngttatgtgaaatcctagctaaagaaaaggacactataagaaaggaatattggagatatattggaagatcccttcaaagcaaacacagcacagaaaatgactcacaaacaaatgtacagcaataacaccatccagaagnnnnnnnnnnnnnnnnnnnnnnnnnnnnnnnnnnnnnnnnnnnnnnnnnnnnnnnnnnnnnnnnnnnnnnnnnnnnnnnnnnnnnnnnnnnnnnnnnnnnnnnnnnnnnnnnnnnnnnnnnnnnnnnnnnnnnnnnnnnnnnnnnnnnnnnnnnnnnnnnnnnnnnnnnnnnnnnnnnnnnnnnnnnnnnnnnnnnnnnnnnnnnnnnnnnnnnnnnnnnnnnnnnnnnnnnnnnnnnnnnnnnnnnnnnnnnnnnnnnnnnnnnnnnnnnnctcctccctcagtggtacacacatcaagatttgtagcagtaataactgcgggtcacttgtatgtaatggatatgaggtagctgaagtttggttcagtaagcagggaatacagtggttccatcagagctggtctgcacactcacattatcttgctatcactgtaaccaactaatgccaaaagaatggttttgtaataaaattatagctgtatctaaaaac

SEQ ID NO: 29583 - DNA, 343 bp, Macaca Mulatta
tcctcttggggaaaagacactgtgtgatgttgggagtgactttgatcaaagaatacagtggtctcagttatttataaaactttaatgagggagaggccctaactcttcctcagctctaccgactactgaaaggaaaagctggtgctggggagccctccacaccactgactgatgaatttcagcacgtcctggcacactgttctgtgggaggtctgtaagcaaatagaagaacatgagagttatcttgttaatgctcgaaatagaaaatcagctccatcgcaggcttcagggtctgcacctgccttcctgcaatcccacccacctttctagtgtgtatgtgggt

SEQ ID NO: 29584 - DNA, 464 bp, Macaca Mulatta
atggcaccggccagagcaggatgctgccccttgctgctgctgcttctggggctgtgggtggcagagatcccagtcagtgccaagtccaaggacgtgacctcatctcagtggtttaaaactcagcatgtgcagcccagccctgaagcatgctactcagccatgagcaacatcagtaagtacacagaatggtgcaaagacctcaacaccttcctgcatgagcccttctccggtgtggccaccacctgccagacccccaacatagcctgcaagaatcgccataaaaactgcccccagagcagcgggcccgtgtccctgaccatgtgtgagctcacttcagggaagtacccaaactgcaggtacaaaaagaagcacctgaacgcaccttacatagtggcctgtgaccctccacaacagggtgacccagggtacccacttgttctgtgcacttggataaagttgtctaa

SEQ ID NO: 29585 - DNA, 518 bp, Macaca Mulatta
agctgtaccctaggatctcgcccacgttaacttcgttcctaaaaacagcactgggttggcggagaccgggacgcactccaactcctatctagacaccagcagggtgtccatctcggtgttggtcccaggactgctgctggtgtttgtcacctccgccttcaccgtggtgggcatgctcgtgtttatcctgaggaaccgaaagcggtccaagagacgagatgccaactcctccgcgtccgagattaattccctacagacagtctgtgactcttcctactggcacaatgggccttacaacgcagatggggcccacagagtgtatgactgtggctctcactcgctctcagactaagaccccaaccccgataggggagggcagagggaaggcgatacgtcctcccccgccgcaggcacccccccagggggctggaggggcgcatacccaaatccatcagcctgaatgggcataagtacacaaataactgtgagttcgcacaaccgaaaggggctgacccctc

SEQ ID NO: 29586 - DNA, 148 bp, Macaca Mulatta
aggtggattctcagtatcctcctgttcagagacttatgaccccaaagccagtttccatagcaacaaatcgaagtgtttattttaaaccatcgctgactccatctggtgaatttaggaagactaatcaaagaatagataaaaagtgcag

SEQ ID NO: 29587 - DNA, 1454 bp, Macaca Mulatta
  misc_feature (1)...(1454): n = A,T,C or G
ggatgacctaaaagtggactggaataggggtggcagggctgagtctgtgaggttgggcgggagggaaccctagtcccagagtcttctgcagcctggaccagactgcttaagcactgctgggtttagactgtcctttagaaataggagccgctagaagtgaacttctcataactattctgtccgtccgtaattctgtccttccctaaagggaaccttaatctcatctttaaggagaattactgagtgacctgaaggacccttttcggttggaaagnnnnnnnnnnnnnnnnnnnnnnnnnnnnnnnnnnnnnnnnnnnnnnnnnnnnnnnnnnnnnnnnnnnnnnnnnnnnnnnnnnnnnnnnnnnnnnnnnnnnnnnnnnnnnnnnnnnnnnnnnnnnnnnnnnnnnnnnnnnnnnnnnnnnnnnnnnnnnnnnnnnnnnnnnnnnnnnnnnnnnnnnnnnnnnnnnnnnnnnnnnnnnnnnnnnnnnnnnnnnnnnnnnnnnnnnnnnnnnnnnnnnnnnnnnnnnnnnnnnnnnnnnnnnnnnnnnnnnnnnnnnnnnnnnnnnnnnnnnnnnnnnnnnnnnnnnnnnnnnnnnnnnnnnnnnnnnnnnnnnnnnnnnnnnnnnnnnnnnnnnnnnnnnnnnnnnnnnnnnnnnnnnnnnnnnnnnnnnnnnnnnnnnnnnnnnnnnnnnnnnnnnnnnnnnnnnnnnnnnnnnnnnnnnnnnnnnnnnnnnnnnnnnnnnnnnnnnnnnnnnnnnnnnnnnnnnnnnnnnnnnnnnnnnnnnnnnnnnnnnnnnnnnnnnnnnnnnnnnnnnnnnnnnnnnnnnnnnnnnnnnnnnnnnnnnnnnnnnnnnnnnnnnnnnnnnnnnnnnnnnnnnnnnnnnnnnnnnnnnnnnnnnnnnnnnnnnnnnnnnnnnnnnnnnnnnnnnnnnnnnnnnnnnnnnnnnnnnnnnnnnnnnnnnnnnnnnnnnnnnnnnnnnnnnnnnnnnnnnnnnnnnnnnnnnnnnnnnnnnnnnnnnnnnnnnnnnnnnnnnnnnnnnnnnnnnnnnnnnnnnnnnnnnnnnnnnnnnnnnnnnnnnnnnnnnnnnnnnnnnnnnnnnnnnnnnnnnnnnnnnnnnnnnnnnnnnnnnnnnnnnnnnnnnnnnnnnnnnnnnnnnnnnnnnnnnnnnnnnnnnnnnnnnnnnnnnnnnnnnnnnnnnnnnnnnnnnnnnnnnnnnnnnnnnnnnnnnnnnnnnnnnnnnnnnnnnnnnnnnnnnnnnnnnnnnnnnnnnnnnnnnnnnnnnnnnnnnnnnnnnnnnnnnnnnnnnnnnnnnnnnnnnnnnnnnnnnnnnnnnngcaaaaaaggatccacctgcagactctgagggcactgtcagaagtacagaaaatgactccaagagaaaggatgaggctgagaaagctccaggcagctgatgagaaagccaggaagctga

SEQ ID NO: 29588 - DNA, 3266 bp, Macaca Mulatta
  misc_feature (1)...(3266): n = A,T,C or G
aaggtggcattgctgagaatctagcagagaagttgattggtgttctctttgaggagtggttactagcttgtactcggtgnnnnnnnnnnnnnnnnnnnnnnnnnnnnnnnnnnnnnnnnnnnnnnnnnnnnnnnnnnnnnnnnnnnnnnnnnnnnnnnnnnnnnnnnnnnnnnnnnnnnnnnnnnnnnnnnnnnnnnnnnnnnnnnnnnnnnnnnnnnnnnnnnnnnnnnnnnnnnnnnnnnnnnnnnnnnnnnnnnnnnnnnnnnnnnnnnnnnnnnnnnnnnnnnnnnnnnnnnnnnnnnnnnnnnnnnnnnnnnnnnnnnnnnnnnnnnnnnnnnnnnnnnnnnnnnnnnnnnnnnnnnnnnnnnnnnnnnnnnnnnnnnnnnnnnnnnnnnnnnnnnnnnnnnnnnnnnnnnnnnnnnnnnnnnnnnnnnnnnnnnnnnnnnnnnnnnnnnnnnnnnnnnnnnnnnnnnnnnnnnnnnnnnnnnnnnnnnnnnnnnnnnnnnnnnnnnnnnnnnnnnnnnnnnnnnnnnnnnnnnnnnnnnnnnnnnnnnnnnnnnnnnnnnnnnnnnnnnnnnnnnnnnnnnnnnnnnnnnnnnnnnnnnnnnnnnnnnnnnnnnnnnnnnnnnnnnnnnnnnnnnnnnnnnnnnnnnnnnnnnnnnnnnnnnnnnnnnnnnnnnnnnnnnnnnnnnnnnnnnnnnnnnnnnnnnnnnnnnnnnnnnnnnnnnnnnnnnnnnnnnnnnnnnnnnnnnnnnnnnnnnnnnnnnnnnnnnnnnnnnnnnnnnnnnnnnnnnnnnnnnnnnnnnnnnnnnnnnnnnnnnnnnnnnnnnnnnnnnnnnnnnnnnnnnnnnnnnnnnnnnnnnnnccattacaacacaagctagcatggagtttcgacggaaagggtcacaaatgtccacagacaccatggtttccaatcctatgtttgatgcaagtgaatttcctgataactatgaagcaggaagagctgaggcttgtgggacactgtgtaggattttttgtagcaagaagactggagaagagattctgccagcttatttatccagnnnnnnnnnnnnnnnnnnnnnnnnnnnnnnnnnnnnnnnnnnnnnnnnnnnnnnnnnnnnnnnnnnnnnnnnnnnnnnnnnnnnnnnnnnnnnnnnnnnnnnnnnnnnnnnnnnnnnnnnnnnnnnnnnnnnnnnnnnnnnnnnnnnnnnnnnnnnnnnnnnnnnnnnnnnnnnnnnnnnnnnnnnnnnnnnnnnnnnnnnnnnnnnnnnnnnnnnnnnnnnnnnnnnnnnnnnnnnnnnnnnnnnnnnnnnnnnnnnnnnnnnnnnnnnnnnnnnnnnnnnnnnnnnnnnnnnnnnnnnnnnnnnnnnnnnnnnnnnnnnnnnnnnnnnnnnnnnnnnnnnnnnnnnnnnnnnnnnnnnnnnnnnnnnnnnnnnnnnnnnnnnnnnnnnnnnnnnnnnnnnnnnnnnnnnnnnnnnnnnnnnnnnnnnnnnnnnnnnnnnnnnnnnnnnnnnnnnnnnnnnnnnnnnnnnnnnnnnnnnnnnnnnnnnnnnnnnnnnnnnnnnnnnnnnnnnnnnnnnnnnnnnnnnnnnnnnnnnnnnnnnnnnnnnnnnnnnnnnnnnnnnnnnnnnnnnnnnnnnnnnnnnnnnnnnnnnnnnnnnnnnnnnnnnnnnnnnnnnnnnnnnnnnnnnnnnnnnnnnnnnnnnnnnnnnnnnnnnnnnnnnnnnnnnnnnnnnnnnnnnnnnnnnnnnnnnnnnnnnnnnnnnnnnnnnnnnnnnnnnnnnnnnnnnnnnnnnnnnnnnnnnnnnnnnnnnnnnnnaggtaaaggtgatggttgactcataagggcggaagcgagccatcagttctgtgtgcagctannnnnnnnnnnnnnnnnnnnnnnnnnnnnnnnnnnnnnnnnnnnnnnnnnnnnnnnnnnnnnnnnnnnnnnnnnnnnnnnnnnnnnnnnnnnnnnnnnnnnnnnnnnnnnnnnnnnnnnnnnnnnnnnnnnnnnnnnnnnnnnnnnnnnnnnnnnnnnnnnnnnnnnnnnnnnnnnnnnnnnnnnnnnnnnnnnnnnnnnnnnnnnnnnnnnnnnnnnnnnnnnnnnnnnnnnnnnnnnnnnnnnnnnnnnnnnnnnnnnnnnnnnnnnnnnnnnnnnnnnnnnnnnnnnnnnnnnnnnnnnnnnnnnnnnnnnnnnnnnnnnnnnnnnnnnnnnnnnnnnnnnnnnnnnnnnnnnnnnnnnnnnnnnnnnnnnnnnnnnnnnnnnnnnnnnnnnnnnnnnnnnnnnnnnnnnnnnnnnnnnnnnnnnnnnnnnnnnnnnnnnnnnnnnnnnnnnnnnnnnnnnnnnnnnnnnnnnnnnnnnnnnnnnnnnnnnnnnnnnnnnnnnnnnnnnnnnnnnnnnnnnnnnnnnnnnnnnnnnnnnnnnnnnnnnnnnnnnnnnnnnnnnnnnnnnnnnnnnnnnnnnnnnnnnnnnnnnnnnnnnnnnnnnnnnnnnnnnnnnnnnnnnnnnnnnnnnnnnnnnnnnnnnnnnnnnnnnnnnnnnnnnnnnnnnnnnnnnnnnnnnnnnnnnnnnnnnnnnnnnnnnnnnnnnnnnnnnnnnnnnnnnnnnnnnnnnnnnnnnnnnnnnnnnnnnnnnnnnnnnnnnnnnnnnnnnnnnnnnnnnnnnnnnnnnnnnnnnnnnnnnnnnnnnnnnnnnnnnnnnnnnnnnnnnnnnnnnnnnnnnnnnnnnnnnnnnnnnnnnnnnnnnnnnnnnnnnnnnnnnnnnnnnnnnnnnnnnnnnnnnnnnnnnnnnnnnnnnnnnnnnnnnnnnnnggaacctgcaaatagtcgtctacctcctcaccttattgcacttgattccacgatacctggattttttgatgacatagggtatctggatctcttgccatgtcgtccttttgacacagtttttattttctatatgaagccaggtcagaaaacgaaccaagagnnnnnnnnnnnnnnnnnnnnnnnnnnnnnnnnnnnnnnnnnnnnnnnnnnnnnnnnnnnnnnnnnnnnnnnnnnnnnnnnnnnnnnnnnnnnnnnnnnnnnnnnnnnnnnnnnnnnnnnnnnnnnnnnnnnnnnnnnnnnnnnnnnnnnnnnnnnnnnnnnnnngaagaagtgatttcctctgaagatattggagctagcattttcaatggacagaagaaggtgctgtattatgctgatgcccttacggaaattgcttttgtggttccttctcctgtggagtccttaan

SEQ ID NO: 29589 - DNA, 665 bp, Macaca Mulatta
tttcttgtctcctattgtgttttgtagagaagatctccaatggcattgtgcatatgagggtgagccaatgtacttatgatagaagcatgaaacatgggattgtatacaagtggaaagaaacacaactataattcacttgcaaattatagtttgattgtatacttcctttttactgcattccttttattatttacgtgttccattaatcagaatataaataagggctaggagtatgataaacttgtttttcccactgttaaaaaccctgaaatagctagtagggagattaaaattaactgataagactcagacttattttgtaatggtctcatggatttttaattacagatgccagcaatagactaaagcttcttaccgcccaccccaaaacactactatcattaaatatttaagatataaatggttattctgacttgaacaacagacatttagagtctatttttctcggttctagcatctttcaggaagagtacagcaaatgagagaagaccttgacaactcatgacaagcatccttaatatccagtgacttcatatcccctttctgcactgcaattctaggcaatggcctgtcagaccagacagttctaccactgcaaagacttgtaaccattttctaatatcacattttacttttcaagacat

SEQ ID NO: 29590 - DNA, 803 bp, Macaca Mulatta
  misc_feature (1)...(803): n = A,T,C or G
gggaccctggcttccacagacctatgtcttttgatatactcgcagtcacactgggtgaagttgcttttaatccttgcttcccatgtgctcaagtctttttgttgtccagcttcctgataaccctgcttactgtggaatattcatttgacatctgtctcttttcatttcttttaactaccatgtccttgatataccttttgcaccacctgaatttcatttctgtatcacctgacctctggatgccaacacatttattctgctttttctattgtagaattttagataaacctattaatggcaatatttttagctaaacatctttgttttttactgtcactagggcaataacatttatactcaaatatataacattattttaactactaaaggaatagtttttaaagtcttagcaatttcttttgcaatttttcttagacttaatacttatgataaatgacttacatagtaaccgaatatgaaatttgaccttttctggaaatatgtacttttaaatttctactatattgaaacctattaaaagtaactaccggttgcaatttaagattaaagatggctgaaaaataccaaacccaggggtaattcnnnnnnnnnnnnnnnnnnnnncctttggttaacctggtttttgtcaaaaatttgtttcccagggagcataataataaaaagccccaatatgtggttcccctccccttttgggataaaacactaaactttcttggatgggtggcctccggcaccaaataaactttaaaaatgctgttttgtaaaataaccacctttatatt

SEQ ID NO: 29591 - DNA, 1140 bp, Macaca Mulatta
  misc_feature (1)...(1140): n = A,T,C or G
ccagctggcccgggcactgtatgacaacaccgctgagtccccccaggagctgtccttccgccgaggggacgtcctacgggtcctgcagagagagggcgctggtggactggacggctggtgcctctgctccctacacggccagcagggcattgtgcccgccaacagggtgaagctcctgcctgctggcccagcacccaagcctggcctctctcctgcacccccagcccagcttggctcaccatatccagccccagatcacagcaatgaggaccaggaggtgnnnnnnnnnnnnnnnnnnnnnnnnnnnnnnnnnnnnnnnnnnnnnnnnnnnnnnnnnnnnnnnnnnnnnnnnnnnnnnnnnnnnnnnnnnnnnnnnnnnnnnnnnnnnnnnnnnnnnnnnnnnnnnnnnnnnnnnnnnnnnnnnnnnnnnnnnnnnnnnnnnnnnnnnnnnnnnnnnnnnnnnnnnnnnnnnnnnnnnnnnnnnnnnnnnnnnnnnnnnnnnnnnnnnnnnnnnnnnnnnnnnnnnnnnnnnnnnnnnnnnnnnnnnnnnnnnnnnnnnnnnnnnnnnnnnnnnnnnnnnnnnnnnnnnnnnnnnnnnnnnnnnnnnnnnnnnnnnnnnnnnnnnnnnnnnnnnnnnnnnnnnnnnnnnnnnnnnnnnnnnnnnnnnnnnnnnnnnnnnnnnnnnnnnnnnnnnnnnnnnnnnnnnnnnnnnnnnnnnnnnnnnnnnnnnnnnnnnnnnnnnnnnnnnnnnnnnnnnnnnnnnnnnnnnnnnnnnnnnnnnnnnnnnnnnnnnnnnnnnnnnnnnnnnnnnnnnnnnnnnnnnnnnntctggccagaagccccccacttccacacaggccccggctcccctcagctgagagcctgnnnnnnnnnnnnnnnnnnnnnnnnnnnnnnnnnnnnnnnnnnnnnnnnnnnnnnnnnnnnnnnnnnncccaggacggaagggcagcatccaggaccggcctctgnnnnnnnnnnnnnnnngcctgcctggctatgggggccccaaggtcgagggggatccagagggcagggagatggaggatgacccagcaggacaccacaatgagtacgagggcattccaatggccgaggagtatgactatgtccacctgaagg

SEQ ID NO: 29592 - DNA, 725 bp, Macaca Mulatta
  misc_feature (1)...(725): n = A,T,C or G
ggagatctttatttttagccatgcactgttgtgagggaaaattacctgtcttgactgccatgtgttcatcatctaagtattgtaagctgctatgtatggatttaaaccgtaatcatatctttttcctatctgaggcactggtggaataaaaaacctgtatattttactttgttgcaggtagtcttgctgcatcttggcaagttgcagagatggtggagttagaaaaaaaagcccttttcagtttgtgcactgtgtatggtccgtgtagattgatgcagattttctgaaatgaaatgtttagacgagatcataccagtaaagcaggaatggaaaatcttgcttttctggtatgttctaggtgtattgtgacttttactgttatattaattgccaatataagtaaatatagattatatatatatagtgtttcacaaagcttagacctttaccttccagccaccccacagtgcttggtatttcagagtcattggttatacatgtatagttccaaagcacataagctagaaaaagaaaatacatttctaggagcactaccatctgttttcaacatgaaatgccacacacatnagaactccaacataaatttcattgcacagaccttcctgtagttaattttttgtcacaaaactcaacttctatggaactgaaatctaaatggcttccacaaaaatngttgtttttgcaaattatcaaaaccattggta

SEQ ID NO: 29593 - DNA, 170 bp, Macaca Mulatta
ccagtgagagtcaaagattccccagaagaccatatctgcctggccagctgccaccacctctaccctacaggccaagatgggttctaccaagtcccccacctccctatggctcaagacttaattcaccactttttcttccctttgtcccagggcgagttccaccatcttct

SEQ ID NO: 29594 - DNA, 834 bp, Macaca Mulatta
  misc_feature (1)...(834): n = A,T,C or G
atgagcgccccaggcagccccgaccaggcctacgacttcctgctcaagttcctgctggtgggcgacagcgacgtgggcaagggtgagatcctggagagcctgcaggacggcacggccgagtccccatacagccacctggggggaatcgactacaagacgaccaccatcctgctggacggccagcgggtgaagctgaagctctgggatacgtcggggcagggaagattttgtaccatattccgctcctactctcgtggtgcacaaggagtgatcctggtctacgacattgcaaaccgctggtctttcgagggtaggatcgatnnnnnnnnnnnnnnnnnnnnnnnnnnnnnnnnnnnnnnnnnnnnnnnnnnnnnnnnnnnnnnnnnnnnnnnnnnnnnnnnnnnnnnnnnnnnnnnnnnnnnnnnnnnnnnnnnnnnnnnnnnnnnnnnnnnnnnnnnnnnnnnnnnnnnnnnnnnnnnnnnnnnnnnnnnnnnnnnnnnnnnnnnnnnnnnnnnnnnnnnnnnnnnnnnnnnnnnnnnnnnnnnnnnnnnnnnnnnnnnnnnnnnnnnnnnnnnnnnnnnnnnnnnnnnnnnnnnnnnnnnnnnnnnnnnnnnnnnnnnnnnnnnnnnnnnnnnnnnnnnnnnnnnnnnnnnnnnnnnnnnnnnnnnnnnnnnnnnnnnnnnnnnnnnnnnnnnnnnnnnnnnnnnnnnnnnnnnnnnnnnnnnncaccaccagctccacccacaaaaggagcagcctctgcaaagtgaagatcgtctgcccaccccagagcccacccaaaaactgcaccagaaacaactgcaaaatttctta

SEQ ID NO: 29595 - DNA, 173 bp, Macaca Mulatta
  misc_feature (1)...(173): n = A,T,C or G
naggccacgtggaggatgtgctgctcatcatggatgtgtacaaattggcactgagcttccagttgtgccgcctggagcagctgtgccgccagtacatcgaggcctccgtggacctgcagaacgtgctggtcgtgtgcgagagtgccgcccggctgcagctgagccaactcaag

SEQ ID NO: 29596 - DNA, 345 bp, Macaca Mulatta
gatgacgctcaatttgaaatggacatctcatccagttgcagatgacccggcatgtggagttacagagggatccctcatgccactgctgccaccacctcttcctggggcatccaaaggccagcttggcctcatctaatctggaagggagtgacttgttagttccaggcctcctttagttctgaggcagctagaccagggataggagtgggcaacttgccaagcccttaactctacttcctcttcggtctgtggtactcctcctaaccctaaaccctctatgctcaggggctggaactggggaatggagtaagtcaccttctggctgcttagtaaacattcaaagaa

SEQ ID NO: 29597 - DNA, 470 bp, Macaca Mulatta
tgagcccagtataccatctaacagaattaaaacagatggtgctgcaccaaatgtggctccttcagatgtaggaggtggaggtggaagaaacagagagctgaccataacatgggcgccgttgtcaagagaataccactatggcaacaattttggttacatcgtggcatttaagccatttgatggagaagaatggaaaaaagtcacagttactaatcctgacactggccgatatgtacataaagacgaaaccatgagcccttccactgcgtttcaagttaaagttaaggccttcaacaacaaaggagatggaccttacagcctagtagcagtcattaattcagcacaagatgctcccagtgaagccccaacagaagtaggtgtaaaagtcttatcatcttctgagatatctgttcattgggaacatgttttagaaaaaatagtggaaagccatcagattcggtattgggcta

SEQ ID NO: 29598 - DNA, 438 bp, Macaca Mulatta
agaaattttatgggagagagcctctttgagagtacagaaggtagccagtgtgagaaactttcacccaggttccggaagacatgttgaacaagaaaactgtttctggagtaaaatcatgtgaaagcggtacgtgtggaaaagtcttcatgggacattcatcccttaacaggcacatcagagccgacactggacaccaaccatgtaagtgtcagaaatttggagagaagccatataagcataaacaacgtgggaaagccttgagcgatagccactgctttcaagcacatgaaaggcctcacgctagagagaaaccttttgattgtaaggaatgtggaaaatctttcatttctcctgcaaacattcgaagacatatggtaatgcacagcggagatggaccttgtaaatgtaagttttagggaaaggcttggattgtctcag

SEQ ID NO: 29599 - DNA, 677 bp, Macaca Mulatta
aatgctctgattaagaaaatttgtatgactgtctccctgagaagttacggtacaattttccctatcatatttcttttaaaaagattgactttctgccagaataatattattccacacaccttttgtgaacacattggcctagccaaatatgcgtgtaatgacattcgaataaacgtttagtatgagttttcaattctaatgtcaacggtggtcttagatgttgtactaatttcctatatgctgattctccatgctgtcttccacatgccttctccagatgctcgccacaaagctctcaatacatgtggctcccatgtttgcatcatcatcctcttttatgggtctggcatcttcacagtccttacctagaggtttggacaccacattccatattgtatccacatcccattggctaatgtctgctttctggttctacctatgctgaatcccattatttatgggatcaaaaccaagcaaatccaggaacaggtggttcattttttgtttataaaatagaaataactttggtttaagaactgagttttcagaatctctagctatctggtaagtgggtatggaagtggtagatgggagaggtcagctgacacagtaggaaataactcagtgagtaccatgtctggagcaaggtcaactgggaagttacagggcttactctt

SEQ ID NO: 29600 - DNA, 442 bp, Macaca Mulatta
gtgtatcctggtgctatcactatggcaactaccacaccatcgcctcagatgacatctgactgctctagcacctcggccagcccggagcccagcctcccggtcatccagagcacttatggtatgaagacagatggcggaagcctagctggaaatgaaatgattaatggagaggatgaaatggaaatgtatgatgactatgaagatgaccccaaatcagactatagcagtgaaaatgaagccccggaggctgtcagtgccaactgaggagtttttgtttgctgaattaaagtactctgacatttcaccccggtccccaacaaaaagttattaaagagcccgcatgcatttgtggctccacaattacatcagcagaatggtcttaattgtttcataaagtgtgagacagattaagttttccctgatttttcatgaacttgagttt

SEQ ID NO: 29601 - DNA, 654 bp, Macaca Mulatta
  misc_feature (1)...(654): n = A,T,C or G
gggagcccattggatatcagtattttccctcaatcagaatccagaatgaaaaactcccggtcaggtgtagactctgggattggagaaagcgtgcttgtctccagtggaactcacacagtaaatagtgaccgattacacacaccatcctcaaaaaccttctctcctgccttctttagcttggtacagctctgtttgcaacaagatcctgagaaaaggccatcagcaagcagtttattgtcccatgttttcttcaaacagatgaaagaagaaagccatgattcaatactttcactgttgcctcctgcttataacaagccatcaatatcattgcctccagtgttaccttggactgagccagaatgtgattttcctgatgaaaaagactcatactgggaattctagggctgccaaatcattttatgtcctatatacttgacactttctccttgctgctttttcttctgtattgctaggtacaaatactagaattatacttgaaaatacagttggtgcactggagaatctattatttaaaacccactctgttcaaggggcatcagtttgtagtccctctggttccacagagtactatgacaactccnaggaacatcagaatactatctagcgagtgtcattattctggaatttttctag

SEQ ID NO: 29602 - DNA, 773 bp, Macaca Mulatta
  misc_feature (1)...(773): n = A,T,C or G
ngggataaggacggagcaggatttctacgtgcgcctcattgactccatgacaaaacaagnnnnnnnnnnnnnnnnnnnnnnnnnnnnnnnnnnnnnnnnnnnnnnnnnnnnnnnnnnnnnnnnnnnnnnnnnnnnnnnnnnnnnnnnnnnnnnnnnnnnnnnnnnnnnnnnnnnnnnnnnnnnnnnnnnnnnnnnnnnnnnnnnnnnnnnnnnnnnnnnnnnnnnnnnnnnnnnnnnnnnnnnnnnnnnnnnnnnnnnnnnnnnnnnnnnnnnnnnnnnnnnnnnnnnnnnnnnnnnnnnnnnnnnnnnnnnnnnnnnnnnnnnnnnnnnnnnnnnnnnnnnnnnnnnnnnnnnnnnnnnnnnnnnnnnnnnnnnnnnnnnnnnnnnnnnnnnnnnnnnnnnnnnnnnnnnnnnnnnnnnnnnnnnnnnnnnnnnnnnnnnnnnnnnnnnnnnnnnnnnnnnnnnnnnnnnnnnnnnnnnnnnnnnnnnnnnnnnnnnnnnnnnnnnnnnnnnnnnnnnnnnnnnnnnnnnnnnnnnnnnnnnnnnnnnnnnnnnnnnnnnnnnnnnnnnnnnnnnnnnnnnnnnnnnnnnnnnnnnnnnnnnnnnnnnnnnnnnnnnnnnnnnnnnnnnnnnnnnnnnnnnnnnnnnnnnnnnnnnnnnnnnnnnnnnnnnnnnnnnnncagcgctcaacgaacccaccatcgattatggtttccagaggttacagaaggtcattcctcggcaccctggtgaccctgagcgtttgccaaagg

SEQ ID NO: 29603 - DNA, 4766 bp, Macaca Mulatta
  misc_feature (1)...(4766): n = A,T,C or G
ggatgcactggcctggaagagttgcttggaattgatccttcctttgagcagtttgaagcaccgttgttcagtcagctagcaaaaaccttggaacgaagtgttcagaccannnnnnnnnnnnnnnnnnnnnnnnnnnnnnnnnnnnnnnnnnnnnnnnnnnnnnnnnnnnnnnnnnnnnnnnnnnnnnnnnnnnnnnnnnnnnnnnnnnnnnnnnnnnnnnnnnnnnnnnnnnnnnnnnnnnnnnnnnnnnnnnnnnnnnnnnnnnnnnnnnnnnnnnnnnnnnnnnnnnnnnnnnnnnnnnnnnnnnnnnnnnnnnnnnnnnnnnnnnnnnnnnnnnnnnnnnnnnnnnnnnnnnnnnnnnnnnnnnnnnnnnnnnnnnnnnnnnnnnnnnnnnnnnnnnnnnnnnnnnnnnnnnnnnnnnnnnnnnnnnnnnnnnnnnnnnnnnnnnnnnnnnnnnnnaggtttttgctgagtccccgggcagctcagctcagttgagggtgctcttggctttctatgcttctaccatagtgtcggcgctggtagctgcagaggacgtatcagacaatatcatcgccaaactatttccctatatccaaaagnnnnnnnnnnnnnnnnnnnnnnnnnnnnnnnnnnnnnnnnnnnnnnnnnnnnnnnnnnnnnnnnnnnnnnnnnnnnnnnnnnnnnnnnnnnnnnnnnnnnnnnnnnnnnnnnnnnnnnnnnnnnnnnnnnnnnnnnnnnnnnnnnnnnnnnnnnnnnnnnnnnnnnnnnnnnnnnnnnnnnnnnnnnnnnnnnnnnnnnnnnnnnnnnnnnnnnnnnnnnnnnnnnnnnnnnnnnnnnnnnnnnnnnnnnnnnnnnnnnnnnnnnnnnnnnnnnnnnnnnnnnnnnnnnnnnnnnnnnnnnnnnnnnnnnnnnnnnnnnnnnnnnnnnnnnnnnnnnnnnnnnnnnnnnnnnnnnnnnnnnnnnnnnnnnnnnnnnnnnnnnnnnnnnnnnnnnnnnnnnnnnnnnnnnnnnnnnnnnnnnnnnnnnnnnnnnnnnnnnnnnnnnnnnnnnnnnnnnnnnnnnnnnnnnnnnnnnnnnnnnnnnnnnnnnnnnnnnnnnnnnnnnnnnnnnnnnnnnnnnnnnnnnnnnnnnnnnnnnnnnnnnnnnnnnnnnnnnnnnnnnnnnnnnnnnnnnnnnnnnnnnnnnnnnnnnnnnnnnnnnnnnnnnnnnnnnnnnnnnnnnnnnnnnnnnnnnnnnnnnnnnnnnnnnnnnnnnnnnnnnnnnnnnnnnnnnnnnnnnnnnnnnnnnnnnnnnnnnnnnnnnnnnnnnnnnnnnnnnnnnnnnnnnnnnnnnnnnnnnnnnnnnnnnnnnnnnnnnnnnnnnnnnnnnnnnnnnnnnnnnnnnnnnnnnnnnnnnnnnnnnnnnnnnnnnnnnnnnnnnnnnnnnnnnnnnnnnnnnnnnnnnnnnnnnnnnnnnnnnnnnnnnnnnnnnnnnnnnnnnnnnnnnnnnnnnnnnnnnnnnnnnnnnnnnnnnnnnnnnnnnnnnnnnnnnnnnnnnnnnnnnnnnnnnnnnnnnnnnnnnnnnnnnnngtacaaggtacttaagatagcagctgacatattaattaaagaagagatactaagtgaaaatgatcggttgtcaaatcaggtggttgtatgtttgctgccatttatggttatcaataatgatgacatggaatctgctgagatgaaaattgctatatatttatcaaaatcannnnnnnnnnnnnnnnnnnnnnnnnnnnnnnnnnnnnnnnnnnnnnnnnnnnnnnnnnnnnnnnnnnnnnnnnnnnnnnnnnnnnnnnnnnnnnnnnnnnnnnnnnnnnnnnnnnnnnnnnnnnnnnnnnnnnnnnnnnnnnnnnnnnnnnnnnnnnnnnnnnnnnnnnnnnnnnnnnnnnnnnnnnnnnnnnnnnnnnnnnnnnnnnnnnnnnnnnnnnnnnnnnnnnnnnnnnnnnnnnnnnnnnnnnnnnnnnnnnnnnnnnnnnnnnnnnnnnnnnnnnnnnnnnnnnnnnnnnnnnnnnnnnnnnnnnnnnnnnnnnnnnnnnnnnnnnnnnnnnnnnnnnnnnnnnnnnnnnnnnnnnnnnnnnnnnnnnnnnnnnnnnnnnnnnnnnnnnnnnnnnnnnnnnnnnnnnnnnnnnnnnnnnnnnnnnnnnnnnnnnnnnnnnnnnnnnnnnnnnnnnnnnnnnnnnnnnnnnnnnnnnnnnnnnnnnnnnnnnnnnnnnnnnnnnnnnnnnnnnnnnnnnnnnnnnnnnnnnnnnnnnnnnnnnnnnnnnnnnnnnnnnnnnnnnnnnnnnnnnnnnnnnnnnnnnnnnnnnnnnnnnnnnnnnnnnnnnnnnnnnnnnnnnnnnnnnnnnnnnnnnnnnnnnnnnnnnnnnnnnnnnnnnnnnnnnnnnnnnnnnnnnnnnnnnnnnnnnnnnnnnnnnnnnnnnnnnnnnnnnnnnnnnnnnnnnnnnnnnnnnnnnnnnnnnnnnnnnnnnnnnnnnnnnnnnnnnnnnnnnnnnnnnnnnnnnnnnnnnnnnnnnnnnnnnnnnnnnnnnnnnnnnnnnnnnnnnnnnnnnnnnnnnnnnnnnnnnnnnnnnnnnnnnnnnnnnnnnnnnnnnnnnnnnnnnnnnnnnnnnnnnnnnnnnnnnnnnnnnnnnnnnnnnnnnnnnnnnnnnnnnnnnnnnnnnnnnnnnnnnnnnnnnnnnnnnnnnnnnnnnnnnnnnnnnnnnnnnnnnnnnnnnnnnnnnnnnnnnnnnnnnnnnnnnnnnnnnnnnnnnnnnnnnnnnnnnnnnnnnnnnnnnnnnnnnnnnnnnnnnnnnnnnnnnnnnnnnnnnnnnnnnnnnnnnnnnnnnnnnnnnnnnnnnnnnnnnnnnnnnnnnnnnnnnnnnnnnnnnnnnnnnnnnnnnnnnnnnnnnnnnnnnnnnnnnnnnnnnnnnnnnnnnnnnnnnnnnnnnnnnnnnnnnnnnnnnnnnnnnnnnnnnnnnnnnnnnnnnnnnnnnnnnnnnnnnnnnnnnnnnnnnnnnnnnnnnnnnnnnnnnnnnnnnnnnnnnnnnnnnnnnnnnnnnnnnnnnnnnnnnnnnnnnnnnnnnnnnnnnnnnnnnnnnnnnnnnnnnnnnnnnnnnnnnnnnnnnnnnnnnnnnnnnnnnnnnnnnnnnnnnnnnnnnnnnnnnnnnnnnnnnnnnnnnnnnnnnnnnnnnnnnnnnnnnnnnnnnnnnnnnnnnnnnnnnnnnnnnnnnnnnnnnnnnnnnnnnnnnnnnnnnnnnnnnnnnnnnnnnnnnnnnnnnnnnnnnnnnnnnnnnnnnnnnnnnnnnnnnnnnnnnnnnnnnnnnnnnnnnnnnnnnnnnnnnnnnnnnnnnnnnnnnnnnnnnnnnnnnnnnnnnnnnnnnnnnnnnnnnnnnnnnnnnnnnnnnnnnnaaaatcacaagatctagaatctgtccaggaagttggaggttcctactggcaaagagtaactctcatcctggaattactgcagcacaaaaagaagctcaaaagtcctcagatattggtgccaactctttttaacttgctatcaannnnnnnnnnnnnnnnnnnnnnnnnnnnnnnnnnnnnnnnnnnnnnnnnnnnnnnnnnnnnnnnnnnnnnnnnnnnnnnnnnnnnnnnnnnnnnnnnnnnnnnnnnnnnnnnnnnnngatgttttagatgaggagaagttcaatgtggagttgatagttcagtgcgtccgcctttcggagatgccgcagacccatcaccacgcccttttacttttgggcactgtggctggaatatttccggnnnnnnnnnnnnnnnnnnnnnnnnnnnnnnnnnnnnnnnnnnnnnnnnnnnnnnnnnnnnnnnnnnnnnnnnnnnnnnnnnnnnnnnnnnnnnnnnnnnnnnnnnnnnnnnnnnnnnnnnnnnnnnnnnnnnnnnnnnnnnnnnnnnnnnnnnnnnnnnnnnnnnnnnnnnnnnnnnnnnnnnnnnnnnnnnnnnnnnnnnnnnnnnnnnnnnnnnnnnnnnnnnnnnnnnnnnnnnnnnnnnnnnnnnnnnnnnnnnnnnnnnnnnnnnnnnnnnnnnnnnnnnnnnnnnnnnnnnnnnnnnnnnnnnnnnnnnnnnnnnnnnnnnnnnnnnnnnnnnnnnnnnnnnnnnnnnnnnnnnnnnnnnnnnnnnnnnnnnnnnnnnnnnnnnnnnnnnnnnnnnnnnnnnnnnnnnnnnnnnnnnnnnnnnnnnnnnnnnnnnnnnnnnnnnnnnnnnnnnnnnnnnnnnnnnnnnnnnnnnnnnnnnnnnnnnnnnnnnnnnnnnnnnnnnnnnnnnnnnnnnnnnnnnnnnnnnnnnnnnnnnnnnnnnnnnnnnnnnnnnnnnnnnnnnnnnnnnnnnnnnnnnnnnnnnnnnnnnnnnnnnnnnnnnnnnnnnnnnnnnnnnnnnnnnnnnnnnnnnnnnnnnnnnnnnnnnnnnnnnnnnnnnnnnnnnnnnnnnnnnnnnnnnnnnnnnnnnnnnnnnnnnnnnnnnnnnnnnnnnnnnnnnnnnnnnnnnnnnnnnnnnnnnnnnnnnnnnnnnnnnnnnnnnnnnnnnnnnnnnnnnnnnnnnnnnnnnnnnnnnnnnnnnnnnnnnnnnnnnaggtcaatgccttgctgcccacagagacattcattcctgtgatcagagggctggtgggcaatcgcctgccatctgttcggcggaaagcgctggaccttttgaataacaagctacagcagaatatatcctggaagaagacaatag

SEQ ID NO: 29604 - DNA, 673 bp, Macaca Mulatta
  misc_feature (1)...(673): n = A,T,C or G
ctttggaactggtcctcntaatgcagcctactatagccctcatggacatatattagtattagctggatttggaaatctgagaggacaaatggaagtgtgggatgtgaaaaactacaaacttatttctaaaccagtggcttctgattctacatattttgcttggtgcccagatggtgagcatattttaacagctacatgtgctcccaggttacgggttaataatggatacaaaatttggcattatactggctctatcttgcacaagtatgatgtgccatcaaatgcagaattatggcaggtttcttggcagccatttttggatggagtatttccagcaaaaacaataacttaccaagcagttccaagtgaagtacccagtgaggaacctaaagttgcaacagcttatagacccccagctttaagaaataaaccaatcaccaattccaaattgcatgaagaggaaccacctcagaatatgaaatcacaatcaggaaatgataagccattatcaaaaacagctcttaaaaatcaaaggaagcatgaagctaagaaagccgcaaagcaggaagcaagaagtgacaagagtccagatttggcacctactcctgccccacagagcacaccacgaaacactatctctcagtcaaatttctggggaccctgagatagacca

SEQ ID NO: 29605 - DNA, 349 bp, Macaca Mulatta
gagggaatggaaaggacggtgggtacaattaggtctctgcagcattagccctttgtggcaaggccagtatcttcactctggagaaaggaaagggcaccatctaccctccaccctcctgtctgtcctggctgatttgagaggacaaaagccacatgagatcttcggactttgggaggaaaagggagagaagaggaggggctgggtattggggtaaacttggagatatctcgaaatgagaaatgtgaaatatgctggcccctccagctgagtagaatagagtggaaccttcatttcctgagattggatgagagagactggggctccagacaaagtgccatctccagacaag

SEQ ID NO: 29606 - DNA, 1258 bp, Macaca Mulatta
atggtcgttagcgtggcgtgtgttgggttcttcttggtcgttagggcctgtccacacacgggagtccacagaaaaccttctctcctgtccactcacgggtcccctggtgaaatcagaagagacggtcatcctgcagtgctggtcagatatcaagtttgagcacttccttctgcaccgagtggggaagtttgaggagcccttgcatctcatcggagagctccatgatgggggctccaaggccaatgtctccatcagtccagtgacacctgccctggcagggacctaccaatgctacggttctgtcactcactccccctatgtgttgtcagctcccagtgatcccctggagatcgtgatcacaggtaaatatgagaaaccttctctctcagcccagccgggccccacggttcaggcaggagagaacgtgaccttgtcctgcagctcctggcgctcctttgacatgtaccatctatccagggagggggaggcccatgaacttaggctccctgcagtgcccagtgtccatggaacgttccaggccgacttccctctgggacccatggagggacctacagatgcttcggttctttccgtgccccacccttcgagtggtcagacccgagtgacccactgcccgtttctgtcacagggaactcttcgaatggttggccttcacccactgaaccaagttccaaaactggatgctgctgtaatggaccaagagcctggagtggaaagaacagtgaatccggaggactctgatgaacaagaccctcaggaggtgacatacgcacagttggatcactgcgttttcacacagggaaaaatcactcgcccttctcagaggtccaagagacccccaacagataccagcgtgtacatagagcttccagatgctgagcccagatcgaaagttgaccacagtcaggccttgagggggtcctccagggagacaacagccctgtctcaaacccagcttgccagttccaatgtaccagcagcaggaatctgaagctgtgagtctgcatcttagggcattgctcttcctcacaccacgaatctgaacgtgcctctctctcgcttacaaatgtctaaggtccccactgcctgctgcagagaaaacacactcctttgcttagcccacaattctccacttcacttgacccctgcccacctctccaacctactggcttacttcctagtcctactggaggctgcagtcacaccaaggaactcacaattccaaacatacgagagg

SEQ ID NO: 29607 - DNA, 658 bp, Macaca Mulatta
tgatttgagattctaaacaatgggtctgtttgtttaatgattgacccatcttgtggaaagtgcagatacttttaatgttcaagttgctatttcttcttgaacctaaattgatcattttctccaaacagcttttcatcttttgtggcataataagcacaaattccaggtaactaaatttttataacccttgttgaataatgcaggaggagtgacctctgcataaaaacttcctgtgaaatcagcccattactggaagaaatatctgttataaataggtttagctttgaagatttagaattcaaattagattttttttacactcaacgccacttaaacacatgatctcatgaagcaaaaatgaggtgtttctcaaacaacttcagagttcaaattttaaaattatgtctgttgtagtctgtagtgttgattctacttccccaagttttgatgagagaatattacgaacctttgttaattttagcttattagaaggaagctgctcagaatcccataaacatctgtcttactctagggccaataagagatcacatagagcatgttgggggtgtaaaagggaaaaatgtgtgaacataggggcaaatttctagaggccctttgacaagacccatcagcccacaatcatttgaggcctgttgat

SEQ ID NO: 29608 - DNA, 750 bp, Macaca Mulatta
  misc_feature (1)...(750): n = A,T,C or G
gggactgtgtagatgaagtgctaacaattgctgccatggtaacagctccaaattgcttttcacatgtgccacatggagctgaagaggctgccttgacttgttggaagacatttttacatcccgaaggagatcactttaccctcatcagcatctacaaggcctaccaagacacaactctgaattctaccagtgagtactgtgttgaaaagtggtgtcatgattacttcctcaactgttcagcactcagaatggcagatgttatccgagctgaactcttagaaattatcaagcgaattgagcttccctatgcagaacctgcttttggctccaaggaaaactgtctaaacataaagaaagctcttctgtctggttactttatgcagattgctcgggatgttgatggatcaggtaactacttaatgctgacacataagcaggttgctcagctgcatcccctatctggttactcaatcaccaagaagatgccagagtgggtcctcttccatcaattcagcatttctgagaacaactacatcaggattacctcagaaatctctcctgaactatttatgcaactggtaccacaatactatttcagtaatctgcctcctagtgaaagtaaggatattctacagcaagtaatggatcacctgtcccctatgtcaacaatgaataaggaacaganaatgtgtgagacgtgccctgaaactgctgaacagagatgcactctacagtgactcccccagcaaa

SEQ ID NO: 29609 - DNA, 138 bp, Macaca Mulatta
aggtggtgtggatcacagccaccatgccatacgtggtcctcactgccctgctcctgcgtggggtcaccctccctggggctatagacggcatcagagcgtacctgagcgtcgacttctaccggctctgcgaggcgtctg

SEQ ID NO: 29610 - DNA, 669 bp, Macaca Mulatta
agctgtagctcttgtgggacttccactggtcggacgtcaggctcaggtagctgctgccgcgtacttgttgttgctctgtttggagggtttggtggtctccacacccgcgttgacagcgctgccatctgccttccaggccacttccacggctcccgggtagaagtcactgatcagacacactagtgtggccttgttggcttgaagctcctcagaggagggcgggaacagagtgaccgagggggaagccttgggctgacctaggacggtcagccgggtccctccaccgaataacacataagcgctgctgtgcccaatggcacagtaatagtcagcctcatcctcagactggagcccagagatgcgtaaaatccctgtgttcgctgaagcatctttggatccagagaagcggctggggactccagagccctggtgcttatctgagtctgatttgtacttcagaagataccggggaggactccctggcttctgttggtaccactgtatagtgtagtcaccaacattgatgccaccgctgaaggtgcatgtgagactggctgatgctccaggagatgctgagagggaggccggctgagtcagcacaggctgggagagggaacctgtgcagtgagagaagagcaggaggaagagaggagtccaggccatggtgga

SEQ ID NO: 29611 - DNA, 3332 bp, Macaca Mulatta
  misc_feature (1)...(3332): n = A,T,C or G
gcacacttggagctgaagccctctccagggctccgggcctgtggcccaacggacggaggccgaggaggacccgcagaggtggcggcggccgggggcaggaggatggtgcagaaggagagtcaagcgacgctggaggagcgggagagcgagctcagctccaaccctgccgcctctgcgggggcatcgctggagccgccggcagctccggcacccggagaagacaaccccgccggggctgggggagcggcggtggctggggctgcaggaggggctcggcggttcctgtgtggcgtggtggaaggnnnnnnnnnnnnnnnnnnnnnnnnnnnnnnnnnnnnnnnnnnnnnnnnnnnnnnnnnnnnnnnnnnnnnnnnnnnnnnnnnnnnnnnnnnnnnnnnnnnnnnnnnnnnnnnnnnnnnnnnnnnnnnnnnnnnnnnnnnnnnnnnnnnnnnnnnnnnnnnnnnnnnnnnnnnnnnnnnnnnnnnnnnnnnnnnnnnnnnnnnnnnnnnnnnnnnnnnnnnnnnnnnnnnnnnnnnnnnnnnnnnnnnnnnnnnnnnnnnnnnnnnnnnnnnnnnnnnnnnnnnnnnnnnnnnnnnnnnnnnnnnnnnnnnnnnnnnnnnnnnnnnnnnnnnnnnnnnnnnnnnnnnnnnnnnnnnnnnnnnnnnnnnnnnnnnnnnnnnnnnnnnnnnnnnnnnnnnnnnnnnnnnnnnnnnnnnnnnnnnnnnnnnnnnnnnnnnnnnnnnnnnnnnnnnnnnnnnnnnnnnnnnnnnnnnnnnnnnnnnnnnnnnnnnnnnnnnnnnnnnnnnnnnnnnnnnnnnnnnnnnnnnnnnnnnnnnnnnnnnnnnnnnnnnnnnnnnnnnnnnnnnnnnnnnnnnnnnnnnnnnnnnnnnnnnnnnnnnnnnnnnnnnnnnnnnnnnnnnnnnnnnnnnnnnnnnnnnnnnnnnnnnnnnnnnnnnnnnnnnnnnnnnnnnnnnnnnnnnnnnnnnnnnnnnnnnnnnnnnnnnnnnnnnnnnnnnnnnnnnnnnnnnnnnnnnnnnnnnnnnnnnnnnnnnnnnnnnnnnnnnnnnnnnnnnnnnnnnnnnnnnnnnnnnnnnnnnnnnnnnnnnnnnnnnnnnnnnnnnnnnnnnnnnnnnnnnnntaggcaagttgcacacagtggagctaaagcaagtgtagttgatgggactcctttagttgcagcaccttctttaaatgccacaaccgtagtaacaacagtttatcaggagcccattatgagccaaggagcagccttgagtggtgagcctactactctgaccaaggaagaagaaaagaaacagcctgatgaagaacccatggacatggtggtggaaaaacaagaagaaacggaccacaagaatgacagtcaaatactgagtgaaattgttgaagcgaaaatggcagaggaattgaaaccaatggacactgataaagagagcatagctgaatcaaaatccccagagatgtccatgcaagaagattgtattagtgacattgcccctatgcagactgatgaacagacgaacaaggagcagtttgtgccaggtccaaatgaaaaacctttatacactgcagaaccagtgaccctggaggatttgcagttacttgctgatctattctacctaccttatgagcatggacccaaaggagcacagatgttacgggaatttcagtggcttcgagcaaatagtagtgttgtcagtgtcaactgcaaaggaaaagactctgaaaaannnnnnnnnnnnnnnnnnnnnnnnnnnnnnnnnnnnnnnnnnnnnnnnnnnnnnnnnnnnnnnnnnnnnnnnnnnnnnnnnnnnnnnnnnnnnnnnnnnnnnnnnnnnnnnnnnnnntatgtttgggatatcaagagtataatgtctatggtgaagtcttttgtacagtggttagnnnnnnnnnnnnnnnnnnnnnnnnnnnnnnnnnnnnnnnnnnnnnnnnnnnnnnnnnnnnnnnnnnnnnnnnnnnnnnnnnnnnnnnnnnnnnnnnnnnnnnnnnnnnnnnnnnnnnnnnnnnnnnnnnnnnnnnnnnnnnnnnnnaggcatccgtgtacaagatttgcagagaaatgtatgacgatggagtgggtttaccctttcaaagtcagcctgatcttattggagacaagnnnnnnnnnnnnnnnnnnnnnnnnnnnnnnnnnnnnnnnnnnnnnnnnnnnnnnnnnnnnnnnnnnnnnnnnnnnnnnnnnnnnnnnnnnnnnnnnnnnnnnnnnnnnnnnnnnnnnnnnnnnnnnnnnnnnnnnnnnnnnnnnnnnnnnnnnnnnnnnnnnnnnnnnnnnnnnnnnnnnnnnnnnnnnnnnnnnnnnnnnnnnnnnnnnnnnnnnnnnnnnnnnnnnnnnnnnnnnnnnnnnnnnnnnnnnnnnnnnnnnnnnnnnnnnnnnnnnnnnnnnnnnnnnnnnnnnnnnnnnnnnnnnnnnnnnnnnnnnnnnnnnnnnnnnnnnnnnnnnnnnnnnnnnnnnnnnnnnnnnnnnnnnnnnnnnnnnnnnnnnnnnnnnnnnnnnnnnnnnnnnnnnnnnnnnnnnnnnnnnnnnnnnnnnnnnnnnnnnnnnnnnnnnnnnnnnnnnnnnnnnnnnnnnnnnnnnnnnnnnnnnnnnnnnnnnnnnnnnnnnnnnnnnnnnnnnnnnnnnnnnnnnnnnnnnnnnnnnnnnnnnnnnnnnnnnnnnnnnnnnnnnnnnnnnnnnnnnnnnnnnnnnnnnnnnnnnnnnnnnnnnnnnnnnnnnnnnnnnnnnnnnnnnnnnnnnnnnnnnnnnnnnnnnnnnnnnnnnnnnnnnnnnnnnnnnnnnnnnnnnnnnnnnnnnnnnnnnnnnnnnnnnnnnnnnnnnnnnnnnnnnnnnnnnnnnnnnnnnnnnnnnnnnnnnnnnnnnnnnnnnnnnnnnnnnnnnnnnnnnnnnnnntcagcactattttctgcatccagtgtggttgcatttctcacctgagggtaatcaaaataacatctgtcatcttccttggtttattgagtgaaatgtctcagtctttggggacatggcagagatgaaaaagatttagtgggtttcagaagtgtcagggtggagtgattccaagtgggatggttgtggcattagtttaagctgaataaataatttcaatttggggcagttattctgctttttgtaaagccgtggccaattgtctcctgtaatgacttggttcaggcatgttactttgtagggacaaatgtgcatttgtttgtggcaaaagcctacaattgacaaacttgtaaatttctttgtatataaactagctgtaacctgacta

SEQ ID NO: 29612 - DNA, 1779 bp, Macaca Mulatta
  misc_feature (1)...(1779): n = A,T,C or G
ccgcgtttcatctttcaaggctgttgcagaggcggcttgcttcccaccgtccatctccataaaaatccctacaggaaacatgcccacgtgtccagagcttttaaggacttggtgcatttcagacgaaggcttttccagaagcttccgcgtaggagaggatcaggcttccaactggttnnnnnnnnnnnnnnnnnnnnnnnnnnnnnnnnnnnnnnnnnnnnnnnnnnnnnnnnnnnnnnnnnnnnnnnnnnnnnnnnnnnnnnnnnnnnnnnnnnnnnnnnnnnnnnnnnnnnnnnnnnnnnnnnnnnnnnnnnnnnnnnnnnnnnnnnnnnnnnnnnnnnnnnnnnnnnnnnnnnnnnnnnnnnnnnnnnnnnnnnnnnnnnnnnnnnnnnnnnnnnnnnnnnnnnnnnnnnnnnnnnnnnnnnnnnnnnnnnnnnnnnnnnnnnnnnnnnnnnnnnnnnnnnnnnnnnnnnnnnnnnnnnnnnnnnnnnnnnnnnnnnnnnnnnnnnnnnnnnnnnnnnnnnnnnnnnnnnnnnnnnnnnnnnnnnnnnnnnnnnnnnnnnnnnnnnnnnnnnnnnnnnnnnnnnnnnnnnnnnnnnnnnnnnnnnnnnnnnnnnnnnnnnnnnnnnnnnnnnnnnnnnnnnnnnnnnnnnnnnnnnnnnnnnnnnnnnnnnnnnnnnnnnnnnnnnnnnnnnnnnnnnnnnnnnnnnnnnnnnnnnnnnnnnnnnnnnnnnnnnnnnnnnnnnnnnnnnnnnnnnnnnnnnnnnnnnnnnnnnnnnnnnnnnnnnnnnnnnnnnnnnnnnnnnnnnnnnnnnnnnnnnnnnnnnnnnnnnnnnnnnnnnnnnnnnnnnnnnnnnnnnnnnnnnnnnnnnnnnnnnnnnnnnnnnnnnnnnnnnnnnnnnnnnnnnnnnnnnnnnnnnnnnnnnnnnnnnnnnnnnnnnnnnnnnnnnnnnnnnnnnnnnnnnnnnnnnnnnnnnnnnnnnnnnnnnnnnnnnnnnnnnnnnnnnnnnnnnnnnnnnnnnnnnnnnnnnnnnnnnnnnnnnnagaacagtgccctgctggccaccaggtcatgaaggaggcgtttgggcccccaggtgggttccagagggtcacctggtggtgcccacagtgccagccccagttgtcagaggagccggagcagcgccagttctcctaaggaactcatggtgctcttcctggaacctggcccttggggaacctgacgtctaagtgtccagaaaggaggatgtgggcagggatgggatgcagagggtagtgtatgtcggggtgccaggattataatattcacctccctggagttatgttgaaagcagagttttcataggattagattctttttatccttttctagttcagtgaattcatcctattgaattgcatcatagtgaaagatgagagaaatcgtgatgatggggaaggggagaacctcccagaaggcactggggcaaggaaaaagaaagcctgtgggaaatggctgagctcccagcacggctttgcaggtgatgtggnnnnnnnnnnnnnnnnnnnnnnnnnnnnnnnnnnnnngtcttgctctgtctcccaggctagggtgcagtggcatgagcttggctcaccgcagccttgccctcctaggctcaagcagtcttcacctcagcctccagagcagatgggactacgggcatgtgctgtgatgcctggctgatttttgtttactttttatagagatggggtctaggcatacttggccaggctggttttgaactcctgcaactc

SEQ ID NO: 29613 - DNA, 115 bp, Macaca Mulatta
tctcccaggcgacccggaggtagcatttcccaggaggcacggtcccccgcagggggatgggcgcagccacaccagatggacgagaagaccaagaaaggtgggcagaggctggagg

SEQ ID NO: 29614 - DNA, 1397 bp, Macaca Mulatta
  misc_feature (1)...(1397): n = A,T,C or G
ggagtgccttagagcagagctgcggccgcggaacgggagccgctgagaaaggagggccgctgcaggcggggttccaaccgcggggtctgggctgctcccgcggagggcctgggcggccgcgcgatgctgggagtccgctgtctgcttcggtccgtgcgcttctgttcctccgcccctttccccaggcacaaaccttcagccaaactgagcgtgcgggacgctctcggggcccagaacacgagtggggaaaacattaaggtccaggtnnnnnnnnnnnnnnnnnnnnnnnnnnnnnnnnnnnnnnnnnnnnnnnnnnnnnnnnnnnnnnnnnnnnnnnnnnnnnnnnnnnnnnnnnnnnnnnnnnnnnnnnnnnnnnnnnnnnnnnnnnnnnnnnnnnnnnnnnnnnnnnnnnnnnnnnnnnnnnnnnnnnnnnnnnnnnnnnnnnnnnnnnnnnnnnnnnnnnnnnnnnnnnnnnnnnnnnnnnnnnnnnnnnnnnnttccccatcaaatataaagagaggcatcctctggagtacctgagacaataccctcactttaggtgtaggactaacgttctgggttctatactgaggattcgcagtgaagccacagctgctattcattctttctttaannnnnnnnnnnnnnnnnnnnnnnnnnnnnnnnnnnnnnnnnnnnnnnnnnnnnnnnnnnnnnnnnnnnnnnnnnnnnnnnnnnnnnnnnnnnnnnnnnnnnnnnnnnnnnnnnnnnnnnnnnnnnnnnnnnnnnnnnnnnnnnnnnnnnnnnnnnnnnnnnnnnnnnnnnnnnnnnnnnnnnnnnnnnnnnnnnnnnnnnnnnnnnnnnnnnnnnnnnnnnnnnnnnnnnnnnnnnnnnnnnnnnnnnnnnnnnnnnnnnnnnnnnnnnnnnnnnnnnnnnnnnnnnnnnnnnnnnnnnnnnnnnnnnnnnnnnnnnnnnnnnnnnnnnnnnnnnnnnnnnnnnnnnnnnnnnnnnnnnnnnnnnnnnnnnnnnnnnnnnnnnnnnnnnnnnnnnnnnnnnnnnnnnnnnnnnnnnnnnnnnnnnnnnnnnnnnnnnnnnnnnnnnnnnnnnnnnnnnnnnnnnnnnnnnnnnnnnnnnnnnnnnnnnnnnnnnnnnnnnnnnnnnnnnnnnnnnnnnnnnnnnnnnnnnnnnnnnnnnnnnnnnnnactgaacatgaaaagtacctggtgaagcactgtggcaacatacctgtcttcattattaattatccattagcaatcaagcctttctacatgagggataatgaagatggccctcagcacagttgctgctgttgatcttctggttcctggagttggggaactctttggaggaggcctcagagaagaacgataccatttcttagaggagcgcttagccag

SEQ ID NO: 29615 - DNA, 621 bp, Macaca Mulatta
gggggcagacccgcttcacttcagcctgggttgaggtggaggagaattcccggaattatggcgaagtccgggctggggcaggatcctcagagcacagctgcagccactgtgctcaagcgggcggtagaactggattcggagtcgcggtatccgcaggctctggtgtgttaccaagagggaattgatctgctcctgcaggttctgaaaggtaccaaagataatactaagagatgtaatctcagagaaaaaatttccaaatacatggcacgagcggaaaacataaagcagcacttgcagcaagaaaaacaagatggaacatatcacatgccaatctaaaatagaagagaatgcaacgggtttcagctactagtcaccttttcgcgaagatcttaatgagacatttacataagtttggactcatgatgctaattttcaccctttcaaccgccgtaccagtttactccttatgtgatagcttctcactaatctagtattttgaagccctaaactatgtgcctcactgtcatctctttattcttctcccccctttcgtcttcaagatctgctatttaatctgtccttcctttctctattctcttcttccctactctcgcccattgt

SEQ ID NO: 29616 - DNA, 813 bp, Macaca Mulatta
  misc_feature (1)...(813): n = A,T,C or G
aggactagaaggctgggaaaaaaggcttattatatctgacagagctcatattnnnnnnnnnnnnnnnnnnnnnnnnnnnnnnnnnnnnnnnnnnnnnnnnnnnnnnnnnnnnnnnnnnnnnnnnnnnnnnnnnnnnnnnnnnnnnnnnnnnnnnnnnnnnnnnnnnnnnnnnnnnnnnnnnnnnnnnnnnnnnnnnnnnnnnnnnnnnnnnnnnnnnnnnnnnnnnnnnnnnnnnnnnnnnnnnnnnnnnnnnnnnnnnnnnnnnnnnnnnnnnnnnnnnnnnnnnnnnnnnnnnnnnnnnnnnnnnnnnnnnnnnnnnnnnnnnnnnnnnnnnnnnnnnnnnnnnnnnnnnnnnnnnnnnnnnnnnnnnnnnnnnnnnnnnnnnnnnnnnnnnnnnnnnnnnnnnnnnnnnnnnnnnnnnnnnnnnnnnnnnnnnnnnnnnnnnnnnnnnnnnnnnnnnnnnnnnnnnnnnnnnnnnnnnnnnnnnnnnnnnnnnnnnnnnnnnnnnnnnnnnnnnnnnnnnnnnnnnnnnnnnnnnnnnnnnnnnnnnnnnnnnnnnnnnnnnnnnnnnnnnnnnnnnnnnnnnnnnnnnnnnnnnnnnnnnnnnnnnnnnnnnnnnnnnnnnnnnnnnnnnnnnnnnnnnnnnnnnnnnnnnnnnnnnnnnnnnnnnnnnnnnnnnnnnnnnnnnnnnnnnnnnnnnnnnnnnnnnnnnnnnngttggcacttaccaagctggatattttggacatgtttacggaaatcaaagttggagttgcttacaagttagatggtgaaatcatacctcatatccca

SEQ ID NO: 29617 - DNA, 650 bp, Macaca Mulatta
ggggagagatgtcgttactgtgtcctgcctgtctggatgcttaggagcgcgactcaaaattacacccctgaggacctcggagaaagatactgtactctgaaacattaaatcttgctgatccgtgctggccatgttttcctgattgctccagagtggcaggtaacctcatatactgtggcctcgtgaatagaaatgtctgcccatgtgtcaggattggaaataatgaatgaagatcagttaatcaaagaagtcttggataaattccttaattgtcatgagcaaacaaatgatgaagaatttctgaacacttttgctcatcgttcacaagaggatcttgtgtccgaaaggggagtgtttggaactgattcttcagaaaacatttttacctcagcaaaagttactcataaaaatgaagcaaataactgccatcttagaaataaaaccatctttcttcgtacttcatcacagtgtttggaagaacaggtaaacaatttcctagatttagaagatttggacatggatgaagagattaaaccccaaatgagtgaggatttgctgcttcttccaggagaagtggagcaggctgcaagcaccagcattcctccctgtatcccttctgtagcccagcctcctacctgtgaggtgaagcc

SEQ ID NO: 29618 - DNA, 2865 bp, Macaca Mulatta
  misc_feature (1)...(2865): n = A,T,C or G
cctcggagccactacactgctcgctgcagacacagactgcaccatgaagccagccctcctgccctgggccctgctgctgctggcgacagcccnnnnnnnnnnnnnnnnnnnnnnnnnnnnnnnnnnnnnnnnnnnnnnnnnnnnnnnnnnnnnnnnnnnnnnnnnnnnnnnnnnnnnnnnnnnnnnnnnnnnnnnnnnnnnnnnnnnnnnnnnnnnnnnnnnnnnnnnnnnnnnnnnnnnnnnnnnnnnnnnnnnnnnnnnnnnnnnnnnnnnnnnnnnnnnnnnnnnnnnnnnnnnnnnnnnnnnnnnnnnnnnnnnnnnnnnnnnnnnnnnnnnnnnnnnnnnnnnnnnnnnnnnnnnnnnnnnnnnnnnnnnnnnnnnnnnnnnnnnnnnnnnnnnnnnnnnnnnnnnnnnnnnnnnnnnnnnnnnnnnnnnnnnnnnnnnnnnnnnnnnnnnnnnnnnnnnnnnnnnnnnnnnnnnnnnnnnnnnnnnnnnnnnnnnnnnnnnnnnnnnnnnnnnnnnnnnnnnnnnnnnnnnnnnnnnnnnnnnnnnnnnnnnnnnnnnnnnnnnnnnnnnnnnnnnnnnnnnnnnnnnnnnnnnnnnnnnnnnnnnnnnnnnnnnnnnnnnnnnnnnnnnnnnnnnnnnnnnnnnnnnnnnnnnnnnnnnnnnnnnnnnnnnnnnnnnnnnnnnnnnnnnnnnnnnnnnnnnnnnnnnnnnnnnnnnnnnnnnnnnnnnnnnnnnnnnnnnnnnnnnnnnnnnnnnnnnnnnnnnnnnnnnnnnnnnnnnnnnnnnnnnnnnnnnnnnnnnnnnnnnnnnnnnnnnnnnnnnnnnnnnnnnnnnnnnnnnnnnnnnnnnnnnnnnnnnnnnnnnnnnnnnnnnnnnnnnnnnnnnnnnnnnnnnnnnnnnnnnnnnnnnnnnnnnnnnnnnnnnnnnnnnnnnnnnnnnnnnnnnnnnnnnnnnnnnnnnnnnnnnnnnnnnnnnnnnnnnnnnnnnnnnnnnnnnnnnnnnnnnnnnnnnnnnnnnnnnnnnnnnnnnnnnnnnnnnnnnnnnnnnnnnnnnnnnnnnnnnnnnnnnnnnnnnnnnnnnnnnnnnnnnnnnnnnnnnnnnnnnnnnnnnnnnnnnnnnnnnnnnnnnnnnnnnnnnnnnnnnnnnnnnnnnnnnnnnnnnnnnnnnnnnnnnnnnnnnnnnnnnnnnnnnnnnnnnnnnnnnnnnnnnnnnnnnnnnnnnnnnnnnnnnnnnnnnnnnnnnnnnnnnnnnnnnnnnnnnnnnnnnnnnnnnnnnnnnnnnnnnnnnnnnnnnnnnnnnnnnnnnnnnnnnnnnnnnnnnnnnnnnnnnnnnnnnnnnnnnnnnnnnnnnnnnnnnnnnnnnnnnnnnnnnnnnnnnnnnnnnnnnnnnnnnnnnnnnnnnnnnnnnnnnnnnnnnnnnnnnnnnnnnnnnnnnnnnnnnnnnnnnnnnnnnnnnnnnnnnnnnnnnnnnnnnnnnnnnnnnnnnnnnnnnnnnnnnnnnnnnnnnnnnnnnnnnnnnnnnnnnnnnnnnnnnnnnnnnnnnnnnnnnnnnnnnnnnnnnnnnnnnnnnnnnnnnnnnnnnnnnnnnnnnnnnnnnnnnnnnnnnnnnnnnnnnnnnnnnnnnnnnnnnnnnnnnnnnnnnnnnnnnnnnnnnnnnnnnnnnnnnnnnnnnnnnnnnaggaatgttcctgtcggtggctgccagggacacggtctccatcatgctggcatcaggggccggcctggaggtcagcgtgcagggcccgttcctgagtgtgtccgtcctgctgcctgagaagttcctcacccacacccacggcctccttggaacactgaacaatgaccccaccgacgacttcaccctgcgcagcgggcgcgtcctgcccccgggcagcagtcaccgggagctgttcctgtttggggnnnnnnnnnnnnnnnnnnnnnnnnnnnnnnnnnnnnnnnnnnnnnnnnnnnnnnnnnnnnnnnnnnnnnnnnnnnnnnnnnnnnnnnnnnnnnnnnnnnnnnnnnnnnnnnnnnnnnnnnnnnnnnnnnnnnnnnnnnnnnnnnnnnnnnnnnnnnnnnnnnnnnnnnnnnnnnnnnnnnnnnnnnnnnnnnnnnnnnnnnnnnnnnnnnnnnnnnnnnnnnnnnnnnnnnnnnnnnnnnnnnnnnnnnnnnnnnnnnnnnnnnnnnnnnnnnnccagtagtgtcctgtggctggctggccccacctcccaacggacaaaaggagggcaacaggtacctggcaggttccaccatctacttccactgtgacaacggctacagcctggccagggcagagaccagcacctgccaggctgatggcacctggtcctcacccaccccggagtgccagccagnnnnnnnnnnnnnnnnnnnnnnnnnnnnnnnnnnnnnnnnnnnnnnnnnnnnnnnnnnnnnnnnnnnnnnnnnnnnnnnnnnnnnnnnnnnnnnnnnnnnnnngcacatctggggcacacagccctgatgggagcgtctcgtctgtgagcaccaggccaagactcctgagaacaggcaccccagtcctgctactcccgcatccccaggaccagacacctgggacccagacacttgatacctgggcctttaaccccctactctgtcatctcagacctcaggcaggaggcccagatttccaacacccaagccccgtgctagcagcgctccgtgctgttccccaaatactcacggctctaatcccctgaaacttcataccctgggattctaatacctgtgtcctgagccctttcacgcccacacctgagcctcagattccaatacctcactccccacagcctgacgccagggcccctgaccgctg

SEQ ID NO: 29619 - DNA, 92 bp, Macaca Mulatta
ggaaaactttcctgcaagcaatactgaaagactgcaagacctgaaatcaactgttgacctgctaacaagtatcaccttttttaggatgaagg

SEQ ID NO: 29620 - DNA, 353 bp, Macaca Mulatta
agttccggatttcggaaggttcacgagtgttgccgacacgccctcccagctgcagacatcctccctggaggacctgctgtgctcacatgcccccctgtccagcgaggacgacacctccccaggctgcgcagccccctcccagtcacccttcaaggccttcctcagtcccccggagctgcacagccaccgaggcaccgacaggaagctgtccccgctcctgagccccttgcaagagtcactggtggacaagaccctgctggagcccagggagatggtccggcctaagaaggtgtgcttctcggagagcagcctgcccaccggggacaggaccaggaggagctactacctcaatg

SEQ ID NO: 29621 - DNA, 2182 bp, Macaca Mulatta
  misc_feature (1)...(2182): n = A,T,C or G
agcgcgggcgtgggccggacgggcaccttcattgtgatcgatgccatgatggccatgatgcacgcggagcagaaggtggatgtgtttgaatttgtgtctcgaatccgtaatcagcgccctcagatggttcaaacggatnnnnnnnnnnnnnnnnnnnnnnnnnnnnnnnncgagtactacctctatggagacacagagctggacgtgtcctccctggagaagcacctgcagaccgtgcatggcaccaccactcacttcgacaagatcgggctggaggaggagttcaggngaaattgacaaatgtccggatcatgaaggagaacatgaggacgggcaacttgccggcaaacatgaagaaggccagggtcatccagatcatcccatgtaaggcacccatggcatggctggggtgggactggggttgggctggtgccagaggcttttatcccggaggagccattcaccacttacccctgtgcaccaggatcaagagcagggtgnnnnnnnnnnnnnnnnnnnnnnnnnnnnnnnnnnnnnnnnnnnnnnnnnnnnnnnnnnnnnnnnnnnnnnnnnnnnnnnnnnnnnnnnnnnnnnnnnnnnnnnnnnnnnnnnnnnnnnnnnnnnnnnnnnnnnnnnnnnnnnnnnnnnnnnnnnnnnnnnnnnnnnnnnnnnnnnnnnnnnnnnnnnnnnnnnnnnnnnnnnnnnnnnnnnnnnnnnnnnnnnnnccttatctcccccagcctgggcagaggcccacctcccccttacacagagggcctgagccacctggccgaggccatgcaagcgaactcagctgagaccatctaggaaaaggctgtggccttgaggaggacaagaaatgggcccagggtggagtcaggacactggtctgccgcccaggtcatgggagagggaaggggggcctggcaggcgcaggaggagaggaggcaaagctggcaagaagacagggccacnnnnnnnnnnnnnnnnnnnnnnntcgggaggctcaaaaagtgagaaaaagagaaacctgagaaacccggcccgaaagcagactccacagggatccgaggaactagagagggagggggagatgctccgcttgggaggagggtgtgtctcattatagacatcttttggatggagtcacagctcaacaaacaccagctagagacagctgtgagcaggcctcgctgcagcagggtctcccgaagcactgtaggcganatgactttaaccgagtgatcctttccatgaaaaggggtcaagaatacacagactacatcaatgcatccttcataganggctaccgacagaaggactatttcatcgccacccaggggccactggcccacacggttgaggacttctggaggatgatctgggaatggaaatcccacactatcgtgatgctgacggaggtgcaggagagagagcaggnnnnnnnnnnnnnnnnnnnnnnnnnnnnnnnnnnnnnnnnnnnnnnnnnnnnnnnnnnnnnnnnnnnnnnnnnnnnnnnnnnnnnnnnnnnnnnnnnnnnnnnnnnnnnnnnnnnnnnnnnnnnnnnnnnnnnnnnnnnnnnnnnnnnnnnnnnnnnnnnnnnnnnnnnnnnnnnnnnnnnnnnnnnnnnnnnnnnnnnnnnnnnnnnnnnnnnnnnnnnnnnnnnnnnnnnnnnnnnnnnnnnnnnnnnnnnnnnnnnnnnnnnnnnnnnnnnnnnnnnnnnnnnnnnnnnnnnnnnnnnnnnnnnnnnnnnnnnnnnnnnnnnnnnnnnnnnnnnnnnnnnnnnnnnnnnnnnnnnnnnnnnnnnnnnnnnnnnnnnnnnnnnnnnnnnnnnnnnnnnnnnnnnnnnnnnnnnnnnnnnnnnnnnggaacagtatgaattctgctacaaagtggtacaagattttattgatatattttctgattatgctaatttcaaatgaagattcctgccttaaaatattttttaatttaatggtcagtatattttgtaaaaatcatgttaatttatttcatagttgacattaatatcttccctaatttctttgtatatattttgttatgccttaaaggccacctgctataaagttgttaaatcttaaatatgctttttaaaaattggaataatgtattaaggtcaaataatatctcataaaatatatatttctgctaatattagtaa

SEQ ID NO: 29622 - DNA, 703 bp, Macaca Mulatta
ctgtgggctgagctttgtggctggtggcatctcagggacggtggctgcagtgctgactctaccctttgatgtggtgaagacccaacgccaggtcgcgctgggagcaatggaggctgtgagagtgagccccctgcatgtgagctccacctggctgctgctgcggaggatccgcgccgagtctggcaccaagggactctttgcaggcttccttcctcggatcatcaaggctgccccctcctgcgccatcatgatcagcacctacgagtttggcaaaagcttcttccagaggctgaaccaggaccggcttctgggcagctgaaaggggcatggaggcaaggaccccgtctctcccatggatggggagagggcaggaggatacccagccaagtgcctttttctcagcactgagggagggggcttgtttcccttccctgctagcgacaagctccagggcagggctgtccctctgggcggcccagcccttcctcagacgcaacttcttcctgctgctccaatcgtggggatcatcactttcccaccccccaagttcaagaccaaatcttccagctgcccccttcgtgttgccctgtgtttgctgtagctgggcctgtctccggaaaccgagaaaccctcagcctggcatagtctccctgacccctgttcattccttaagtgtaaagatgatgaacttctgaaaaaaaaa

SEQ ID NO: 29623 - DNA, 889 bp, Macaca Mulatta
caacactgacaccactgtgacgatgatgaccatctggctgtccggcacgggctcatagatctccagcatcttcgggtctgagtgtgtgcagaagacttcgccaccgcgagacatcaagtccagcacagccaggcaggagaagttgtggtgtccgtcctctctgtgagccatgctgctgaatgtgtctgtggcctccttcagggcaggggctgccttcccgaaggtctgactgtgcagagtctcactgccacggagcaggctgagggtgaggctgtccaggggctccacggcgggcaccctgcactcgatggtgaaggacttgcccacggccacccaagtgggctgcagtgtgaggaagacctgccttggaggctggtacacgctgacgttggaactcattgacttctgcttcccagagcaggtgaagtggcaccagaggaccgtgtcatgggagatgtttgagatcaagtaatgcttccactgagtctgttcgagcagcagaatcttatttagagaagtctccagaccacccacttcaggctggttacaggtggtgctgcagttgacctcgaaggactccttgggctttactatcagcttctctagcctcatatgtacctcgaatgccttctcatcagatcctgaacagcagaccagggcaaagagggccacggtcagggtcccgaaaccaaaagaggacatctccggcagtgtccacgggcttgcagggaccagcgaagggctgccagggagaaactgatgcccagagaggggaacgcactaaaactcagacctcgacactgccaaaattctgtcccatgccgccaagcttcactggagggaaagtgagaagctcgaccttacccctgtgggtcaccaaggggtggct

SEQ ID NO: 29624 - DNA, 3731 bp, Macaca Mulatta
  misc_feature (1)...(3731): n = A,T,C or G
gatgtacggggaccctctatgcaccgaacccaatatgttcattccccgtatgatcgtcctggttggaaccctcggttctgcatcatctnnnnnnnnnnnnnnnnnnnnnnnnnnnnnnnnnnnnnnnnnnnnnnnnnnnnnnnnnnnnnnnnnnnnnnnnnnnnnnnnnnnnnnnnnnnnnnnnnnnnnnnnnnnnnnnnnnnnnnnnnnnnnnnnnnnnnnnnnnnnnnnnnnnnnnnnnnnnnnnnnnnnnnnnnnnnnnnnnnnnnnnnnnnnnnnnnnnnnnnnnnnnnnnnnnnnnnnnnnnnnnnnnnnnnnnnnnnnnnnnnnnnnnnnnnnnnnnnnnnnnnnnnnnnnnnnnnnnnnnnnnnnnnnnnnnnnnnnnnnnnnnnnnnnnnnnnnnnnnnnnnnnnnnnnnnnnnnnnnnnnnnnnnnnnnnnnnnnnnnnnnnnnnnnnnnnnnnnnnnnnnnnnnnnnnnnnnnnnnnnnnnnnnnnnnnnnnnnnnnnnnnnnnnnnnnnnnnnnnnnnnnnnnnnnnnnnnnnnnnnnnnnnnnnnnnnnnnnnnnnnnnnnnnnnnnnnnnnnnnnnnnnnnnnnnnnnnnnnnnnnnnnnnnnnnnnnnnnnnnnnnnnnnnnnnnnnnnnnnnnnnnnnnnnnnnnnnnnnnnnnnnnnnnnnnnnnnnnnnnnnnnnnnnnnnnnnnnnnnnnnnnnnnnnnnnnnnnnnnnnnnnnnnnnnnnnnnnnnnnnnnnnnnnnnnnnnnnnnnnnnnnnnnnnnnnnnnnnnnnnnnnnnnnnnnnnnnnnnnnnnnnnnnnnnnnnnnnnnnnnnnnnnnnnnnnnnnnnnnnnnnnnnnnnnnnnnnnnnnnnnnnnnnnnnnnnnnnnnnnnnnnnnnnnnnnnnnnnnnnnnnnnnnnnnnnnnnnnnnnnnnnnnnnnnnnnnnnnnnnnnnnnnnnnnnnnnnnnnnnnnnnnnnnnnnnnnnnnnnnnnnnnnnnnnnnnnnnnnnnnnnnnnnnnnnnnnnnnnnnnnnnnnnnnnnnnnnnnnnnnnnnnnnnnnnnnnnnnnnnnnnnnnnnnnnnnnnnnnnnnnnnnnnnnnnnnnnnnnnnnnnnnnnnnnnnnnnnnnnnnnnnnnnnnnnnnnnnnnnnnnnnnnnnnnnnnnnnnnnnnnnnnnnnnnnnnnnnnnnnnnnnnnnnnnnnnnnnnnnnnnnnnnnnnnnnnnnnnnnnnnnnnnnnnnnnnnnnnnnnnnnnnnnnnnnnnnnnnnnnnnnnnnnnnnnnnnnnnnnnnnnnnnnnnnnnnnnnnnnnnnnnnnnnnnnnnnnnnnnnnnnnnnnnnnnnnnnnnnnnnnnnnnnnnnnnnnnnnnnnnnnnnnnnnnnnnnnnnnnnnnnnnnnnnnnnnnnnnnnnnnnnnnnnnnnnnnnnnnnnnnnnnnnnnnnnnnnnnnnnnnnnnnnnnnnnnnnnnnnnnnnnnnnnnnnnnnnnnnnnnnnnnnnnnnnnnnnnnnnnnnnnnnnnnnnnnnnnnnnnnnnnnnnnnnnnnnnnnnnnnnnnnnnnnnnnnnnnnnnnnnnnnnnnnnnnnnnnnnnnnnnnnnnnnnnnnnnnnnnnnnnnnnnnnnnnnnnnnnnnnnnnnnnnnnnnnnnnnnnnnnnnnnnnnnnnnnnnnnnnnnnnnnnnnnnnnnnnnnnnnnnnnnnnnnnnnnnnnnnnnnnnnnnnnnnnnnnnnnnnnnnnnnnnnnnnnnnnnnnnnnnnnnnnnnnnnnnnnnnnnnnnnnnnnnnnnnnnnnnnnnnnnnnnnnnnnnnnnnnnnnnnnnnnnnnnnnnnnnnnnnnnnnnnnnnnnnnnnnnnnnnnnnnnnnnnnnnnnnnnnnnnnnnnnnnnnnnnnnnnnnnnnnnnnnnnnnnnnnnnnnnnnnnnnnnnnnnnnnnnnnnnnnnnnnnnnnnnnnnnnnnnnnnnnnnnnnnnnnnnnnnnnnnnnnnnnnnnnnnnnnnnnnnnnnnnnnnnnnnnnnnnnnnnnnnnnnnnnnnnnnnnnnnnnnnnnnnnnnnnnnnnnnnnnnnnnnnnnnnnnnnnnnnnnnnnnnnnnnnnnnnnnnnnnnnnnnnnnnnnnnnnnnnnnnnnnnnnnnnnnnnnnnnnnnnnnnnnnnnnnnnnnnnnnnnnnnnnnnnnnnnnnnnnnnnnnnnnnnnnnnnnnnnnnnnnnnnnnnnnnnnnnnnnnnnnnnnnnnagctccatcgaccttcagtccttcatggctcgaggcctcaacagnacagctctatggacatggctcgcctcccctccccaaccaaggaaaagccacccccaccaccacctggtgggggtaaagacctgttctatgtaagccgtccacccctggcccgttcctcaccagcatactgcacgagcagctcggacatcacagagccagagcagaagatgctgagtgtcaacaannnnnnnnnnnnnnnnnnnnnnnnnnnnnnnnnnnnnnnnnnnnnnnnnnnnnnnnnnnnnnnnnnnnnnnnnnnnnnnnnnnnnnnnnnnnnnnnnnnnnnnnnnnnnnnnnnnnnnnnnnnnnnnnnnnnnnnnnnnnnnnnnnnnnnnnnnnnnnnnnnnnnnnnnnnnnnnnnnnnnnnnnnnnnnnnnnnnnnnnnnnnnnnnnnnnnnnnnnnnnnnnnnnnnnnnnnnnnnnnnnnnnnnnnnnnnnnnnnnnnnnnnnnnnnnnnnnnnnnnnnnnnnnnnnnnnnnnnnnnnnnnnnnnnnnnnnnnnnnnnnnnnnnnnnnnnnnnnnnnnnnnnnnnnnnnnnnnnnnnnnnnnnnnnnnnnnnnnnnnnnnnnnnnnnnnnnnnnnnnnnnnnnnnnnnnnnnnnnnnnnnnnnnnnnnnnnnnnnnnnnnnnnnnnnnnnnnnnnnnnnnnnnnnnnnnnnnnnnnnnnnnnnnnnnnnnnnnnnnnnnnnnnnnnnnnnnnnnnnnnnnnnnnnnnnnnnnnnnnnnnnnnnnnnnnnnnnnnnnnnnnnnnnnnnnnnnnnnnnnnnnnnnnnnnnnnnnnnnnnnnnnnnnnnnnnnnnnnnnnnnnnnnnnnnnnnnnnnnnnnnnnnnnnnnnnnnnnnnnnnnnnnnnnnnnnnnnnnnnnnnnnnnnnnnnnnnnnnnnnnnnnnnnnnnnnnnnnnnnnnnnnnnnnnnnnnnnnnnnnnnnnnnnnnnnnnnnnnnnnnnnnnnnnnnnnnnnnnnnnnnnnnnnnnnnnnnnnnnnnnnnnnnnnnnnnnnnnnnnnnnnnnnnnnnnnnnnnnnnnnnnnnnnnnnnnnnnnnnnnnnnnnnnnnnnnnnnnnnnnnnnnnnnnncagcattctcagacaccgtccacattgaaccccacaatgccagcctctgagcggacagtggcctgggtnnnnnnnnnnnnnnnnnnnnnnnnnnnnnnnnnnnnnnnnnnnnnnnnnnnnnnnnnnnnnnnnnnnnnnnnnnnnnnnnnnnnnnnnnnnnnnnnnnnnnnnnnnnnnnnnnnnnnnnnnnnnnnnnnnnnnnnnnnnnnnnnnnnnnnnnnnnnnnnnnnnnnnnnnnnnnnnnnnnnnnnnnnnnnnnnnnnnnnnnnnnnnnnnnnnnnnnnnnnnnnncctgatgcagtatcaggcccgactggagcagagtgagaagaggctaaggcagcagcaggcagagaaagattcgcagatcaagagcatcattggcagg

SEQ ID NO: 29625 - DNA, 405 bp, Macaca Mulatta
  misc_feature (1)...(405): n = A,T,C or G
tcttgaatgtgggcagaagctgggacttctaaccaatggaacatgggaaaggtgatgagacgtgactccggtgatgaggttacattatccaagacttggccaactgagaccagatctccttacaggcttgaagcagtcatcagccatgttggaaaagtgctcatggcaaggaactatgagaggcatctaaggacttcaggcagcatctagaatgaatgtggacgtactactacaaccagcaaaaagaccagtcatgcaaccacaaggaatgaacttctaccaaagctgaatgggtttggaagcagactcttcccagccaatccttctgatgaaaatatagtctggccaacatcttcactggactctgatggactctatgcctggaacccagcntgataagacatg

SEQ ID NO: 29626 - DNA, 2619 bp, Macaca Mulatta
  misc_feature (1)...(2619): n = A,T,C or G
gagcaagtgacctttgaggacgtggtggtggacttcagccaggaggagtgggggcagctgaagcctgcccagaggaccctgtaccgtgatgtgatgctggacaccttcaggcttctggtctctgtgggnnnnnnnnnnnnnnnnnnnnnnnnnnnnnnnnnnnnnnnnnnnnnnnnnnnnnnnnnnnnnnnnnnnnnnnnnnnnnnnnnnnnnnnnnnnncagacttggaaactagacccaaagtcaaactgtcagttctaaaacaaggcatctctgaagaaatatccaacagtgtcatcttggtagaaagattcctatgggatagtctgtggtactgcagggatgaggacactgaggaccactgggaatggagttgtgaaagcctggagagcctggcagtgccggcggccttcacgcctgtgaagacgcctgttcaggagcagtggcagaggaatgggtttggggaaaatgtaagtctgaaccctgatctcccacatcaaccaatgactcctgaaaaacaaggcccccacatgtggggaacacgtggaaaaagggagaagccagacctaaatgttcaacagaaaacgtgtgtaaaagagaaaccctacaaatgtcaagaaggcagaaaggcctttagtcannnnnnnnnnnnnnnnnnnnnnnnnnnnnnnnnnnnnnnnnnnnnnnnnnnnnnnnnnnnnnnnnnnnnnnnnnnnnnnnnnnnnnnnnnnnnnnnnnnnnnnnnnnnnnnnnnnnnnnnnnnnnnnnnnnnnnnnnnnnnnnnnnnnnnnnnnnnnnnnnnnnnnnnnnnnnnnnnnnnnnnnnnnnnnnnnnnnnnnnnnnnnnnnnnnnnnnnnnnnnnnnnnnnnnnnnnnnnnnnnnnnnnnnnnnnnnnnnnnnnnnnnnnnnncacgagcgaactcacacaggtgagaagccctacgagtgcagcgagtgcgggaaagccttccggcaaagcatccacctcacccagcatctgcgaatccacactggggagaaaccctatcagtgtggtgagtgtggcaaggccttcagccacagctcgtccttgaccaaacaccagcgaatccacacaggggagaagccctacgagtgccatgagtgtggaaaagccttcacccagatcaccccactgattcagcaccagaggacccacacaggagaaaagccctatgagtgcagtgagtgtgggaaagccttcagccagagcacactcctgaccgagcatcggaggattcacacaggagagaagccctatggatgcaacgagtgtgggaagaccttcagccacagctcctcgctcagccagcatgagcggacgcacacaggagagaagccttacgagtgcagtcagtgtgggaaggccttccggcagagcacacacctcactcaacaccagcgaatccacacaggggagaagccctatgaatgcaatgactgtggcaaagcattcagccacagctcatccctcaccaaacatcagcgaatccacactggggagaagccctatgaatgcaaccagtgtggcagagccttcagccagcttgatcccctcattcagcatcagaggatccacacaggagagaaaccctatgaatgtaaccagtgtggcagagcctacggccagagctcccttctcatcgaacaccagaggattcacacgaaggaaaagccctatgggtgcaatgagnnnnnnnnnnnnnnnnnnnnnnnnnnnnnnnnnnnnnnnnnnnnnnnnnnnnnnnnnnnnnnnnnnnnnnnnnnnnnnnnnnnnnnnnnnnnnnnnnnnnnnnnnnnnnnnnnnnnnnnnnnnnnnnnnnnnnnnnnnnnnnnnnnnnnnnnnnnnnnnnnnnnnnnnnnnnnnnnnnnnnnnnnnnnnnnnnnnnnnnnnnnnnnnnnnnnnnnnnnnnnnnnnnnnnnnnnnnnnnnnnnnnnnnnnnnnnnnnnnnnnnnnnnnnnnnnnnnnnnnnnnnnnnnnnnnnnnnnnnnnnnnnnnnnnnnnnnnnnnnnnnnnnnnnnnnnnnnnnnnnnnnnnnnnnnnnnnnnnnnnnnnnnnnnnnnnnnnnnnnnnnnnnnnnnnnnnnnnnnnnnnnnnnnnnnnnnnnnnnnnnnnnnnnnnnnnnnnnnnnnnnnnnnnnnnnnnnnnnnnnnnnnnnnnnnnnnnnnnnnnnnnnnnnnnnnnnnnnnnnnnnnnnnnnnnnnnnnnnnnnnnnnnnnnnnnnnnnnnnnnnnnnnntccagggaaagcttttgtccaaagattcactgtattctaaaccagagatgttcaagttggtgagaaacccaaaaaatgcctttcatatacaagaaccaaatgaagtcagaatttgccattattgtacactacatttttcagaagggaagtgcttatgaatggtgcaggttgactctgatattcccaaatgacaatatggcagagtgttccagaaatgagacaggcatcattatggaatcactatggatactgactgtctcagtaaaaagctgtctgatttgtgtgtacattgtttgatcagggtacctggcagtcagtcacagattggaattccacatgacaaaaagtatcagtgtactat

SEQ ID NO: 29627 - DNA, 461 bp, Macaca Mulatta
ttaagagctgtaattaatgtgctaaaattaagggactttttgtcattgttattctggtttttaataggctacaaatcctcttttctacatattagagcaactacatcttcactgaatgtttaagggaaatatttgctaaattcctacaatagaaatttagtattttcatattttagatattttcctgaaaaatatttttcagattgaaatttgtcagacaatttacatgatctcactaattaccattttactgaattattgtgtgaatcctagagggacagggacactatttaccttttttatatcatctgtatcatatagagtagctcatttataagttaaaagtacattgtagtcagtagattataacatggatggtcttaaatactttaaggtaaacagctatatacattttggggcaatgtgtatacatattatttatcaggagaaaccaacaaagg

SEQ ID NO: 29628 - DNA, 122 bp, Macaca Mulatta
aggaactggtggtctttgaggatttgaatgtatttcactgccaggaagaatgtgtgagcttggatcctactctcacctcagagaaggaagatgacagcagtgtcggggagatgatgttactg

SEQ ID NO: 29629 - DNA, 1140 bp, Macaca Mulatta
  misc_feature (1)...(1140): n = A,T,C or G
ccgtggccattttttgtttaccaggatcctcaggcttgggcttgggaggggccccaagttttctccctggtttagggcccttgcccccgccacccgggcaaacggtaaccaccggaatggaaaggctttgggcttagggcccatttacagtagaggggcccaagaaattctgaggctgcaggttccaacggctgcagtgccccaccatgtgagatttccaggaccgtcggtgcagccgctgagccgtcccttctgcaagccagaggtgttccctgcccactgaggacggaaggagactcagggggccagaccacaggccccgactgcacactcccattttggcaggaaactaaaatggggagggacccccaagtctcatacgcaaacaccccgctgcccctccttcgtcccgttcttccttccgtggcaggggctacgtgggcaccgggcgcttgtcctggaagaagcgcttgagtgtgcagacctgcagcacggccaccagcagcagcaccgccacgttgacagctgaccagaagttgacccgctccaagttgccctcttgcaggttgcggtcacgtacctcgaaggcccgaagtagcttcagcatacggatgcttcgctccagcagggtacgcaaagtctcaatgaactcatagatgtcctcaattttaacatccagcatctcctcgggctccacagcctctgcccatccttcgacctcctcgtcatcctggaggctgtcaaagatcaattcaaagaacaccagcttctcggagatggagatgaaggagttgtcaaagcacagcttgtagtccccggcctccgttggctccgcggtgtgtacgccatcaaccttgcgggactcgctgaccaacagcacgccctgagggctgtccagcgtgaagtccacgtccagccgcgcacctccgatcaccgggtattcggtctcgaggcttgcgttggccggcgcggactggtagaaacactgcttcctccccgccggcaacaggaacgtgaactcaccgtcctggattggngggggccccgcccctcccacccccactggtggcattagtagccacaaggccagggctaaggccgcgccggccgccatcatccgggtcaccctctggtctcccc

SEQ ID NO: 29630 - DNA, 343 bp, Macaca Mulatta
atgataaatgtatttactttctcagcttagaaacatgccttatttccaccaaatgaaagttaaagctgagagaggttttactctgagtaaagacattgtgtcacttatgaaacttttaacagtttaaagatttttaatagattaacattaatcacattggcttatactgctgtaacgagggttttaatgtctcttttggccatattttatgaccacaatgaagcagataatgggaatgtccatatgagcaatgagtattttgaaattaagattcaattcagcaatttacttttacagttaattctaaattttctagtggaactgaagtgtatttgaagtatat

SEQ ID NO: 29631 - DNA, 277 bp, Macaca Mulatta
gcaggtcctggcggagcctttgcccagcccagtcctctctgcctcctcctggctgaagctgtttgtcaggattaccctcgggctaaagaggaaaaataaagatgttgaggtaccactctggactcagccttctgatctttctctgagtcttgctgggggagcctgccggagtccaggctggagcaaactgaagccctacgagtgggactgtgcctgctcatgcgttcactcacttcactttcagtaacttgctactcaacttaatatttcactcact

SEQ ID NO: 29632 - DNA, 419 bp, Macaca Mulatta
  misc_feature (1)...(419): n = A,T,C or G
acacttacagaagaaagtcagtcaagacatgttctacctgcaagttttgaagccaagagtttgcagaaaagcaactgggggttctttcttactgggcttgtgggtgggaccctggtggctgtgtatgctgtagccacaccgtttataacgccagcccttcgaaaagtctgtttgccatttgtacctgcaactacgaagcagattgaaaatgttgtgaaaatgttgcaatgcagaagaggatcccttgtagacatcggtagtggcgacggacgcattgtngtcatagcggctgcgaaggaagggttcacagcagttggttatgaattaaacccatggctagtttggtactccagataccgcgcttggcgagaaggtgtgcatggttctgccaaattttatatttcggatttgtggaaggt

SEQ ID NO: 29633 - DNA, 271 bp, Macaca Mulatta
ggaaagtgactggcccgcctctggctccagctctccattgcgaggagagagtgcggccgacagtgatggctgggactcggccccctcagatcttcgaaccatccagacttttgttaagaaagcaaagtcatccaagagaagggcagcccaagcaggtcccacccagccaggacccccaaggtccactttctctcgtctgcaggcccccgacagtgctaccttgcttgagaagatgaagctcaaggactctctctttgatctcgatgggccc

SEQ ID NO: 29634 - DNA, 289 bp, Macaca Mulatta
gctggtgcattttctgtctctgagcctctaattactgagaagataaggggagagggattgagaaagagatgctgatgggatttgagggagggaaggaaaaggaccaggagaacaaattagtgtgcaagaaaagccactgggagaagagaatataacagaaggaagagctgtgaagggaggagaacagagtctagcagttatgctgtcactagcttcttcgtcaggcacaagggattgccttttacctgagggaatcaagacttctcacaactcacaactggacccattc

SEQ ID NO: 29635 - DNA, 2305 bp, Macaca Mulatta
  misc_feature (1)...(2305): n = A,T,C or G
agtgagttttgaagattgcaccggtcgacaaaggacagcctatttttccctcgacacccgattcaaagtgggcccagatggtgtgattacagtcaaaaggcctctacagtttcataaccctcagatccatttcttggtctacgcctgggactccacctacagaaagttttccaccaaagtcacgctgaatacagtggggcaccacagccgcaccccgccccnnnaggcctctgtttctggagtccaagcagaattgctcacatttcccaactcctctcctggcctcaaaagatggaagagagactggggtattnnnnnnnnnnnnnnnnnnnnnnnnnnnnnnnnnnnnnnnnnnnnnnnnnnnnnnnnnnnnnnnnnnnnnnnnnnnnnnnnnnnnnnnnnnnnnnnnnnnnnnnnnnnnnnnnnnnnnnnnnnnnnnnnnnnnnnnnnnnnnnnnnnnnnnnnnnnnnnnnnnnnnnnnnnnnnnnnnnnnnnnnnnnnnnnnnnnnnnnnnnnnnnnnnnnnnnnnnnnnnnnnnnnnnnnnnnnnnnnnnnnnnnnnnnnnnnnnnnnnnnnnnnnnnnnnnnnnnnnnnnnnnnnnnnnnnnnnnnnnnnnnnnnnnnnnnnnnnnnnnnnnnnnnnnnnnnnnnnnnnnnnnnnnnnnnnnnnnnnnnnnnnnnnnnnnnnnnnnnnnnnnnnnnnnnnnnnnnnnnnnnnnnnnnnnnnnnnnnnnnnnnnnnnnnnnnnnnnnnnnnnnnnnnnnnnnnnnnnnnnnnnnnnnnnnnnnnnnnnnnnnnnnnnnnnnnnnnnnnnnnnnnnnnnnnnnnnnnnnnnnnnnnnnnnnnnnnnnnnnnnnnnnnnnnnnnnnnnnnnnnnnnnnnnnnnnnnnnnnnnnnnnnnnnnnnnnnnnnnnnnnnnnnnnnnnnnnnnnnnnnnnnnnnnnnnnnnnnnnnnnnnnnnnnnnnnnnnnnnnnnnnnnnnnnnnnnnnnnnnnnnnnnnnnnnnnnnnnnnnnnnnnnnnnnnnnnnnnnnnnnnnnnnnnnnnnnnnnnnnnnnnnnnnnnnnnnnnnnnnnnnnnnnnnnnnnnnnnnnnnnnnnnnnnnnnnnnnnnnnnnnnnnnnnnnnnnnnnnnnnnnnnnnnnnnnnnnnnnnnnnnnnnnnnnnnnnnnnnnnnnnnnnnnnnnnnnnnnnnnnnnnnnnnnnnnnnnnnnnnnnnnnnnnnnnnnnnnnnnnnnnnnnnnnnnnnnnnnnnnnnnnnnnnnnnnnnnnnnnnnnnnnnnnnnnnnnnnnnnnnnnnnnnnnnnnnnnnnnnnnnnnnnnnnnnnnnnnnnnnnnnnnnnnnnnnnnnnnnnnnnnnnnnnnnnnnnnnnnnnnnnnnnnnnnnnnnnnnnnnnnnnnnnnnnnnnnnnnnnnnnnnnnnnnnnnnnnnnnnnnnnnnnnnnnnnnnnnnnnnnnnnnnnnnnnnnnnnnnnnnnnnnnnnnnnnnnnnnnnnnnnnnnnnnnnnnnnnnnnnnnnnnnnnnnnnnnnnnnnnnnnnnnnnnnnnnnnnnnnnnnnnnnnnnnnnnnnnnnnnnnnnnnnnnnnnnnnnnnnnnnnnnnnnnnnnnnnnnnnnnnnnnnnnnnnnnnnnnnnnnnnnnnnnnnnnnnnnnnnnnnnnnnnnnnnnnnnnnnnnnnnnnnnnnnnnnnnnnnnnnnnnnnnnnnnnnnnnnnnnnnnnnnnnnnnnnnnnnnnnnnnnnnnnnnnnnnnnnnnnnnnnnnnnnnnnnnnnnnnnnnnnnnnnnnnnnnnnnnnnnnnnnnnnnnnnnnnnnnnnnnnnnnnnnnnnnnnnnnnnnnnnnnnnnnnnnnnnnnnnnnnnnnnnnnnnnnnnnnnnnnnnnnnnnnnnnnnnnnnnnnnnnnnnnnnnnnnnnnnnnnnnnnnnnnnnnnnnnnnnnnnnnnnnnnnnnnnnnnnnnnnnnnnnnnnnnnnnnnnnnnnnnnnnnnnnnnnnnnnnnnnnnnnnnnnnnnnnnnnnnnnnnnnnnnnnnnnnnnnnnnnnnnnnnnnnnnnnnnnnnnnnnnnnnnnnnnnnnnnnnnnnnnnnnnnnnnnnnnnnnnaatctgaaggcagctgatagtgaccccacggccccgccttatgattctctgctcgtgtttgactatgaaggaagcggttccgaagctgctagtctgagctccctgaactcttcagagtcagacaaagaccaggactatgattacttgaatgaatggggcaatcgcttcaagaagctggcagacatgtacggaggcggcgaggatgactag

SEQ ID NO: 29636 - DNA, 117 bp, Macaca Mulatta
tcagggaatgtttgtgagtctctttcccatccatctcgtcggtcagctggttagtctcctgcatatgtcccttctctactcactgtactgctttgaatatcgttggttcaataaagg

SEQ ID NO: 29637 - DNA, 845 bp, Macaca Mulatta
ggatcccaacaagccggtcccccaggacaccaagttcattcacaccaaggccaaccgctttgaggaagtggcctggtccaaatacaatccccgagaccagctctaccttcacatcgggctgaaaccaagggtccgagatcattaccgggccactaaagtggccttttggaaacatctggtgccccacctatacaacctgcatgacatgttccactacacgtccaccaccaccaaagtgccgcctccggataccacccacagctcccacatcacccgcaggcccaatggcaagacctggagcaccaagcggccagccatctcacctgcctacagcaacgagaatgcccaggggtcctggaacggggaccaggatgcagggccactcctggtggagaaccctcgtgactactccactgaattaagtgtcaccatcgccgtgggggcctccctcctgttccttaacgttctggccttcgctgccctctactaccgtaaggacaaacggcgccaggaacccctgcggcagcctagccctcagcggggaacccggggccccggaattgggagctgctccagaggaggagctggcagcgttacaactgggccccacccaccacgagtgtgaggccggtcccccccatgacacgctgcgcctcactgcgttgcccgactacaccctgaccctgcggcgctccccagatgacatcccactcatgacccccaacaccatcactatgatccccaactccctggtagggctgcagacattgcacccctataacacctttgctgcagggttcaacagtaccgggctaccccactcacactccactacccgggtatag

SEQ ID NO: 29638 - DNA, 294 bp, Macaca Mulatta
  misc_feature (1)...(294): n = A,T,C or G
aggataagggcttctgatttcccatgacttaggaaatagaattaagactgtttcgttcattgaagatcagaatgccctgtgtacagtctagaaaagtaacatgtgccacctgaagagaaaagagtttgtgataggcagntaagcagagcacagactgtgacttctgaccaagagaaacggttgctacatcagctccgagaaatcaccagggtcatgaaagaaggaaaattcattgacagattttctccagagaaagaagctgaggaggctccttacatggaggactgggaaggt

SEQ ID NO: 29639 - DNA, 490 bp, Macaca Mulatta
ttcatcactggatctcttacattcaggaaaattaggtggatttacgcaagaaaataataccatagattccggagaacttgatattggccgaagagcaattcaagaggttcctcccgggatcttctggagatcacagctcttcattgatcagccacagtttcttaaattcaatatctctcttcagaaggatgcattgataggagtctatggccgaaaaggcttaccgccttcccatactcaggtaaggctaggctttctcatcaataaaataaaaactgctgcttgcattttttgaaattagtatctttcttaagctcagctgtttggttaactgttcggccactttggaactgacttcctacagtagaaagaattttgaatgtaggttacttgttctgaggtttttgaatcagtagtgggaagaacaatattttcttcctgatttgactgtttaaaatgtactgaatttaggggtaacttaatgaatatt

SEQ ID NO: 29640 - DNA, 824 bp, Macaca Mulatta
gggatgaagaagaagataaggctacctcaagaagaagtaggtctagaagaagtagtattggtcttcgagtagcctttcagttccccaccgcgctcagccctgaataagtttctaatattttgtctgattttcactctcctttcttcactttttaaggatagcgttgaaaaaagaatgcacatgtgagttactaaaaagttgtaattgaatacattaatgtgcatgggaacagtgcagcaacacaacagaaaatcctcactgcactccagccgaggctagagttcttacacttctagcagcagagccactccggctagaacccattttgcagtcttgtcttcgctcttcagcctgaaggtccagatgtagctggggcctctcagtttggttctgtacacagggcactcgtaggtctgcttggtttcttgtctctccacgggggtggcttttgcaaagatgaccggcatagggcatgtcagctccttgagacgggcttcgacaatggttcctgattgggtgtcccagcgggcgcctatagcaaaaacacaaacggtgcaattgtgtggcaggttgctactgatgatcaagctgtctgatgcaataaccttcctgggtttgtccacaacctccacccattctcaccccccccttgtacgaatcgtctcccccccttgtatgcccgcgttcccccagctatccccccccgccccattcccatcccgcacaccacctcccccgcaggcaccaccccttgttactccctcttcctcctctgtgccgcgccccccccttttgcgccgctgacacgcctccccggtccccca

SEQ ID NO: 29641 - DNA, 2643 bp, Macaca Mulatta
  misc_feature (1)...(2643): n = A,T,C or G
gggtcgcagccgccgctggggtctccgctgtctcgcgaggagggtgaagcgcccccgcctgctcccgcttcggagggtaggcggagaagtcgccgggtacgccttcgcggatcctgccgtcaccgacctagctttctgggctgccgggagctcgtggcgagcgccccagccaggcctgcgccggcatcctccgagnnnnnnnnnnnnnnnnnnnnnnnnnnnnnnnnnnnnnnnnnnnnnnnnnnnnnnnnnnnnnnnnnnnnnnnnnnnnnnnnnnnnnnnnnnnnnnnnnnnnnnnnnnnnnnnnnnnnnnnnnnnnnnnnnnnnnnnnnnnnnnnnnnnnnnnnnnnnnnnnnnnnnnnnnnnnnnnnnnnnnnnnnnnnnnnnnnnnnnnnnnnnnnnnnnnnnnnnnnnnnnnnnnnnnnnnnnnnnnnnnnnnnnnnnnnnnnnnnnnnnnnnnnnnnnnnnnnnnnnnnnnnnnnnnnnnnnnnnnnnnnnnnnnnnnnnnnnnnnnnnnnnnnnnnnnnnnnnnnnnnnnnnnnnnnnnnnnnnnnnnnnnnnnnnnnnnnnnnnnnnnnnnnnnnnnnnnnnnnnnnnnnnnnnnnnnnnnnnnnnnnnnnnnnnnnnnnnnnnnnnnnnnnnnnnnnnnnnnnnnnnnnnnnnnnnnnnnnnnnnnnnnnnnnnnnnnnnnnnnnnnnnnnnnnnnnnnnnnnnnnnnnnnnnnnnnnnnnnnnnnnnnnnnnnnnnnnnnnnnnnnnnnnnnnnnnnnnnnnnnnnnnnnnnnnnnnnnnnnnnnnnnnnnnnnnnnnnnnnnnnnnnnnnnnnnnnnnnnnnnnnnnnnnnnnnnnnnnnnnnnnnnnnnnnnnnnnnnnnnnnnnnnnnnnnnnnnnnnnnnnnnnnnnnnnnnnnnnnnnnnnnnnnnnnnnnnnnnnnnnnnnnnnnnnnnnnnnnnnnnnnnnnnnnnnnnnnnnnnnnnnnnnnnnnnnnnnnnnnnnnnnnnnnnnnnnnnnnnnnnnnnnnnnnnnnnnnnnnnnnnnnnnnnnnnnnnnnnnnnnnnnnnnnnnnnnnnnnnnnnnnnnnnnnnnnnnnnnnnnnnnnnnnnnnnnnnnnnnnnnnnnnnnnnnnnnnnnnnnnnnnnnnnnnnnnnnnnnnnnnnnnnnnnnnnnnnnnnnnnnnnnnnnnnnnnnnnnnnnnnnnnnnnnnnnnnnnnnnnnnnnnnnnnnnnnnnnnnnnnnnnnnnnnnnnnnnnnnnnnnnnnnnnnnnnnnnnnnnnnnnnnnnnnnnnnnnnnnnnnnnnnnnnnnnnnnnnnnnnnnnnnnnnnnnnnnnnnnnnnnnnnnnnnnnnnnnnnnnnnnnnnnnnnnnnnnnnnnnnnnnnnnnnnnnnnnnnnnnnnnnnnnnnnnnnnnnnnnnnnnnnnnnnnnnnnnnnnnnnnnnnnnnnnnnnnnnnnnnnnnnnnnnnnnnnnnnnnnnnnnnnnnnnnnnnnnnnnnnnnnnnnnnnnnnnnnnnnnnnnnnnnnnnnnnnnnnnnnnnnnnnnnnnnnnnnnnnnnnnnnnnnnnnnnnnnnnnnnnnnnnnnnnnnnnnnnnnnnnnnnnnnnnnnnnnnnnnnnnnnnnnnnnnnnnnnnnnnnnnnnnnnnnnnnnnnnnnnnnnnnnnnnnnnnnnnnnnnnnnnnnnnnnnnnnnnnnnnnnnnnnnnnnnnnnnnnnnnnnnnnnnnnnnnnnnnnnnnnnnnnnnnnnnnnnnnnnnnnnnnnnnnnnnnnnnnnnnnnnnnnnnnnnnnnnnnnnnnnnnnnnnnnnnnnnnnnnnnnnnnnnnnnnnnnnnnnnnnnnnnnnnnnnnnnnnnnnnnnnnnnnnnnnnnnnnnnnnnnnnnnnnnnnnnnnnnnnnnnnnnnnnnnnnnnnncctagagggagaagagacaaaaagagatcaagaactagagatagcagttggtccagaagaagccaaactctgtctctaagtagtgaaagcacaagcagatcaaggtctcgtagcagtgatcatggtaaaagaagatcacggagcagaaatagagatcgttattatttaagaaataattatggaagcagatacaaatgggagtatacttattacagtagaaacaaggacagggatgggtatgaatcatcttacaggaggaggactctgtccagagctcattattctagacagtcttcaagtccagaatttagagttcagtccttttctgaaagaacaaatgctaggaaaaaaaataatcacagtgagaggaaatattactactatgaaaggcacagatcaaggagcctgtctagtaacagatcaaggactgcatctaccgggactgaccgggtgagaaatgaaaagcctggagggaaacgaaaatataaaacacggcatttggagggtactaacgaagtggctcagccatctcgtgaatttgcttctaaagcaaaggacagtcattaccaaaaatcttcatcaaaattggatggaaactacaaaaatgagagtgataccttttcggacagccgatcatcagacagagagacaaaacacaaaaggagaaaaaggaagacccggagcctaagtgtagagatagtctatgaaggaaaagctactgatacaactaaacaccat

SEQ ID NO: 29642 - DNA, 149 bp, Macaca Mulatta
  misc_feature (1)...(149): n = A,T,C or G
ngatatgaatgctgcggtgctgtcgcctactgaagagttcaaagaggaggaagaggatgcacagtctgagcctgagcaaggcacagcagcagcaggagaagagtcaaagttggcaggagcccaaggtggagaagaaaaagatggcggcg

SEQ ID NO: 29643 - DNA, 215 bp, Macaca Mulatta
atgtctcatttatgatagatttgcaagctgctcatttttgaacagctttttgcatgggataggagcatgtctattctaacacatcagcttattcaaaagcaagaattttaaaaataagataaatgtaaagttgttttataaacgatcctgttaattaacccacagacaccatatatccttctgcatcctttgaccaataaaagttgctggagaac

SEQ ID NO: 29644 - DNA, 628 bp, Macaca Mulatta
ttcctgcagcccacccggagagagctgccctgctgttcgtgtccagtgtcggcatcggcctggccctcacattgtgcgccctggtcatcagagagtcctgtgccaaggacttccgcaagttgcagctggggagggagcagctggtgccaggaagtgacaaggccgaggaggacagcgaggatgaagaagaggaggaggactcctccgagtctgatttcccaggggaactgtcggggttctgtaggacttcatatcctgtctacagttccatagaagctgcagagctcgcagaaaggattgaacgcagggagcaaatcattcaggaaatatggatgaacagtggtttggacacctcactcccgagaaacatgggccagttctactgaaaaccacatgcatcttaatgcggtcgcactttctgaagaaggaaggatcccaaatgcccctccggttctggttcacccgtaccttctatgaaggagaatttgtcatgtcatccaacactcatgaggccaggaagctattaaagggatgtttcaagctgtttccagcacattccaaaataaatgaggagggaagagtctttgttttctgtatttatttgaatttgtgtctatacattaacaag

SEQ ID NO: 29645 - DNA, 350 bp, Macaca Mulatta
actggtttcaaaaagaggagagctgcatcctgcaggtggatgcgccagtgagcaggtggcccttgccatttggcttgccagtcccaagccctaaatttctattcacccaatagcctcatcacaggttatgtcatgtcgagaaatgtagtgttttctatttgatttttggagaatgccacaaaagactctgcaatgggaaggaggacaggagatagaaggagaaagcgggggcgatcttaactactcttgtgtgccaccttcctctgagatttgaatgcacagatatcagctggaggtatgaaattattacagaaaaagagacaaacaggtcactatgtcgtgtcactaaa

SEQ ID NO: 29646 - DNA, 900 bp, Macaca Mulatta
  misc_feature (1)...(900): n = A,T,C or G
tatcatcagagagtcatactgagaaaaactttatataagcaatgaagggggagactttcagtcagagtacacactttttcagcatcaaaaatacatactgggaagaanccatataaatgcaatgaatgtggaaagtgttagtcagagtacttacnttattcgacatcagagaattcattctggagagaagtgttataaatgtaatgaatgtggaaaagcctttgctcattcctcaacccttattcaacatcaaaccactcacactggagagaaatcctatatatgtaatatatgtgggaaagccttcagccagagtgcaaatcttactcaacatcatagaacacatactggagagaaaccatataaatgcagtgtgtgtgggaaagcattcagccagagtgtgcaccttactcaacatcagaggattcataatggagaaaaaccctttaaatgcaatatatgtgggaaagcatatagacaaggtgcaaatcttactcagcatcaaaggattcatactggagagaaaccctataaatgtaatgaatgtgggaaagctttcatttattcctcatcgcttaatcaacatcagagaactcatactggagagagaccctataaatgtaatgaatgtgataaggattttagccagagaacatgccttattcaacaccagagaattcacacaggagagaaaccctatgcatgtcgtacatgtggtaaaaccttcacccagagtacaaaccttattcagcatcaacgtgttcatacaggtgccaaacatcgtaattaatggataagggaaacttcaaataggttttacaacttcatttcaattttattttgtgcattctgtgtgtcagaataacagaagaaatccgaagaagtgcaatatgttagata

SEQ ID NO: 29647 - DNA, 1446 bp, Macaca Mulatta
  misc_feature (1)...(1446): n = A,T,C or G
tgaggaacaggacagcgttttatccttacgatgtcaagctaggatcattgctgggatccatgtgcagacctcagaatctagcaagagtgaactggtcaccgtaagggaatccttctctacacccaagttccacatcagccccactggaatgatcacagaaggagctcaactccacattaagtgcaccattcaagtgactcacctggcccaggagtttccagaaatcataattcagaaggacaaggcgattgtggcccacagcagacacggcaacgaggctgtgtactcagtcatggccatggtggagcacaatggcaactacacatgcaaagtggagtccagccgcatatccaaggtcagcagcatcatcgtcaacgtaacagaactattttccaagcccgaactggaaacttccttcacacgtctggaccaaggtgaaagactgaacctgtcctgctccatcccaggagcacctccagccaatttcaccatccagaagggagacacgattgtgtctcagactcaaaatttcaccaagatagcctcaaagggggacagtgggacgtatatctgcactgcaggtattgacaaagtggtcaagaaaagcaacacagtccagatagtcgtatgtgaaatgctctcccagcccaggatttctcatgacgcccagtttgaggtcataaaaggacagaccatcgaagtcagttgccaatcagtcaatggaacttcacctatttcttatcacctattaaaaacaagcaaaattttggagaatagtaccaagaactcaagtgatcctgcggtattcaaagacaaccccactgaagacgtagaataccagtgtgttgcggataactgccattcccatgccgaaatgttaagtgaagttctgagggtgaaggtgatagccccagtggatgaggtccagatttctatcctgtcaaataaggttgtggagtctggagaggacattgtgctgcaatgcgctgtgaatgaacgatctggttccattgactataaggttttacccggcaaccgagggcaaaaccttcaccaaaagaacgtgtaatgtgcacccaggaatttggacacagcgaaggtgcaacgagccaggacggggacaaactggcagctttaaagaacaacaatgccaccacgtccacacaacaaaatcgcacgaaatcattacgaggaaagacgtttggcataaggaacaggacacaaggggcacaatacacagcggcacacgtggtagggcgctaggacacagagataacgacacacgtaggcacaaataaatcagcggttaacatagttgctgtctctcttccctcctgctggagctatatnnnnnnnnnnnnnnnnnnnnnnnnnnnnnnnnnnnnnnnnnnnnnnnnnnnnnnnnnnnnnnnnnnnnnnnnnnnnnnnnnnnnnnnnnnnnnnnng

SEQ ID NO: 29648 - DNA, 112 bp, Macaca Mulatta
gcctcgtattctggtttggggacctgaaattccgcattgagagctacgacctgcactttgtcaaaaaaaccatagacagtgaccagctccatcagctctgggagaaggacca

SEQ ID NO: 29649 - DNA, 441 bp, Macaca Mulatta
ggatgcgctggacgccctgggcctgaagcgctactgctgccgccggatgctgctggcccacgtggacctgatcgagaagctgctcaattatgcacccctggagaagtgaccaggctggaatccgcctacctgccatgctgaccatgggccatgagcatcctgccccaagttcacaaggctgaggcatccaggagctggcgcaatgcctcgccacagcgtgtgtgtgtcccatcccccactctggaaggaacaatccagtaaaggtctttcagaactaccaaggtcccagccctcactaggatgtcaggggccaggactaggcccagctctcacaccgcggcagcccagggaagccgactgggccatgaattctcctaccctggggccagcctgttccacaggtacccctgcaggaggtgctgccaggagagccttccatct

SEQ ID NO: 29650 - DNA, 524 bp, Macaca Mulatta
  misc_feature (1)...(524): n = A,T,C or G
tgcctcggggtcagaagagtaagctccgtgcccgtgagaaacgccaggagacccatggtcagccacagggtctcacaggtccccaggtcactgcagagaagcaagaagagtcccactcttcctcatcctcttctcacgattgtctggggactcgtcgtaggtcttctgatgcctccgttcctcaggagtctcagggagtgtcacccactgggtctcctgatgcagttgtttcatgcttaaaatctgatgtggctgctaagggccaagatgagaaaagtgcaagcacctcccccaaagcctccattcctcaggagtctcagggagtttcacccactggctctcctgatgcaggtatttcatgctcaaaatctgatgtggctgccaagggccaagatgagaaaagtgcaagcacctcccttgaagcctccattccccaggagtctcagggagcttcacccactggctctcctgatgcangtgtttcatgctcaaaatctgaagtggctgtcaagggtcaagatgag

SEQ ID NO: 29651 - DNA, 1326 bp, Macaca Mulatta
  misc_feature (1)...(1326): n = A,T,C or G
ggcatgcccaagagaatcgtaaatgcaaaaattgcttgccttgactttagcctgcaaaaaacaaaaatgaagcttggtgtacaggtggtcattacagaccctgaaaaactggaccaaattagacagannnnnnnnnnnnnnnnnnnnnnnnnnnnnnnnnnnnnnnnnnnnnnnnnnnnnnnnnnnnnnnnnnnnnnnnnnnnnnnnnnnnnnnnnnnnnnnnnnnnnnnnnnnnnnnnnnnnnnnnnnnnnnnnnnnnnnnnnnnnnnnnnnnnnnnnnnnnnnnnnnnnnnnnnnnnnnnnnnnnnnnnnnnnnnnnnnnnnnnnnnnnnnnnnnnnnnnnnnnnnnnnnnnnnnnnnnnnnnnnnnnnnnnnnnnnnnnnnnnnnnnnnnnnnnnnnnnnnnnnnnnnnnnnnnnnnnnnnnnnnnnnnnnnnnnnnnnnnnnnnnnnnnnnnnnnnnnnnnnnnnnnnnnnnnnnnnnnnnnnnnnnnnnnnnnnnnnnnnnnnnnnnnnnnnnnnnnnnnnnnnnnnnnnnnnnnnnnnnnnnnnnnnnnnnnnnnnnnnnnnnnnnnnnnnnnnnnnnnnnnnnnnnnnnnnnnnnnnnnnnnnnnnnnnnnnnnnnnnnnnnnnnnnnnnnnnnnnnnnnnnnnnnnnnnnnnnnnnnnnnnnnnnnnnnnnnnnnnnnnnnnnnnnnnnnnnnnnnnnnnnnnnnnnnnnnnnnnnnnnnnnnnnnnnnnnnnnnnnnnnnnnnnnnnnnnnnnnnnnnnnnnnnnnnnnnnnnnnnnnnnnnnnnnnnnnnnnnnnnnnnnnnnnnnnnnnnnnnnnnnnnnnnnnnnnnnnnnnnnnnnnnnnnnnnnnnnnnnnnnnnnnnnnnnnnnnnnnnnnnnnnnnnnnnccattcttcgaattgatcatcttattaaattacatccagaaagtaaagatgataaacatctttgttatgaagatgctgttcactctggagcccttaatgattgatctgatgtctcttttatttataacaatgttaaatggaattgtcttgtaccttgacttaagtattacacattaaagtacaacaagctgtaaacttgggtttttgtgatacaggaaatggtttccatctgtgttttggtcctctgatttcacatataacaacctagtactttattagtttaaaaagaaattgaggttgttcaaagtttaagcaattcatcctctctgaacacacattgctattcccatcccacccccaatgcacagggccgcaacaccacgaattccgcccgttctctccagtgtgtgtaacagggtcacaagaattc

SEQ ID NO: 29652 - DNA, 324 bp, Macaca Mulatta
tttggttcctggtggctttctcaaccccagccctgaccctgtggtttcacagctggcggctgagatgaggttagaatggccgggcccggctgagcattccaaattggatttcaccatctgctgagaaagtttcaggaaggcaaaccttgccaggtcatagaagcccccaagcccagctttccaaaggcctcagcctgtgcctgtgtcgagctcagtcctgggagataggggagaacccacagacaggaacaagcccccctactcctgaccaccttccatcagcagtctcccctccgtggtcgtctttgttgacaaagatgcagt

SEQ ID NO: 29653 - DNA, 250 bp, Macaca Mulatta
agaacaacctggtgccctaccctcgcatccacttccccctggccacctatgtctcagtcatctctgcagaaaaggcataccacgagcagctgtcggtggcagagatcaccaatgcttgttttgagcctgccaaccagatggtgaagtgtgatccccggcacggcaagtacatggcctgctgcctgctgtaccgtggagatgtggtgcccaaggatgtcaacgctgccatcgctgccatcaagaccaagcg

SEQ ID NO: 29654 - DNA, 128 bp, Macaca Mulatta
ggctagaaatggaaatttgttttccaggaaggatgatcccatcatacttctgctgaaaccagtacatggcctcctctttgttaattctcttatgcctttccttgcaaccgtttgccttatttcaatct

SEQ ID NO: 29655 - DNA, 161 bp, Macaca Mulatta
gggcatgaaggcacggaacctcattcacgcgcgcatcgagcagaacattcgcgccaagatctgcgggctgcgggcatccgaggcgggcaggggctgcaaagacgcgctgcagctgttgatcgagcactcgtgggagaggggagagcggctggacatgcagg

SEQ ID NO: 29656 - DNA, 1471 bp, Macaca Mulatta
  misc_feature (1)...(1471): n = A,T,C or G
ccgccgccgccgctggccaaaaagcggagcctggcgaaagcgtgtcctgctcagacagccttccttctccattgccaccgtgccgaacagccaggctgcccaactgcaactgtaggccaatgaactaatccatcgcccgcagaccgactctcagcagcggttcgtcccggtgcccacccccgcgaaacggagtgcccgggcacctagcctccccgccggccacnnnnnnnnnnnnnnnnnnnnnnnnnnnnnnnnnnnnnnnnnnnnnnnnnnnnnnnnnnnnnnnnnnnnnnnnnnnnnnnnnnnnnnnnnnnnnnnnnnnnnnnnnnnnnnnnnnnnnnnnnnnnnnnnnnnnnnnnnnnnnnnnnnnnnnnnnnnnnnnnnnnnnnnnnnnnnnnnnnnnnnnnnnnnnnnnnnnnnnnnnnnnnnnnnnnnnnnnnnnnnnnnnnnnnnnnnnnnnnnnnnnnnnnnnnnnnnnnnnnnnnnnnttggcatgtatatggactgttgcagcgttctgataagaaatacgatgaagctataaaatgttaccgaaatgccctcaaattagataaagataacctagcaaattttgagggatctctcactgttgcagatccaaatgagagaccttgaaggttaccgagnnnnnnnnnnnnnnnnnnnnnnnnnnnnnnnnnnnnnnnnnnnnnnnnnnnnnnnnnnnnnnnnnnnnnnnnnnnnnnnnnnnnnnnnnnnnnnnnnnnnnnnnnnnnnnnnnnnnnnnnnnnnnnnnnnnnnnnnnnnnnnnnnnnnnnnnnnnnnnnnnnnnnnnnnnnnnnnnnnnnnnnnnnnnnnnnnnnnnnnnnnnnnnnnnnnnnnnnnnnnnnnnnnnnnnnnnnnnnnnnnnnnnnnnnnnnnnnnnnnnnnnnnnnnnnnnnnnnnnnnnnnnnnaggggaaatactgttgaaattgggaagattaaaagaagccagtgaagtgttcaaaaacttgattgatcggaatgcagaaaattggtgttattatgaaggcttggaaaaagctctacaaattannnnnnnnnnnnnnnnnnnnnnnnnnnnnnnnnnnnnnnnnnnnnnnnnnnnnnnnnnnnnnnnnnnnnnnnnnnnnnnnnnnnnnnnnnnnnnnnnnnnnnnnnnnnnnnnnnnnnnnnnnnnnnnnnnnnnnnnnnnnnnnnnnnnnnnnnnnnnnnnnnnnnnnnnnnntggggagaaggaacccccgacaacactactttgggttcagtatttcctggcacagcactttgataaacttggacagtattctctggctttggattatattaatgctgcaattgctagtactccaactctaatagaattattctatatgaaggcaaaaatttacaaggtaaaatcacaatcctgctttttgagtagttgaagaattcagctactttaagaatctttggagttttttctttgtgga

SEQ ID NO: 29657 - DNA, 841 bp, Macaca Mulatta
  misc_feature (1)...(841): n = A,T,C or G
gtggttgttccgccaggggttacccccagcccctggaaagaaatgggtggttaaggacaccccaggtggccaggtgagccaggggagggaaaaaggttaaaaaaaaggccaaatttcccagaatgggttttgaacttttggaaattagttaattgacctttagaagttagattagggtttgaatttcaagaaattactgtacttttttaaaggtctgtatcactgtatggcattgcatttctcccatccccccttgacttgcaatgaattttgcatggcattgattacaagtttatatttttctccttaaattcaggaactcatagtgcctttctcaccacaaaatccacagaggaatatcattagtgatagctaaggaagaagagtttagatgggcttaaaattcagtcctgtaaagataatttttcattccatattaacaatttttttcctaggtcgctggatttgtgactgttgtcagcgggcccccccaacacncaggaaagtgggcagaagggggaaaaacagcaaagagggataaaatagtttttgactctaatactgtgtatgcatttaagtggaatatttggtgccaatttatacaacattttcatttttatgccaatnnnnnnnnnnnnnnnnnnnnnttatgagcttaaaatctgcagttgatttatttctgttaaaagctactcttaccctccaaactaattccaggtagagaaatcatcttcccaagtattttatagtaaccctggctcactccaaaaattcagtggaaatgtttagcaacttaagatacttaactatttctccatagccccaaaagttaattttcacc

SEQ ID NO: 29658 - DNA, 141 bp, Macaca Mulatta
ttcctggcccctggcaagattgcgtttcacctgcttctgagggcgaaggtggctccggcgcatcctttgtcgcgccgtgacctgcagctactgacagatccatagggaggacaccgggacttcccggactctgggaaatgg

SEQ ID NO: 29659 - DNA, 511 bp, Macaca Mulatta
tcacaaagtaaggattcagctttcactatagactctctctttgcaaaataccaaaaccttagaattaggctatgcgcaactaaaaaggaaacataggtaaagagacctcaaagaggttacccatgaatacttccccaaaacaagtggttctaactcagaccatgtccaagttcagttaagtccaaaacataagtagcagtatgggactcttccaaactccagaaacaaagcgaccacttctccctgtaagtgcagcgttttcctcgcgtcctgacacacagcgtcatttctgcgccacttgagtaggagcctgcaagagatgacaggaagtcaagcagctgctgggataagctggcactgttgcccctgctggcaagcaggagccactcagcctccctcctgccctgagtcaggctggcttcccccgtttcctctcacagcccactctgagaatcctacttgtacaatagattggggacagggaggcagctagtggcaggaggcctagtcc

SEQ ID NO: 29660 - DNA, 266 bp, Macaca Mulatta
atcacccaagaatacagttatttctgtgaatccatccacaaggctacaagaaggtggctctgtgaccatgacctgttccagtgagggtctaccacctccagagattttctggagtaagaaattagataatgggaatctacagcacctttctgggaatgcaactctcaccttaattgctatgaggatggaagattctggaatttatgtgtgtgaaggagttaatttgattgggaaaaacagaaaagaggtggaattaattgttcaag

SEQ ID NO: 29661 - DNA, 1437 bp, Macaca Mulatta
  misc_feature (1)...(1437): n = A,T,C or G
cagccggcctcagaaagtgtgtttgtgtccatttctcccagcgcaccctctgcatatctctacccatttgtacataattcagcatccagcagaggnnnnnnnnnnnnnnnnnnnnnnnnnnnnnnnnnnnnnnnnnnnnnnnnnnnnnnnnnnnnnnnnnnnnnnnnnnnnnnnnnnnnnnnnnnnnnnngatcctgaattttcactgtttgcgggaagtctggtcctttaatattatttcgggggctgaagctgctaatttgaagaattttatattagattctcctgtttatccttctacaatcatcatcattgatggtacatggagccaggctaaggacattttctataagaatcccttgttccgacatcccaaacaggtnnnnnnnnnnnnnnnnnnnnnnnnnnnnnnnnnnnnnnnnnnnnnnnnnnnnnnnnnnnnnnnnnnnnnnnnnnnnnnnnnnnnnnnnnnnnnnnnnnnnnnnnnnnnnnnnnnnnnnnnnnnnnagactttgcttcgcctttttcaagctttatgctcttttcactttcagcatggtgcccaaattcgcctcagcaaggaacaccttctgaaaaatggattatatactaaaccaatgccaaagaacaaacgcaaactcaggaaaatggaattgttaatgaatagcgttaaaatttagtacagttattcttttggtgctagcttacctgtcttcatctaacaataccaagttaagttttcatatagtttaggtctgtaggtttttgacttgctgaagaatgagaattgcatactaatcttacccagaagaaggaagtaaaccaaatattcataaaaacaaataaacaaaaattcactggctcactgaaaagcaggatttcatattgtacttgtttttaaaaatgtgcctctaatacatgttttcaaacccaaaattaaaatgtgattcgttgttgagatgggttagaaattcttacttgtaaaatagaaggaaattgtcgtagtggattggaacggtgttgtttccattagtgtttatacataattaggtgtagaccaataatataagatacctacattggtttgcagtcctaactgtatagtttgaagtaagtagcaaaagaaaatataattaccaagttttattattttgtaaaatagtataaaggaataaggaaactttaaatattatttaggggctaaatttgaactcagctaatatgatttaagtgctctattaattgccctgatttttaaagaggtgcatgtaattttgaaatagcacacattttcatttgtaatcactctggataaatttgtatttttcaatgttcattgaacaagggtgattgactttggtaaacttattttattgatgtttttaaggggaaaataataagtggaatatgatacaactgttttttcggaacatattt

SEQ ID NO: 29662 - DNA, 672 bp, Macaca Mulatta
  misc_feature (1)...(672): n = A,T,C or G
ggccggagcgcacgcgcccagcatcgtgtggtacaaagacgagaggcttgctggaggaaaagtctggnggagtcgacttggcggactccaaccagaagctgagtatccagcgcgtgcgcgaggaggatgcgggtcgctatctgtgcagcgtgtgcaacgccaagggctgcgtcaactcctccgccagcgtggccgtggaaggnaggctctgaagataagggcagcatggagatcgtgatccttgtcggtaccggggtcatcgctgtcttcttctgggtcctcctcctcctcatcttctgtaacatgaggaggngccggcccacgcagacatcaagacgggctacctgtccatcatcatggaccccggggaggtgcctctggaggagcaatgcgaatacttgtcctacaacgccagccagtgggaattccccccgagagcggctggccctggggngggagagtgctcggctacggcgccttcgggaaggtggtggaagcctccgctttcggcatcaacaaggacagcagctgtgacaccgtggccgtgaaaatgctgaaagnagagggcgccacagccagcgagcaccgcgcgctgatgtcggagctcaagatcctgattcacatcgggaaccacctcaacgtggtcaacctcctgggggcgtgcaccaagcc

SEQ ID NO: 29663 - DNA, 864 bp, Macaca Mulatta
  misc_feature (1)...(864): n = A,T,C or G
ttagatattatacagcaagaatatattaatgattatggtctgatccaaattgaactaacaaaggctgcatttggctgctttggtaactggcttgcaacagtggaacagcggcaagaaaaggaaactgagcttgaattgcagatgaaactgtggatgtataataagaaaacacaagggnnnnnnnnnnnnnnnnnnnnnnnnnnnnnnnnnnnnnnnnnnnnnnnnnnnnnnnnnnnnnnnnnnnnnnnnnnnnnnnnnnnnnnnnnnnnnnnnnnnnnnnnnnnnnnnnnnnnnnnnnnnnnnnnnnnnnnnnnnnnnnnnnnnnnnnnnnnnnnnnnnnnnnnnnnnnnnnnnnnnnnnnnnnnnnnnnnnnnnnnnnnnnnnnnnnnnnnnnnnnnnnnnnnnnnnnnnnnnnnnnnnnnnnnnnnnnnnnnnnnnnnnnnnnnnnnnnnnnnnnnnnnnnnnnnnnnnnnnnnnnnnnnnnnnnnnnnnnnnnnnnnnnnnnnnnnnnnnnnnnnnnnnnnnnnnnnnnnnnnnnnnnnnnnnnnnnnnnnnnnnnnnnnnnnnnnnnnnnnnnnnnnnnnnnnnnnnnnnnnnnnnnnnnnnnnnnnnnnnnnnnnnnnnnnnnnnnnnnnnnnnnnnnnnnnnnnnnnnnnnnnnnnnnnnnnnnnnnnnnnnnnnnnnnnnnnnnnnnnnnnnnnnnnngtttgtatttaaacctagtgagccaaggccattgtatattcaaaagggtatctccagagaggagtccagtggnngagtgtttgttccacgagatgtccctgaatctttcactcagaagcttacagtggctaataatncccagttttactcctaacaaat

SEQ ID NO: 29664 - DNA, 374 bp, Macaca Mulatta
caggcagaatcaaggcagctcttgccccacgcctcccaggcatgaccaaccacgagacgctgcagcagatcatgcgagggtaccggctgccgcgcccggctgcctgcccggcagaggtctacgtgctcatgctggagtgctggagaagcagccccgaggaacggccctccttcgccacgctgtgggagaagctgcacgccatccacagatgccttccccgggtcctcacgtgactcagggctccgggctccaccaggccagcccctcctccctgcagagcgtccactcgaagggatgctggtcggccggaccgaggagcctctggctgtgggcctcaggcaccagcgtgcacatgcatttgtgcaccaggcaga

SEQ ID NO: 29665 - DNA, 256 bp, Macaca Mulatta
cctgtatcacaccttccccaggaggatggcctcatgcactgaggttattgcatcatttcctagtgcttcatgtcattatcactggtggggaaacaaagctaaattttattaagaaagacaacaactctcagacctatatcataggaggaggacatccagaatccaacaaaattcaaaacggaacccatgctgttctcctgaacaagatttgggctaaacacagcctgtttattgagactgttttaatgatgcttta

SEQ ID NO: 29666 - DNA, 1435 bp, Macaca Mulatta
  misc_feature (1)...(1435): n = A,T,C or G
gggctaattttaatattataacaacctgaaaataatggaaaagaggtttttnnnnnnnnnnnnnnnnnnnnnncactttcttaagtgcatgagatggtttgatggtttgctgcattaaaggtatttgggcaaacaaaattggagggcagtgactgcagttttgagaatcagttttgaccttgatgattttttgtttccactgtggaaataaatgtttgtaaataaatgtaatcaaaatccctttgcattctttctggaccttaaatggtagaggaaaacgctcatgagccatttgtttcttttgctggttatagttgctaattctaaagctgcttcagactgcttcatgaggaggttaatctacaattaaacaatatttcctcttggccgtccattattttctgaagcagatggttcatcatttcctgggctgttaaacaaagcgaggttaaggttagactcttgggaatcagctagttttcaatcttattagggtgcagaaggaaaactaataagaaaacctcctaatataattttgtgactgtaaacaattatttattagcaaacaattgatcccagaagggcaaattgtttgagtcagtaatgagctgagaaaagacagagcatatctgtgtatttggaaaaataattgtaacgtaattgcagtgcatttagacaggcatctatttgggacctgtttctatccctaaatgaatttttggaaacattaatgaggtttacatatttctctgacatttatatagttctcatgtccatttcagttgaccagccgctcgtgattaaggttaaaaagaaaaaaattatagtgagaatgagattcatttcaatgtaatgcactaaagcagaacacgaacttagcttggcctattctaggtagttccaaatgatatttttgttgtcaaactttaaaatttatattaatttgcaaatgtatgtctctgaataggacttggaacttttctgacatttattttatccgtgatgtattttttaaaaattcttctgatacggagaaggttctttttttaaagtatttcagtgaaaacttggtgtaattctgaacccatctgttgaaatgtattttcttcattggaggtccacctaatcatcctgtgaaagtggtttttctatggaaagctttgtttgcttcctacaaatacatgcttattccttaagggatgtgttagagttactgtggatttctctgttttctgttttacaagaaacttgtctatgtaccttaatactttgtttaggatgaggagtctttgtgtccctgtacagtagtctgaagaattcccccttctgtctcctagcaagcccagttgctgtatctgaacagtttgagctctttttgtaatataatctagacctgttatttctgtgctatctaataaaacgagattcagaaccc

SEQ ID NO: 29667 - DNA, 7596 bp, Macaca Mulatta
  misc_feature (1)...(7596): n = A,T,C or G
gccctgactctgtcctggacagcgtgcccaccagccatggcggggccccagggcctcctcccgctctgcctcctggccttctgcctggcagtcttcnnnnnnnnnnnnnnnnnnnnnnnnnnnnnnnnnnnnnnnnnnnnnnnnnnnnnnnnnnnnnnnnnnnnnnnnnnnnnnnnnnnnnnnnnnnnnnnnnnnnnnnnnnnnnnnnnnnnnnnnnnnnnnnnnnnnnnnnnnnnnnnnnnnnnnnnnnnnnnnnnnnnnnnnnnnnnnnnnnnnnnnnnnnnnnnnnnnnnnnnnnnnnnnnnnnnnnnnnnnnnnnnnnnnnnnnnnnnnnnnnnnnnnnnnnnnnnnnnnnnnnnnnnnnnnnnnnnnnnnnnnnnnnnnnnnnnnnnnnnnnnnnnnnnnnnnnnnnnnnnnnnnnnnnnnnnnnnnnnnnnnnnnnnnnnnnnnnnnnnnnnnnnnnnnnnnnnnnnnnnnnnnnnnnnnnnnnnnnnnnnnnnnnnnnnnnnnnnnnnnnnnnnnnnnnnnnnnnnnnnnnnnnnnnnnnnnnnnnnnnnnnnnnnnnnnnnnnnnnnnnnnnnnnnnnnnnnnnnnnnnnnnnnnnnnnnnnnnnnnnnnnnnnnnnnnnnnnnnnnnnnnnnnnnnnnnnnnnnnnnnnnnnnnnnnnnnnnnnnnnnnnnnnnnnnnnnnnnnnnnnnnnnnnnnnnnnnnnnnnnnnnnnnnnnnnnnnnnnnnnnnnnnnnnnnnnnnnnnnnnnnnnnnnnnnnnnnnnnnnnnnnnnnnnnnnnnnnnnnnnnnnnnnnnnnnnnnnnnnnnnnnnnnnnnnnnnnnnnnnnnnnnnnnnnnnnnnnnnnnnnnnnnnnnnnnnnnnnnnnnnnnnnnnnnnnnnnnnnnnnnnnnnnnnnnnnnnnnnnnnnnnnnnnnnnnnnnnnnnnnnnnnnnnnnnnnnnnnnnnnnnnnnnnnnnnnnnnnnnnnnnnnnnnnnnnnnnnnnnnnnnnnnnnnnnnnnnnnnnnnnnnnnnnnnnnnnnnnnnnnnnnnnnnnnnnnnnnnnnnnnnnnnnnnnnnnnnnnnnnnnnnnnnnnnnnnnnnnnnnnnnnnnnnnnnnnnnnnnnnnnnnnnnnnnnnnnnnnnnnnnnnnnnnnnnngtgttcctgcagctgagggccgtcgtggccatgatggngaccaaggctgccgggagatcctcaccacagcaggcccgttcaccgtgctggtgccatccatctcctccttctcctccaggaccatgaangcatcccttgcccagcagctctgcagacagcacatcatcgcagggcagcacatcctggaggacacaaggacccaacaaacacgaaagtggtggacgctggccggacaggagataaccgtcaccttcaaccaattcacgnnnnnnnnnnnnnnnnnnnnnnnnnnnnnnnnnnnnnnnnnnnnnnnnnnnnnnnnnnnnnnnnnnnnnnnnnnnnnnnnnnnnnnnnnnnnnnnnnnnnnnnnnnnnnnnnnnnnnnnnnnnnnnnnnnnnnnnnnnnnnnnnnnnnnnnnnnnnnnnnnnnnnnnnnnnnnnnnnnnnnnnnnnnnnnnnnnnnnnnnnnnagaactgtgggctgccttccatcctggacggacctgggcccttcacagtctttgccccaagcaatgaggctgtggacagcttgcgtgacggccgcctgatctacctcttcacagcgnnnnnnnnnnnnnnnnnnnnnnnnnnnnnnnnnnnnnnnnnnnnnnnnnnnnnnnnnnnnnnnnnnnnnnnnnnnnnnnnnnnnnnnnnnnnnnnnnnnnnnnnnnnnnnnnnnnnnnnnnnnnnnnnnnnnnnnnnnnnnnnnnnnnnnnnnnnnnnnnnnnnnnnnnnnnnnnnnnnnnnnnnnnnnnnnnnnnnnnnnnnnnnnnnnnnnnnnnnnnnnnnnnnnnnnnnnnnnnnnnnnnnnnnnnnnnnnnnnnnnnnnnnnnnnnnnnnnnnnnnnnnnnnnnnnnnnnnnnnnnnnnnnnnnnnnnnnnnnnnnnnnnnnnnnnnnnnnnnnnnnnnnnnnnnnnnnnnnnnnnnnnnnnnnnnnnnnnnnnnnnnnnnnnnnnnnnnnnnnnnnnnnnnnnnnnnnnnnnnnnnnnnnnnnnnnnnnnnnnnnnnnnnnnnnnnnnnnnnnnnnnnnnnnnnnnnnnnnnnnnnnnnnnnnnnnnnnnnnnnnnnnnnnnnnnnnnnnnnnnnnnnnnnnnnnnnnnnnnntgcagtgatgggatccagggcaacagggcctgcctctgcttcccagactacaagggcatcgcctgccacatctgctccaacccaaacaagcatggagatcagtgccaggaagnnnnnnnnnnnnnnnnnnnnnnnnnnnnnnnnnnnnnnnnnnnnnnnnnnnnnnnnnnnnnnnnnnnnnnnnnnnnnnnnnnnnnnnnnnnnnnnnnnnnnnnnnnnnnnnnnnnnnnnnnnnnnnnnnnnnnnnnnnnnnnnnnnnnnnnnnnnnnnnnnnnnnnnnnnnnnnnnnnnnnnnnnnnnnnnnnnnnnnnnnnnnnnnnnnnnnnnnnnnnnnnnnnnnnnnnnnnnnnnnnnnnnnnnnnnnnnnnnnnnnnnnnnnnnnnnnnnnnnnnnnnnnnnnnnnnnnnnnnnnnnnnnnnnnnnnnnnnnnnnnnnnnnnnnnnnnnnnnnnnnnnnnnnnnnnnnnnnnnnnnnnnnnnnnnnnnnnnnnnnnnnnnnnnnnnnnnnnnnnnnnnnnnnnnnnnnnnnnnnnnnnnnnnnnnnnnnnnnnnnnnnnnnnnnnnnnnnnnnnnnnnnnnnnnnnnnnnnnnnnnnnnnnnnnnnnnnnnnnnnnnnnnnnnnnnnnnnnnnnnnnnnnnnnnnnnnnnnnnnnnnnnnnnnnnnnnnnnnnnnnnnnnnnnnnnnnnnnnnnnnnnnnnnnnnnnnnnnnnnnnnnnnnnnnnnnnnnnnnnnnnnnnnnnnnnnnnnnnnnnnnnnnnnnnnnnnnnnnnnnnnnnnnnnnnnnnnnnnnagagtgccggcatcacgcttcctgccgatggccgagtcacagccctggtgccctccgaggctgccgtccgtcagctgaaccctgaggagcgagctttctggttgcagccaaggatgctgccgagcctggtcagnnnnnnnnnnnnnnnnnnnnnnnnnnnnnnnnnnnnnnnnnnnnnnnnnnnnnnnnnnnnnnnnnnnnnnnnnnnnnnnnnnnnnnnnnnnnnnnnnnnnnnnnnnnnnnnnnnnnnnnnnnnnnnnnnnnnnnnnnnnnnnnnnnnnnnnnnnnnnnnnnnnnnnnnnnnnnnnnnnnnnnnnnnnnnnnnnnnnnnnnnnnnnnnnnnnnnnnnnnnnnnnnnnnnnnnnnnnnnnnnnnnnnnnnnnnnnnnnnnnnnnnnnnnnnnnnnnnnnnnnnnnnnnnnnnnnnnnnnnnnnnnnnnnnnnnnnnnnnnnnnnnnnnnnnnnnnnnnnnnnnnnnnnnnnnnnnnnnnnnnnnnnnnnnnnnnnnnnnnnnnnnnnnggacgcagacacagtgcggcaccatgtggtcctgggggaggccctctccatggaaaccttgcggaagggtggacaccgcaactccctcctgggccctgcccactggatcgtcttctacaaccacagtggccannncagcctgaggtgaaccatgtgccactggaaggtcccatgctggaggcccctggccgctcgctgattggtctgtcaggggtcctgacggtgtgctcaagtcgctgcctgcatagccacgctgaggccctgnnggagaaatgtgtaaactgcaccaagaaattccgctgcactcagggcttccagctgcaggnnnnnnnnnnnnnnnnnnnnnnnnnnnnnnnnnnnnnnnnnnnnnnnnnnnnnnnnnnnnnnnnnnnnnnnnnnnnnnnnnnnnnnnnnnnnnnnnnnnnnnnnnnnnnnnnnnacgctgtgtgagccatgcccaggaggcctggggggggtgtgctcgggccatgggcagtgccaggacaggttcctgggcagcggggagtgccactgccatgagggcttccatggaacggcctgtgagatgtgtgagctgggccgctacgggcccaactgcaccggannnnnnnnnnnnnnnnnnnnnnnnnnnnnnnnnnnnnnnnnnnnnnnnnnnnnnnnnnnnnnnnnnnnnnnnnnnnnnnnnnnnnnnnnnnnnnnnnnnnnnnnnnnnnnnnnnnnnnnnnnnnnnnnnnnnnnnnnnnnnnnnnnnnnnnnnnnnnnnnnnnnnnnnnnnnnnnnnnnnnnnnnnnnnnnnnnnnnnnnnnnnnnnnnnnnnnnnnnnnnnnnnnnnnnnnnnnnnnnnnnnnnnnnnnnnnnnnnnnnnnnnnnnnnnnnnnnnnnnnnnnnnnnnnnnnnnnnnnnnnnnnnnnnnnnnnnnnnnnnnnnnnnnnnnnnnnnnnnnnnnnnnnnnnnnnnnnnnnnnnnnnnnnnnnnnnnnnnnnnnnnnnnnnnnnnnnnnnnnnnnnnnnnnnnnnnnnnnnnnnnnnnnnnnnnnnnnnnnnnnnnnnnnnnnnnnnnnnnnnnnnnnnnnnnnnnnnnnnnnnnnnnnnnnnnnnnnnnnnnnnnnnnnnnnnnnnnnnnnnnnnnnnnnnnnnnnnnnnnnnnnnnnnnnnnnnnnnnnnnnnnnnnnnnnnnnnnnnnnnnnnnnnnnnnnnnnnnnnnnnnnnnnnnnnnnnnnngagctcctgagggataagcatgcctcattcttcagcctccgcctcctggnggaatacaaggagctcaagggcgatgggcctttcaccatcttcgtgccgcacgcagatctaatgagcaacctgtcgcaggncaggatgagctggcccggattcgcgctcatcgccagctggtgtttcgctaccatgtggttggctgccggcggctgcggagcgaggacctgctggagcaggggtacgccacagcgctctcggggcacccactgcgattcagcgagagggaggnnnnnnnnnnnnnnnnnnnnnnnnnnnnnnnnnnnnnnnnnnnnnnnnnnnnnnnnnnnnnnnnnnnnnnnnnnnnnnnnnnnnnnnnnnnnnnnnnnnnnnnnnnnnnnnnnnnnnnnnnnnnnnnnnnnnnnnnnnnnnnnnnnnnnnnnnnnnnnnnnnnnnnnnnnnnnnnnnnnnnnnnnnnnnnnnnnnnnnggtggccagcctcctgcccctgcttcgagaggcatcccataggcccttcacaatgctgtggcccacagacgccgcctttcgagccctgcctccggatcgccaggcctggctgtaccatgaggaccaccgtgacaagctagcagccattctgcggggccacatgatccgcaatgtcgaggnaggccttggcatctgacctgcccaacctgggcccacttcgaaccatgcatgggacccccatctctttcgcctgcagccgaacgcggnnngtgagctcatggggggtgaggatgatgcccgcattgtgcagcggcacttgccctttgagggtggcctggcctacggcatcgaccagttgctnnnnnnnnnnnnnnnnnnnnnnnnnnnnnnnnnnnnnnnnnnnnnnnnnnnnnnnnnaacacttgcagcatctgtgggctggagccaccccgtcctgaggggtcacaggagcaggncagggcagccctgaggcctgctggcgcttgtacccgaagttctggacgtcccctccgctgcgctctttgggattacacagcgtctgggtccagcacagcctttgggctaggccccaaggcctgggcaggggctgccaccgcaattgtgtcaccaccacctggaagcccagctgctgccctggtcactatggcagtgagtgccaagnnnnnnnnnnnnnnnnnnnnnnnnnnnnnnnnnnnnnnnnnnnnnnnnnnnnnnnnnnnnnnnnnnnnnnnnnnnnnnnnnnnnnnnnnnnnnnnnnnnnnnnnnnnnnnnnnnnnnnnnnnnnnnnnnnnnnnnnnnnnnnnnnnnnnnnnnnnnnnnnnnnnnnnnnnnnnnnnnnnnnnnnnnnnnnnnnnnnnnnnnnnnnnnnnnnnnnnnnnnnnnnnnnnnnnnnnnnnnnnnnnnnnnnnnnnnnnnnnnnnnnnnnnnnnnnnnnnnnnnnnnnnnnnnnnnnnnnnnnnnnnnnnnnnnnnnnnnnnnnnnnnnnnnnnnnnnnnnnnnnnnnnnnnnnnnnnnnnnnnncagtggcagacctgtgccaggacgggcatggtggctgcagtgagcatgccaactgcagccaggtaggaacagcggtcacttgtacctgcctgcctgactatgagggtgatggctggagctgccgggcccgcaacccctgcacagatggccaccgcgggggctgcagcgagcatgccgactgcttgagcaccggcctnnnnnnnnnnnnnnnnnnnnnnnnnnnnnnnnnnnnnnnnnnnnnnnnnnnnnnnnnnnnnnnnnnnnnnnnnnnnnnnnnnnnnnnnnnnnnnnnnnnnnnnnnnnnnnnnnnnnnnnnnnnnnnnnnnnnnnnnnnnnnnnnnnnnnnnnnnnnnnnnnnnnnnnnnnnnnnnnnnnnnnnnnnnnnnnnnnnnnnnnnnnnnnnnnnnnnnnnnnnnnnnnnnnnnnnnnnnnnnnnnnnnnnnnnnnnnnnnnnnnnnnnnnnnnnnnnnnnnnnnnnnnnnnnnnnnnnnnnnnnnnnnnnnnnnnnnnnnnnnnnnnnnnnnnnnnnnnnnnnnnnnnnnnnnnnnnnnnnnnnnnnnnnnnnnnnnnnnnnnnnnnnnnnnnnnnnnnnnnnnnnnnnnnnnnnnnnnnnnnnnnnnnnnnnnnnnnnnnnnnnnnnnnnnnnnnnnnnnnnnnnnnnnnnnnnnnnnnnnnnnnnnnnnnnnnnnnnnnnnnnnnnnnnnnnnnnnnnnnnnnnnnnnnnnnnnnnnnnnnnnnnnnnnnnnnnnnnnnnnnnnnnnnnnnnnnnnnnnnnnnnnnnnnnnnnnnnnnnnnnnnnnnnnnnnnnnnnnnnnnnnnnnnnnnnnnnnnnnnnnnnnnnnnnnnnnnnnnnnnnnnnnnnnnnnnnnnnngacgctgagtggcccagacttggagctgcacgcctccaacgccaccctcctaagtgccaacgccagccaggggaagttgcttccagcccactcaggcctcagcctcatcatcagtgatgcaggccctgacaacagttcctgggcccctgtgnnnnnnnnnnnnnnnnnnnnnnnnnnnnnnnnnnnnnnnnnnnnnnnnnnnnnnnnnnnnnnnnnnnnnnnnnnnnnnnnnnnnnnnnnnnnnnnnnnnnnnnnncaggcagagctggcgcccaaagccccacctgtggcggcaggtgtgggggctgtgcttgttgctggagcaaagattggcctggcggctggagctctctacctccgtgcacaaggcaagcccacgggctttggcttctctgccttccag

SEQ ID NO: 29668 - DNA, 310 bp, Macaca Mulatta
gcactgatctcactggatagagataaaagtgggacttgtcttgagagtacatcatattaaattaaaagctgcatctcaaattctacttatctttccaatcttctttccgcttagaagtccaacttccaactatggcagcctcataacatgcctcctcaggtctctgttttgtccatgttagttgtgtgcagtgtttctatgcttcgtatggctgtacgcatgtgactgctgtttgtatggcaacagatgggtcagtaagtgttttctatgatactacagagaagcggttattaactataaagttgattag

SEQ ID NO: 29669 - DNA, 645 bp, Macaca Mulatta
  misc_feature (1)...(645): n = A,T,C or G
ttcatttcggtggctgacttccagagagcaatatggctggttccccaacatgcttcaccttcatctatatcctttggcagctcacannnnnnnnnnnnnnnnnnnnnnnnnnnnnnnnnnnnnnnnnnnnnnnnnnnnnnnnnnnnnnnnnnnnnnnnnnnnnnnnnnnnnnnnnnnnnnnnnnnnnnnnnnnnnnnnnnnnnnnnnnnnnnnnnnnnnnnnnnnnnnnnnnnnnnnnnnnnnnnnnnnnnnnnnnnnnnnnnnnnnnnnnnnnnnnnnnnnnnnnnnnnnnnnnnnnnnnnnnnnnnnnnnnnnnnnnnnnnnnnnnnnnnnnnnnnnnnnnnnnnnnnnnnnnnnnnnnnnnnnnnnnnnnnnnnnnnnnnnnnnnnnnnnnnnnnnnnnnnnnnnnnnnnnnnnnnnnnnnnnnnnnnnnnnnnnnnnnnnnnnnnnnnnnnnnnnnnnnnnnnnnnnnnnnnnnnnnnnnnnnnnnnnnnnnnnnnnnnnnnnnnnnnnnnnnnnnnnnnnnnnnnnnnnnnnnnnnnnnnnnnnnnnnnnnnnnnnnnnnnnnnnnnnnnnnnnnnnngaactatcccaatggaagacgcagcaaatacactttattccactgtggaaataccaaaaaag

SEQ ID NO: 29670 - DNA, 2992 bp, Macaca Mulatta
  misc_feature (1)...(2992): n = A,T,C or G
aaagaaaatcgaaatgatgacatttggcttgtagannnnnnnnnnnnnnnnnnnnnnnnnnnnnnnnnnnnnnnnnnnnnnnnnnnnnnnnnnnnnnnnnnnnnnnnnnnnnnnnnnnnnnnnnnnnnnnnnnnnnnnnnnnnnnnnnnnnnnnnnnnnnnnnnnnnnnnnnnnnnnnnnnnnnnnnnnnnnnnnnnnnnnnnnnnnnnnnnnnnnnnnnnnnnnnnnnnnnnnnnnnnnnnnnnnnnnnnnnnnnnnnnnnnnnnnnnnnnnnnnnnnnnnnnnnnnnnnnnnnnnnnnnnnnnnnnnnnnnnnnnnnnnnnnnnnnnnnnnnnnnnnnnnnnnnnnnnnnnnnnnnnnnnnnnnnnnnnnnnnnnnnnnnnnnnnnnnnnnnnnnnnnnnnnnnnnnnnnnnnnnnnnnnnnnnnnnnnnnnnnnnnnnnnnnnnnnnnnnnnnnnnnnnnnnnnnnnnnnnnnnnnnnnnnnnnnnnnnnnnnnnnnnnnnnnnnnnnnnnnnnnnnnnnnnnnnnnnnnnnnnnnnnnnnnnnnnnnnnnnnnnnnnnnnnnnnnnnnnnnnnnnnnnnnnnnnnnnnnnnnnnnnnnnnnnnnnnnnnnnnnnnnnnnnnnnnnnnnnnnnnnnnnnnnnnnnnnnnnnnnnnnnnnnnnnnnnnnnnnnnnnnnnnnnnnnnnnnnnnnnnnnnnnnnnnnnnnnnnnnnnnnnnnnnnnnnnnnnnnnnnnnnnnnnnnnnnnnnnnnnnnnnnnnnnnnnnnnnnnnnnnnnnnnnnnnnnnnnnnnnnnngaattgacagtcccaactgtagttgtactgaatacttcaaaccaacaatatttcttgctggatagacagattaagaatgttgaagacatggtccagtttataaataacattttggatggcacagtagaagnnnnnnnnnnnnnnnnnnnnnnnnnnnnnnnnnnnnnnnnnnnnnnnnnnnnnnnnnnnnnnnnnnnnnnnnnnnnnnnnnnnnnnnnnnnnnnnnnnnnnnnnnnnnnnnnnnnnnnnnnnnnnnnnnnnnnnnnnnnnnnnnnnnnnnnnnnnnnnnnnnnnnnnnnnnnnnnnnnnnnnnnnnnnnnnnnnnnnnnnnnnnnnnnnnnnnnnnnnnnnnnnnnnnnnnnnnnnnnnnnnnnnnnnnnnnnnnnnnnnnnnnnnnnnnnnnnnnnnnnnnnnnnnnnnnnnnnnnnnnnnnnnnnnnnnnnnnnnnnnnnnnnnnnnnnnnnnnnnnnnnnnnnnnnnnnnnnnnnnnnnnnnnnnnnnnnnnnnnnnnnnnnnnnnnnnnnnnnnnnnnnnnnnnnnnnnnnnnnnnnnnnnnnnnnnnnnnnnnnnnnnnnnnnnnnnnnnnnnnnnnnnnnnnnnnnnnnnnnnnnnnnnnnnnnnnnnnnnnnnnnnnnnnnnnnnnnnnnnnnnnnnnnnnnnnnnnnnnnnnnnnnnnnnnnnnnnnnnnnnnnnnnnnnnnnnnnnnnnnnnnnnnnnnnnnnnnnnnnnnnnnnnnnnnnnnnnnnnnnnnnnnnnnnnnnnnnnnnnnnnnnnnnnnnnnnnnnnnnnnnnnnnnnnnnnnnnnnnnnnnnnnnnnnnnnnnnnnnnnnnnnnnnnnnnnnnnnnnnnnnnnnnnnnnnnnnnnnnnnnnnnnnnnnnnnnnnnnnnnnnnnnnnnnnnnnnnnnnnnnnnnnnnnnnnnnnnnnnnnnnnnnnnnnnnnnnnnnnnnnnnnnnnnnnnnnnnnnnnnnnnnnnnnnnnnnnnnnnnnnnnnnnnnnnnnnnnnnnnnnnnnnnnnnnnnnnnnnnnnnnnnnnnnnnnnnnnnnnnnnnnnnnnnnnnnnnnnnnnnnnnnnnnnnnnnnnnnnnnnnnnnnnnnnnnnnnnnnnnnnnnnnnnnnnnnnnnnnnnnnnnnnnnnnnnnnnnnnnnnnnnnnnnnnnnnnnnnnnnnnnnnnnnnnnnnnnnnnnnnnnnnnnnnnnnnnnnnnnnnnnnnnnnnnnnnnnnnnnnnnnnnnnnnnnnnnnnnnnnnnnnnnnnnnnnnnnnnnnnnnnnnnnnnnnnnnnnnnnnnnnnnnnnnnnnnnnnnnnnnnnnnnnnnnnnnnnnnnnnnnnnnnnnnnnnnnnnnnnnnnnnnnnnnnnnnnnnnnnnnnnnnnnnnnnnnnnnnnnnnnnnnnnnnnnnnnnnnnnnnnnnnnnnnnnnnnnnnnnnnnnnnnnngtaatgctgtagacctgtccgtgtctgtttcataatgaataatgagtgacatcagcatgtccagtgacaagtcacattcagtgggaaaaaagtgatcagccggttaccttctccatttccttagttctgtcacccatntcatcaagtgacctctcatcttctgtaaactaatacaggaattctatccaaagcaatgtctaaaaaccctttttttaaaagtaacagtttggtatgcttattgtagataaattatttttgaggccttcattttagctaagtttagaatttatgttaggcaactaagatttgagtggctattcattgagtaattttctactatattttattgaacatttatttaaaaatatgtaactcatggtcaaaaaataggtgattcatggtcccgacactgaagttgtttagcgatttagtcatcaagggcagtcttctcttgtttctaatgccatactaatcaagacagtatggacacttgtatcttaattaccaaggaattactagtaattgttttattttatccatgtactcttagtatttaataattaaatacctattcttagtgcttgacactccatatttctgttttttggaaatgaaacaaatatgcagtccaaaattcagaaactactagagtgaaatgctgttaagtggaaaccggagataaatgctgttattgtaacaagtagattcttctccaaagaataatgagtgattctggggaagataaattttaatgttc

SEQ ID NO: 29671 - DNA, 460 bp, Macaca Mulatta
  misc_feature (1)...(460): n = A,T,C or G
ataaaggacttggccaaaaccaatgangcttgacttctggtatccaggtgccacccaccacgtagctgctaatatgacggtggatttccgagttagtgagaaggaatcccaagccatccagtctgccttggatcaaaataaaatgcactatgannnnnnnnnnnnnnnnnnnnnnnnnnnnnnnnnnnnnnnnnnnnnnnnnnnnnnnnnnnnnnnnnnnnnnnnnnnnnnnnnnnnnnnnnnnnnnnnnnnnnnnnnnnnnnnnnnnnnnnnnnnnnnnnnnnnnnnnnnnnnnnnnnnnnnnnnnnnnnnnnnnnnnnnnnnnnnnnnnnnnnnnnnnnnnnnnnnnnnnnnnnagattggaaaaaagaatgaaagaagaaaggctatttttatggattgtggcattcatgcacgagaatgggtctccccagcattctgccagtggtttgtctatcag

SEQ ID NO: 29672 - DNA, 863 bp, Macaca Mulatta
  misc_feature (1)...(863): n = A,T,C or G
ggggcggaagacaaagttgtccaagaatctgctgcgcatgaagtttatgcaaaggggactggactcggaaaccaagaaacaactnnnnnnnnnnnnnnnnnnnnncattagtgaagaacactggtacttggatttgccagagcttnnnnnnnnnnnnnnnnnntgcttcagatgaatgctaagcacaaagcagaagaagtcgaagatgaaacagtggagcttgatgtgtcagatgaagagatggctagaagatatgagaccttggtggggacaattgggaaaaagtttgccagaaagagagaccatgccaattacgaagaagatgaaaatggagacataaaaccgattaaagcaaagaagatgttcttaaagccccaggattaagatggatgccttaagcaatggaccatgggtgcttgatggaagtcagcagcgcatctggagctcatcccgatagcgtctctatagttattaatactgtaacgtttactttgtaaagagatgtatcattttggaaccatgcctgtttaaaaaaacaaaaggtgtgatgatgagatgtttgtacattccttttgctttcaatggtatttcatttcataaaattttttagcccccctgaatcctaccaaatgttataatgtttttttaaaaggggccggctttcccttaaaggtttttttttggaaccctcgggtttttatccgtaaataataggttcctccccgttccactgaaccctttggaaattgggactccataataaaatttacctgcccaaaggtttttaaaatttggcccccttaaaggttttaataattttaaaattttatttattggttcaaggcccgaatttctataacatt

SEQ ID NO: 29673 - DNA, 774 bp, Macaca Mulatta
  misc_feature (1)...(774): n = A,T,C or G
gggagctgcgctgcgactgctctggaaggagaggaccgggcacaaaccctgaccatgactccctacaggnnnnnnnnnnnnnnnnnnnnnnnngctctgctgctcgctgccagcccaggaggcgccttggcgcggtgcccaggctgcgggcaaggggtgcaagcgggttgtccagggggctgcgtggaggaagaggatgggggatcgccagcgcagggctgcgcggaagctgagggctgtctcaggagggaggggcaggagtgcggggtctacacccctaactgcgccctaggactgcagtgccatccgcccgaggacgacgaggcgcctttgcgggcgctgctgctcggccgaggccgctgccttccggcccgcgcgcccgcggttgcagaggagaatcctaaggagagtaaactccaagcaggcactggccgcccacaggatgcgaaccgcagaaaccaacagaagaatccaggcacctctaccacaccctcccagcccaattctgcaggtgtccaagacaccgagatgggcccatgccgtagacatctggactcagtgctgcagcaactccagactgangtctaccgaggggctcaaacgctctatgtgcccaattgtgaccatcgaggcttctacccggaagcgacagtgcctgctccctccaggggcaagcgccgaggtcccctggtgggtgttgtggatcgtatggggcaaacccccctgtccaggggtcttccgaatgggcaatgggaaaccttccctcctggcccc

SEQ ID NO: 29674 - DNA, 265 bp, Macaca Mulatta
  misc_feature (1)...(265): n = A,T,C or G
cagcactggagatgagcatgcacctggcaaccagggcttcctagatgtggtagctgctctgcgctgggtgcaaggaaacatcactccctttgggggtgacctcaactgtgtcaccgtctttggtggatctgctggtggaagcattgtctctggcctggtnggtcctgtccccagtggctgcagggctgttccacagagccatcacacagagtggggtcatcaccagccaagggatcatcgagtctcaccccggcccctagctcag

SEQ ID NO: 29675 - DNA, 775 bp, Macaca Mulatta
gggctctctcctcccgccgcccaagatgccgaaaggaaagaaggccaagggaaagaaggtggctccggcccctgctgtcgtgaaaaagcaggaggccaagaaagtggtgaatcccctgtttgagaaaagacctaagaattttggcattggacaggacatccagcccaaaagagacctcacccgctttgtgaaatggcctcgctatatcaggttgcagcggcagagagccatcctctataagcggctgaaagtgcctcctgctattaaccagttcacccaggccctggaccgccaaacagctactcagctgcttaagctggcccacaagtacagaccagagacaaaacaagagaagaagcagaggctgttggcccgggccgagaagaaagctgctggcaaaggggatgtccccactaaaagaccacctgtccttcgagcaggagttaacaccgtcaccaccttggtggagaacaagaaggctcagctggtggtgattgcacatgacgtagatcccatcgagctggttgtcttcctgcctgccctgtgtcgtaaaatggggggcccttactgccttatcaagggggaaggcccgactgggcccgtctaatcccacagggaagacctgccaccactggtcgccctttcccacggggggaaatttcgggaaaaacaaagagccgccttttgggcttaagcctgggtgggaaaggcttattcagggaaccccattttaaactacctaaccgcgaataacgcgatcgaaagaaatcgccga

SEQ ID NO: 29676 - DNA, 352 bp, Macaca Mulatta
tccaccacctcagggcacacaggactagtttgattcaggagccgcactgatcacccaatgcatcatggaccccactaggccagccccgcagcccaaaacccagggcaacaagcccgttagccccagggatcactggctggctggagcaacatctcaggagtcctctagcaggcctaagacacgtgaggaggaaaaggaaaaaggcagaaagcaagggagaaaagagaaaccgggagaaggcatgagaaagaatttgagactcaccatgtgggtggggagggggacggggctcagcaatgccatttcagtggcttcccagctcacccttctacatttgagggcccagccagga

SEQ ID NO: 29677 - DNA, 1989 bp, Macaca Mulatta
  misc_feature (1)...(1989): n = A,T,C or G
tgccttacctctaccgggcccccggttacaggcacacccnggttcccaaggacgcccggaccaccctttcctcaggccagaactttgagcaactgaggcaggagtgcctgcagagaggcaccctttttgaggatgcagactttccggccagcaattcctccctgttctacagcgagaggccgcaggtcccctttgtgtggaaacgaccaggggnnnnnnnnnnnnnnnnnnnnnnnnnnnnnnnnnnnnnnnnnnnnnnnnnnnnnnnnnnnnnnnnnnnnnnnnnnnnnnnnnnnnnnnnnnnnnnnnnnnnnnnnnnnnnnnnnnnnnnnnnnnnnnnnnnnnnnnnnnnnnnnnnnnnnnnnnnnnnnnnnnnnnnnnnnnnnnnnnnnnnnnnnnnnnnnnnnnnnnnnnnnnnnnnnnnnnnnnnnnnnnnnnnnnnnnnnnnnnnnnnnnnnnnnnnnnnnnnnnnnnnnnnnnnnnnnnnnnnnnnnnnnnnnnnnnnnnnnnnnnnnnnnnnnnnnnnnnnnnnnnnnnnnnnnnnnnnnnnnnnnnnnnnnnnnnnnnnnnnnnnnnnnnnnnnnnnnnnnnnnnnnnnnnnnnnnnnnnnnnnnnnnnnnnnnnnnnnnnnnnnnnnnnnnnnnnnnnnnnnnnnnnnnnnnnnnnnnnnnnnnnnnnnnnnnnnnnnnnnnnnnnnnnnnnnnnnnnnaagtgctgcggaatctgaggcccggacgccgttcggtcttattaagggtcacgcctacagtgtaacgggaattgaccaggtannnnnnnnnnnnnnnnnnnnnnnnnnnnnnnnnnnnnnnnnnnnnnnnnnnnnnnnnnnnnnnnnnnnnnnnnnnnnnnnnagttctccggagtggcgttatgttggtccagctgaacagaagcgtgtgtgtcacactgctccggatgatggcgaattctgnnnnnnnnnnnnnnnnnnnnnnnnnnnnnnnnnnaaagtggagatctgcaacctcactcccgatgccctggaggaagatgcggtccacaaatgggaggtgacggtccatcagggaagttgggttcgtggctccacggctgggggctgccgcaatttcctgnnnnnnnnnnnnnnnnnnnnnnnnnnnnnnnnnnnnnnnnnnnnnnnnnnnnnnnnnnnnnnnnnnnnnnnnnnnnnnnnnnnnnnnnnnnnnnnnnnnnnnnnnnnnnnnnnnnnnnnnnnnnnnnnnnnnnnnnnnnnnnnnnnnnnnnnnnnnnnnnnnnnnnnnnnnnnnnnnnnnnnnnnnnnnnnnnnnnnnnnnnnnnnnnnnnnnnnnnnnnnnnnnnnnnnnnnnnnnnnnnnnnnnnnnnnnnnnnnnnnnnnnnnnnnnnnnnnnnnnnnnnnnnnnnnnnnnnnnnnnnnnnnnnnnnnnnnnnnnnnnnnnnnnnnnnnnnnnnnnnnnnnnnnnnnnnnnnnnnnnnnnnnngggatatggatggaaatgtagacattgaccttcntgannnnnnnnnnnnnnnnnnnnnnnnnnnnnnnnnnnnnnnnnnnnnnnnnnnnnnnnnnnnnnnnnnnnnnnnnnnnnnnnnnnnnnnnnnnnnnnnnnnnnnnnnnnnnnnnnnnnnnnnnnnnnnnnnnnnnnnnnnnnnnnnnnnnnnnnnnnnnnnnnnnnnnnnnnnnnnnnnnnnnnnnnnnnnnnnnnnnnnnnnnnnaccagcgggaatgggaagctggagtttgatgaattcaaagtcttctgggacaagctgaagcagtggataaccttttccttcggtttgatgctgacaagtccggcaccatgtctacctatgaactgcggactgcactgaaagctgcagnnnaggctttcagctgagcagccacctcctacagctgatcgtgctcaggtatgcggatgaggagctccagatggacttcgatgacttcctcaactgccttgtccggctggagaatgcgagccg

SEQ ID NO: 29678 - DNA, 647 bp, Macaca Mulatta
  misc_feature (1)...(647): n = A,T,C or G
tggactcaggaactgcaacctcaattgagngggaggggaaaaccagcaaagctccccaggttgggggccccatctcctggggacaagcctgccttggtacctctctccaaattcctggatgcccagtattttggggaaattgggctgggaacgcctccacaaaacttcactgtcgtctttgacactggctcctccaatctctgggtcccgtccaggagatgccacttcttcagtgtgccctgctggttccaccaccgcttcaatcccaatgcctccagctccttccagcccaatgggaccaagtttgccattcaatatggaactgggcgggtagatggaatcctgagtgaggacaagctgactattggtggaatcaagggtgcatccgtgattttcggggaagctctgtgggaatccagcctggtcttcactatttcccgccctgatgggatattgggcctcggttttcccattctggctgtggaaggagttccgcccccgctggatgtactggtggagcaggggctactggataagcctgtcttctccttttacctcaacagggactctgaagtggctgatggaggagagctggtcctggggggctcagacccggcacactacatcccacccctctacttcgtgcc

SEQ ID NO: 29679 - DNA, 750 bp, Macaca Mulatta
caagaccaaataggtaaataaaatgaaaaagactggcattaaattttgataagagaagataatatggtctgccagctacaatgaaaccacgtattcagtaggaatggtagctggtgccatgttttatgtttcgtagagtggacttctttctgagagaaagattgaaggactatatatagtacacattttacaagttttagttgaattcagactgtggtgtaatgcattgtgttagattaaaattccataaaaactggtttggaagggatagaaaaccatggggaagacgtgcttatagcccaaatgtttaaagttttggtttaaaattaatactgccgtaaagagtagccattagacaagcacacattttgggtgtaggggagggaggagatagttcaatgtgaagcatgtcactcaaatgggtaaaatggaagtatttagcatattgggatgaaaacctttctcataagcctgtggtgagtcagctgtcttaattaaccctcacgtgagacccgtgtgtccctctgtccacagctgtgtgcaatagcatctcaaaccctgtcaccaaggagatgctgtttgagttcatcgacagatgtactgcagcttctcaaggacagaagcgaaagcatcatctggaccctgacacagagctcatgccaccaccacctcccaaaagactgcgcccatataacctaagacctgcttgtgacttcagggttaagaagaaaaaggaatgaggagaaaacg

SEQ ID NO: 29680 - DNA, 383 bp, Macaca Mulatta
accctgagggccaaaaagttttatttgtcacattcttactcatctacattgtgacgataatgggcaacctgattatcatggtgaccatcatggccagccagtccctgggttcccccatgtacttttttctggcttctttatcatttatagataccgtctattccacagccattgctcccaaaatgattgttgacttgctttctgaaagaaagaccatttcctttcagggctgtatggctcaactttttatggatcatttatttgctggtgctgaagtcattcttctggtggtgatggcctatgaccgatacgtggccatctgtaagcctcttcattatttgagcatcatgaatcgtcgagtctgtgttctcatgctgttggtg

SEQ ID NO: 29681 - DNA, 2991 bp, Macaca Mulatta
  misc_feature (1)...(2991): n = A,T,C or G
gctctgcattagctgctaatgtatgtaaaaagattactggacgtcttaccagtgcaatagcaaaacaggaagatgtctctgttcagctagaagccttggatattatggctgatatgctgagcaggnnnnnnnnnnnnnnnnnnnnnnnnnnnnnnnnnnnnnnnnnnnnnnnnnnnnnnnnnnnnnnnnnnnnnnnnnnnnnnnnnnnnnnnnnnnnnnnnnnnnnnnnnnnnnnnnnnnnnnnnnnnnnnnnnnnnnnnnnnnnnnnnnnnnnnnnnnnnnnnnnnnnnnnnnnnnnnnnnnnnnnnnnnnnnnnnnnnnnnnnnnnnnnnnnnnnnnnnnnnnnnnnnnnnnnnnnnnnnnnnnnnnnnnnnnnnnnnnnnnnnnnnnnnnnnnnnnnnnnnnnnnnnnnnnnnnnnnnnnnnnnnnnnnnnnnnnnnnnnnnnnnnnnnnnnnnnnnnnnnnnnnnnnnnnnnnnnnnnnnnnnnnnnnnnnnnnnnnnnnnnnnnnnnnnnnnnnnnnnnnnnnnnnnnnnnnnnnnnnnnnnnnnnnnnnnnnnnnnnnnnnnnnnnnnnnnnnnnnnnnnnnnnnnnnnnnnnnnnnnnnnnnnnnnnnnnnnnnnnnnnnnnnnnnnnnnnnnnnnnnnnnnnnnnnnnnnnnnnnnnnnnnnnnnnnnnnnnnnnnnnnnnnnnnnnnnnnnnnnnnnnnnnnnnnnnnnnnnnnnnnnnnnnnnnnnnnnnnnnnnnnnnnnnnnnnnnnnnnnnnnnnnnnnnnnnnnnnnnnnnnnnnnnnnnnnnnnnnnnnnnnnnnnnnnnnnnnnnnnnnnnnnnnnnnnnnnnnnnnnnnnnnnnnnnnnnnnnnnnnnnnnnnnnnnnnnnnnnnnnnnnnnnnnnnnnnnnnnnnnnnnnnnnnnnnnnnnnnnnnnnnnnnnnnnnnnnnnnnnnnnnnnnnnnnnnnnnnnnnnnnnnnnnnnnnnnnnnnnnnnnnnnnnnnnnnnnnnnnnnnnnnnnnnnnnnnnnnnnnnnnnnnnnnnnnnnnnnnnnnnnnnnnnnnnnnnnnnnnnnnnaggaatcattttctcactgaatgataaatcaagctcatcgaatttgaagattgatgctttgtcatgtctatacgtaatcctctgtaaccattctcctcaagtcttccatcctcacgttcaggctttggttcctccagtggtggcttgtgttggagacccattttacaaaattacatctgaagcacttcttgttactcaacagcttgtcaaagtaattcgtcctttagatcagccttcctcgtttgatgcaactccttatatcaaagatctatttacctgtaccattaagagattaaaagcagctgacattgatcaggaagtcaaggaaagggctatttcctgtatgggacaaattatttgcaaccttggagacaatttgggttctgacttgcctaatacacttcagattttcttggagagactaaagaatgaaattaccaggttaactacagtaaaggcattgacactgattgctgggtcacctttgaagatagatttgaggcctgttctgggagaaggggttcctatccttgcttcatttcttaggaaaaaccagagagctttgaaactgggtactctttctgcccttgatattctaataaaaaactatagtgacagcttgacagctgccatgattgatgcagttctagatgagctcccacctcttatcagcgaaagtgatatgcatgtttcacaaatggctatcagttttcttaccactttggcaaaagtgtatccctcctccctttcaaagataagtggatccattctcaatgaacttattggacttgtgagatcacccttattgcaggggggagctcttagtgccatgctagactttttccaagctctggttgtcactggaacaaataatttaggatacatggatttgttgcgcatgctnnnnnnnnnnnnnnnnnnnnnnnnnnnnnnnnnnnnnnnnnnnnnnnnnnnnnnnnnnnnnnnnnnnnnnnnnnnnnnnnnnnnnnnnnnnnnnnnnnnnnnnnnnnnnnnnnnnnnnnnnnnnnnnnnnnnnnnnnnnnnnnnnnnnnnnnnnnnnnnnnnnnnnnnnnnnnnnnnnnnnnnnnnnnnnnnnnnnnnnnnnnnnnnnnnnnnnnnnnnnnnnnnnnnnnnnnnnnnnnnnnnnnnnnnnnnnnnnnnnnnnnnnnnnnnnnnnnnnnnnnnnnnnnnnnnnnnnnnnnnnnnnnnnnnnnnnnnnnnnnnnnnnnnnnnnnnnnnnnnnnnnnnnnnnnnnnnnnnnnnnnnnnnnnnnnnnnnnnnnnnnnnnnnnnnnnnnnnnnnnnnnnnnnnnnnnnnnnnnnnnnnnnnnnnnnnnnnnnnnnnnnnnnnnnnnnnnnnnnnnnnnnnnnnnnnnnnnnnnnnnnnnnnnnnnnnnnnnnnnnnnnnnnnnnnnnnnnnnnnnnnnnnnnnnnnnnnnnnnnnnnnnnnnnnnnnnnnnnnnnnnnnnnnnnnnnnnnnnnnnnnnnnnnnnnnnnnnnnnnnnnnnnnnnnnnnnnnnnnnnnnnnnnnnnnnnnnnnnnnnnnnnnnnnnnnnnnnnnnnnnnnnnnnnnnnnnnnnnnnnnnnnnnnnnnnnnnnnnnnnnnnnnnnnnnnnnnnnnnnnnnnnnnnnnnnnnnnnnnnnnnnnnnnnnnnnnnnnnnnnnnnnnnnnnnnnnnnnnnnnnnnnnnnnnnnnnnnnnnnnnnnnnnnnnnnnnnnnnnnnnnnnnnnnnnnnnnnnnnnnnnnnnnnnnnnnnnnnaggtagaaatgggtccctttaaacatacagttgatgatggtctggatattagaaaggcagcttttgagtgtatgtacacacttctagacagttgtcttgatagacttgatatctttgaatttctaaatcatgttgaagatggtttgaaggaccattatgatattaa

SEQ ID NO: 29682 - DNA, 891 bp, Macaca Mulatta
  misc_feature (1)...(891): n = A,T,C or G
ggaagtatgattgacacagcccatgggctagaacacactctacaaaatgactaggaaaacagaaagaatatgatttcctgattagagaggttgattttcctcaatgaaaccaaatacaaggaggaccttgaacaaaaatgacagatacaaagtatttctatcctgagtagtaatctcacacatcatcctaccgattcagccaccacagataggaattcctnnnnnnnnnnnnnnnnnnnnnnnnnnnggagtctcgctctgttgctnnnnnnnnnnnnnnnnnnnntgatctcgtnnnnnnnnnnnnnnnnnnnnnnnnnnnnnnnnnnnnnntgtgcctcagtctcccgagtaactgggattacacatgcccgccatcatgcccaactgaaaattgcatttttagtggaaatatgtgtttccccatgcctgggcaccactgggtcttccaaactccctgaccctccaggtggaatatgttcccccccttggggcctcccccaaaaaagtgctgggggaattggtaaaaaaaattgggaaacaacccaccgacccctggggactggggaaataacatctaaccttaattcggtttgtgggggcggagacggaaaaacccccctaaaaaatagtggccggaaacccgaacaattctcctttatattttgtaataagggtgggtcattgttgttttcatagaaaccacaaacacccacactccagttccttctctcattttttgagggcggtcgttcggacaatgcgggtccgaaacaacatatagaacagtgcgaaaagggtttggaccccactacatcttttcttccccttatgggagaaaaaacaaacaccaggtcttccctttttgtataaccaaacacaacaacccaa

SEQ ID NO: 29683 - DNA, 511 bp, Macaca Mulatta
  misc_feature (1)...(511): n = A,T,C or G
ggcattgctgacaggatgcagaaggagattactgccctggcgcccagcacgatgaagatcaagatcattgctcctcctgagcgcaagtactctgtgtggatcggcggctccatcctggcctcgctgtccaccttccagcagatgtggatcagcaagcaggagtatgacgagtctggcccttccatcgtccaccgcaaatgcttctaggcggactgtgacttagttgcgttacaccctttcttgacaaaacctaacttgcgcagaaaacaagatgagattggcatggctttatttgtgtctccagtctagggcggggaccctcaggggaccccgcgataacctgacgatgtgagttcgcggagtagagcgctacgacattgcggaggatgtagtgcgtgatttaccgagaaatgtggtggcccgacccacngaaggcgcgtcgccggcatgttctctcccctcccctcttcccgcctcactatgcgtttgtgtcgtgttgttcaacgacaac

SEQ ID NO: 29684 - DNA, 2346 bp, Macaca Mulatta
  misc_feature (1)...(2346): n = A,T,C or G
ctctttggaggaaagttcaactttgatgagatgcagacccggaggagcacatttgataacttcccccagtccctcctcactgtgtttcagnnnnnnnnnnnnnnnnnnnnnnnnnnnnnnnnnnnnnnnnnnnnnnnnnnnnnnnnnnnnnnnnnnnnnnnnnnnnnnnnnnnnnnnnnnnnnnnnnnnnnnnnnnnnnnnnnnnnnnnnnnnnnnnnnnnnnnnnnnnnnnnnnnnnnnnnnnnnnnnnnnnnnnnnnnnnnnnnnnnnnnnnnnnnnnnnnnnnnnnnnnnnnnnnnnnnnnnnnnnnnnnnnnnnnnnnnnnnnnnnnnnnnnnnnnnnnnnnnnnnnnnnnnnnnnnnnnnnnnnnnnnnnnnnnnnnnnnnnnnnnnnnnnnnnnnnnnnnnnnnnnnnnnnnnnnnnnnnnnnnnnnnnnnnnnnnnnnnnnnnnnnnnnnnnnnnnnnnnnnnnnnnnnnnnnnnnnnnnnnnnnnnnnnnnnnnnnnnnnnnnnnnnnnnnnnnnnnnnnnnnnnnnnnnnnnnnnnnnnnnnnnnnnnnnnnnnnnnnnnnnnnnnnnnnnnnnnnnnnnnnnnnnnnnnnnnnnnnnnnnnnnnnnnnnnnnnnnnnnnnnnnnnnnnnnnnnnnnnnnnnnnnnnnnnnnnnnnnnnnnnnnnnnnnnnnnnnnnnnnnnnnnnnnnnnnnnnnnnnnnnnnnnnnnnnnnnnnnnnnnnnnnnnnnnnnnnnnnnnnnnnnnnnnnnnnnnnnnnnnnnnnnnnnnnnnnnnnnnnnnnnnnnnnnnnnnnnnnnnnnnnnnnnnnnnnnnnnnnnnnnnnnnnnnnnnnnnnnnnnnnnnnnnnnnnnnnnnnnnnnnnnnnnnnnnnnnnnnnnnnnnnnnnnnnnnnnnnnnnnnnnnnnnnnnnnnnnnnnnnnnnnnnnnnnnnnnnnnnnnnnnnnnnnnnnnnnnnnnnnnnnnnnnnnnnnnnnnnnnnnnnnnnnnnnnnnnnnnnnnnnnnnnnnnnnnnnnnnnnnnnnnnnnnnnnnnnnnnnnnnnnnnnnnnnnnnnnnnnnnnnnnnnnnnnnnnnnnnnnnnnnnnnnnnnnnnnnnnnnnnnnnnnnnnnnnnnnnnnnnnnnnnnnnnnnnnnnnnnnnnnnnnnnnnnnnnnnnnnnnnnnnnnnnnnnnnnnnnnnnnnnnnnnnnnnnnnnnnnnnnnnnnnnnnnnnnnnnnnnnnnnnnnnnnnnnnnnnnnnnnnnnnnnnnnnnnnnnnnnnnnnnnnnnnnnnnnnnnnnnnnnnnnnnnnnnnnnnnnnnnnnnnnnnnnnnnnnnnnnnnnnnnnnnnnnnnnnnnnnnnnnnnnnnnnnnnnnnnnnnnnnnnnnnnnnnnnnnnnnnnnnnnnnnnnnnnnnnnnnnnnnnnnnnnnnnnnnnnnnnnnnnnnnnnnnnnnnnnnnnnnnnnnnnnnnnnnnnnnnnnnnnnnnnnnnnnnnnnnnnnnnnnnnnnnnnnnnnnnnnnnnnnnnnnnnnnnnnnnnnnnnnnnnnnnnnnnnnnnnnnnnnnnnnnnnnnnnnnnnnnnnnnnnnnnnnnnnnnnnnnnnnnnnnnnnnnnnnnnnnnnnnnnnnnnnnnnnnnnnnnnnnnnnnnnnnnnnnnnnnnnnnnnnnnnnnnnnnnnnnnnnnnnnnnagggttactttagtgatccctggaatgtttttgacttcctcatcgtaattggcagcataattgacgtcattctcagtgagactaatnnnnnnnnnnnnnnnnnnnnnnnnnnnnnnnnnnnnnnnnnnnnnnnnnnnnnnnnnnnnnnnnnnnnnnnnnnnnnnnnnnnnnnnnnnnnnnnnnnnnnnnnnnnnnnnnnnnnnnnnnnnnnnnnnnnnnnnnnnnnnnnnnnnnnnnnnnnnnnnnnnnnnnnnnnnnnnnnnnnnnnnnnnnnnnnnnnnnnnnnnnnnnnnnnnnnnnnnnnnnnnnnnnnnnnnnnnnnnnnnnnnnnnnnnnnnnnnnnnnnnnnnnnnnnnnnnnnnnnnnnnnnnnnnnnnnnnnnnnnnnnnnnnnnnnnnnnnnnnnnnnnnnnnnnnnnnnnnnnnnnnnnnnnnnnnnnnnnnnnnnnnnnnnnnnnnnnnnnnnnnnnnnnnnnnnnnnnnnnnnnnnnnnnnnnnnnnnnnnnnnnnnnnnnnnnnnnnnnnnnnnnnnnnnnnnngatcatcaacctctttgtagctgtcatcatggacaactttgactacctgacaagggactggtccatccttggtccccaccacctggatgagtttaaaagaatctgggcagagtatgaccctgaagccaag

SEQ ID NO: 29685 - DNA, 768 bp, Macaca Mulatta
  misc_feature (1)...(768): n = A,T,C or G
gcccgctggggagcgttcctggggggtagccgcaaggccagcggggttccttcggctgcgtttctgtgggaggccctgaaacgcgcggagcttctctctgccgccaggcttttccagcgagagtgaaattaaacgtgaaactcggatcaactggtagtcgttggcggtagaacgccctaaggaccccctccccgcgatacggagggcggactcgggacagggaattgaatctgggagaaaacgnnnnnnnnnnnnnnnnnnnnnnnnnnnnnnnnnnnnnnnnnnnnnnnnnnnnnnnnnnnnnnnnnnnnnnnnnnnnnnnnnnnnnnnnnnnnnnnnnnnnnnnnnnnnnnnnnnnnnnnnnnnnnnnnnnnnnnnnnnnngagccgggcttccgccggggtgggcccctcgcattgttcgggctctggcgggggcggctcggattcctttccacggcccgcccccccacctcgggaagcctcaatgctccttttccacggctttcctggcgtccccctgactctcccgcggcactttcgcctacctccccccaacgccctggtcctccctggcgaccccctttgcattctcggggtcctcctgcccctcccgcggcgcgcctcccacagccgcgtgccctctgcccggagctggggaccaaggctgggccccgccggccgcatcggtggggaacttccgcggtccccatcccagggcgcatagggtccagctccccggcgccgactcatggaaacaatgaaaggt

SEQ ID NO: 29686 - DNA, 281 bp, Macaca Mulatta
  misc_feature (1)...(281): n = A,T,C or G
gttgagatcaaacagacttttcattcctagttggtgcctgggtgagtgacgaggcctgccagtgctggaggacacagtcaannagtgtttggtggaagaacagcccacattcagagctttggaaagactttcataagacaccgactcacctcccatggagtccacgggcctggtggggactcactactagctaagaaatgagagtcatcttcatgatctggcagtgcggaatgggccggcagggctgcaggtgccgtgggatctcgaggactctgggagct

SEQ ID NO: 29687 - DNA, 800 bp, Macaca Mulatta
  misc_feature (1)...(800): n = A,T,C or G
ggcccgcggcgccaaacgaaatgttctagaaagtttttcaaggggccgaggcggccgaacnnnnnnnnnnnnnnnnnnnnnnttnnnnnttggatgtgcaactttaaactttaataacttctgaatgaatacatggtggcaacagtccatgacacctgaaaacatcatttgtggagttgcgtagagttcagtgttcgcagtctgcatattacaacgatatttcacacagccctgctcagtttgattttctccacgtggttgataatggtcttcagttgctgctaagtgattttgcacatttcatttataatccctcaccctacaattacctacgtactgtttctgcaagttaacctatatgctatgctcagtcatgtacctttcaaagttactaatgcaactaccaaagagggacagtgtcaaaaccattgtttccatcagaaggatggctgccccacactgtgagaacactgctgttcctaacagaagtttaatttcagaggaatgtgagaattcgtttgaccttaattccagatgtgcatgcctcaaaagaaaagtcccattctccttccttttggggagtgcttttggtggcaccaaagctggtatggggtagtggagagaatactgagcttggagtcacaaccaggtgaaactgccctggtcttcactagctgtgtgacttgggcaagcagcttgcagtctctgagcctctgagatccccgatggatgagaacaatgaccccctccccaggctgtgctgagagagggaattgatcgtggatatgaaaacgctgccc

SEQ ID NO: 29688 - DNA, 2363 bp, Macaca Mulatta
  misc_feature (1)...(2363): n = A,T,C or G
gatggatgatgatgacgatgacgatgacataggagatcatgacgatgaccaccccgggatggaggtggtgctgcatgaggacaagaagtactacccgacagccgaggaggtgtacggccctgaggtggagaccatagttcaagaggaagacactcagcctctcacagnnnnnnnnnnnnnnnnnnnnnnnnnnnnnnnnnnnnnnnnnnnnnnnnnnnnnnnnnnnnnnnnnnnnnnnnnnnnnnnnnnnnnnnnnnnnnnnnnnnnnnnnnnnnnnnnnnnnnnnnnnnnnnnnnnnnnnnnnnnnnnnnnnnnnnnnnnnnnnnnnnnnnnnnnnnnnnnnnnnnnnnnnnnnnnnnnnnnnnnnnnnnnnnnnnnnnnnnnnnnnnnnnnnnnnnnnnnnnnnnnnnnnnnnnnnnnnnnnnnnnnnnnnnnnnnnnnnnnnnnnnnnnnnnnnnnnnnnnnnnnnnnnnnnnnnnnnnnnnnnnnnnnnnnnnnnnnnnnnnnnnnnnnnnnnnnnnnnnnnnnnnnnnnnnnnnnnnnnnnnnnnnnnnnnnnnnnnnnnnnnnnnnnnnnnnnnnnnnnnnnnnnnnnnnnnnnnnnnnnnnnnnnnnnnnnnnnnnnnnnnnnnnnnnnnnnnnnnnnnnnnnnnnnnnnnnnnnnnnnnnnnnnnnnnnnnnnnnnnnnnnnnnnnnnnnnnnnnnnnnnnnnnnnnnnnnnnnnnnnnnnnnnnnnnnnnnnnnnnnnnnnnnnnnnnnnnnnnnnnnnnnnnnnnnnnnnnnnnnnnnnnnnnnnnnnnnnnnnnnnnnnnnnnnnnnnnnnnnnnnnnnnnnnnnnnnnnnnnnnnnnnnnnnnnnnnnnnnnnnnnnnnnnnnnnnnnnnnnnnnnnnnnnnnnnnnnnnnnnnnnnnnnnnnnnnnnnnnnnnnnnnnnnnnnnnnnnnnnnnnnnnnnnnnnnnnnnnnnnnnnnnnnnnnnnnnnnnnnnnnnnnnnnnnnnnnnnnnnnnnnnnnnnnnnnnnnnnnnnnnnnnnnnnnnnnnnnnnnnnnnnnnnnnnnnnnnnnnnnnnnnnnnnnnnnnnnnnnnnnnnnnnnnnnnnnnnnnnnnnnnnnnnnnnnnnnnnnnnnnnnnnnnnnnnnnnnnnnnnnnnnnnnnnnnnnnnnnnnnnnnnnnnnnnnnnnnnnnnnnnnnnnnnnnnnnnnnnnnnnnnnnnnnnnnnnnnnnnnnnnnnnnnnnnnnnnnnnnnnnnnnnnnnnnnnnnnnnnnnnnnnnnnnnnnnnnnnnnnnnnnnnnnnnnnnnnnnnnnnnnnnnnnnnnnnnnnnnnnnnnnnnnnnnnnnnnnnnnnnnnnnnnnnnnnnnnnnnnnnnnnnnnnnnnnnnnnnnnnnnnnnnnnnnnnnnnnnnnnnnnnnnnnnnnnnnnnnnnnnnnnnnnnnnnnnnnnnnnnnnnnnnnnnnnnnnnnnnnnnnnnnnnnnnnnnnnnnnnnnnnnnnnnnnnnnnnnnnnnnnnnnnnnnnnnnnnnnnnnnnnnnnnnnnnnnnnnnnnnnnnnnnnnnnnnnnnnnnnnnnnnnnnnnnnnnnnnnnnnnnnnnnnnnnnnnnnnnnnnnnnnnnnnnnnaggctcagattttccggcccttgaagttcaataccacatctgttatcaagattgctgtggagccagtcaacccctcagagctgcccaagatgcttgatggcctgcgcaaggtcaacaagagctatccatccctcaccaccaaggnnnnnnnnnnnnnnnnnnnnnnnnnnnnnnnnnnnnnnnnnnnnnnnnnnnnnnnnnnnnnnnnnnnnnnnnnnnnnnnnnnnnnnnnnnnnnnnnnnnnnnnnnnnnnnnnnnnnnnnnnnnnnnnnnnnnnnnnnnnnnnnnnnnnnnnnnnnnnnnnnnnnnnnnnnnnnnnnnnnnnnnnnnnnnnnnnnnnnnnnnnnnnnnnnnnnnnnnnnnnnnnnnnnnnnnnnnnnnnnnnnnnnnnnnnnnnnnnnnnnnnnnnnnnnnnnnnnnnnnnnnnnnnnnnnnnnnnnnnnnnnnnnnnnnnnnnnnnnnnnnnnnnnnnnnnnnnnnnnnnnnnnnnnnnnnnnnnnnnnnnnnnnnnnnnnnnnnnnnnnnnnnnnnnnnnnnnnnnnnnnnnnnnnnnnnnnnnnnnnnnnnnnnnnnnnnnnnnnnnnnnnnnnnnnnnnnnnnnnnnnnnnnnnnnnnnnnnnnnnnnnnnngattcggaacgtcaagtttaagatcctggatgcagtggttgcccaggagcccctacaccggggcgggggccagatcatccccacagccaggcgagtcgtctactctgccttcctcatgg

SEQ ID NO: 29689 - DNA, 461 bp, Macaca Mulatta
ggagggcaatcgcgaggacggctatttgctggggctggacaatctcattggcatcctggccagcctggctgagagatgaggctggactcctgtccccgtgggccgccgccctgacatgtggacctgcagctttgtccccaccgtgcatgccggcttgagactggagccccgcggtgcagggcagttcaccgggtccggcagggccaggtgccaaccactaagggggggcactgccaatgccaggggtttcgcccaccccgggccccagcgttcccagagccaaatgacactaacttataggaggggagggggcaaagggcttcttcctcaggccagcttttctgaggaggctctgctctctccagaggggccagaccgtggattttatttagcaagcctagaccttctggtctaacctcttacactaggttggactccccttcctaataaaactcaaagac

SEQ ID NO: 29690 - DNA, 3046 bp, Macaca Mulatta
  misc_feature (1)...(3046): n = A,T,C or G
ataactgcgacctccacttcaaagtggcccgagatcggagtagtggctatccgctcacaattgagggctttgcctacctgtggtcaggagcccgtgccagctatggggtcagaaggggccgtgtgtgcttcgagatgaannnnnnnnnnnnnnnnnnnnnnnnnnnnnnnnnnnnnnnnnnnnnnnnnnnnnnnnnnnnnnnnnnnnnnnnnnnnnnnnnnnnnnnnnnnnnnnnnnnnnnnnnnnnnnnnnnnnnnnnnnnnnnnnnnnnnnnnnnnnnnnnnnnnnnnnnnnnnnnnnnnnnnnnnnnnnnnnnnnnnnnnnnnnnnnnnnnnnnnnnnnnnnnnnnnnnnnnnnnnnnnnnnnnnnnnnnnnnnnnnnnnnnnnnnnnnnnnnnnnnnnnnnnnnnnnnnnnnnnnnnnnnnnnnnnnnnnnnnnnnnnnnnnnnnnnnnnnnnnnnnnnnnnnnnnnnnnnnnnnnnnnnnnnnnnnnnnnnnnnnnnnnnnnnnnnnnnnnnnnnnnnnnnnnnnnnnnnnnnnnnnnnnnnnnnnnnnnnnnnnnnnnnnnnnnnnnnnnnnnnnnnnnnnnnnnnnnnnnnnnnnnnnnnnnnnnnnnnnnnnnnnnnnnnnnnnnnnnnnnnnnnnnnnnnnnnnnnnnnnnnnnnnnnnnnnnnnnnnnnnnnnnnnnnnnnnnnnnnnnnnnnnnnnnnnnnnnnnnnnnnnnnnnnnnnnnnnnnnnnnnggtgatgggcctacgccggcagcggaactatgctggccgctgggacgtcctgatccagcaggccacccagtgcctcaaccgcctcatccagattgctgcccgcaagaaacgcaactatatcctagatcannnnnnnnnnnnnnnnnnnnnnnnnnnnnnnnnnnnnnnnnnnnnnnnnnnnnnnnnnnnnnnnnnnnnnnnnnnnnnnnnnnnnnnnnnnnnnnnnnnnnnnnnnnnnnnnnnnnnnnnnnnnnnnnnnnnnnnnnnnnnnnnnnnnnnnnnnnnnnnnnnnnnnnagccaacttcacgttgccagatgttggggacttcctggatgaggttctattcattgagctgcagcgtgaggaagcagacaagcttgtgaggcagtacaacgaggaaggccgcaaggctgggccacccnnnnnnnnnnnnnnnnnnnnnnnnnnnnnnnnnnnnnnnnnnnnnnnnnnnnnnnnnnnnnnnnnnnnnnnnnnnnnnnnnnnnnnnnnnnnnnnnnnnnnnnnnnnnnnnnnnnnnnnnnnnnnnnnnnnnnnnnnnnnnnnnnnnnnnnnnnnnnnnnnnnnnnnnnnnnnnnnnnnnnnnnnnnnnnnnnnnnnnnnnnnnnnnnnnnnnnnnnnnnnnnnnnnnnnnnnnnnnnnnnnnnnnnnnnnnnnnnnnnnnnnnnnnnnnnnnnnnnnnnnnnnnnnnnnnnnnnnnnnnnnnnnnnnnnnnnnnnnnnnnnnnnnnnnnnnnnnnnnnnnnnnnnnnnnnnnnnnnnnnnnnnnnnnnnnnnnnnnnnnnnnnnnnnnnnnnnnnnnnnnnnnnnnnnnnnnnnnnnnnnnnnnnnnnnnnnnnnnnnnnnnnnnnnnnnnnnnnnnnnnnnnnnnnnnnnnnnnnnnnnnnnnnnnnnnnnnnnnnnnnnnnnnnnnnnnnnnnnnnnnnnnnnnnnnnnnnnnnnnnnnnnnnnnnnnnnnnnnnnnnnnnnnnnnnnnnnnnnnnnnnnnnnnnnnnnnnnnnnnnnnnnnnnnnnnnnnnnnnnnnnnnnnnnnnnnnnnnnnnnnnnnnnnnnnnnnnnnnnnnnnnnnnnnnnnnnnnnnnnnnnnnnnnnnnnnnnnnnnnnnnnnnnnnnnnnnnnnnnnnnnnnnnnnnnnnnnnnnnnnnnnnnnnnnnnnnnnnnnnnnnnnnnnnnnnnnnnnnnnnnnnnnnnnnnnnnnnnnnnnnnnnnnnnnnnnnnnnnnnnnnnnnnnnnnnnnnnnnnnnnnnnnnnnnnnnnnnnnnnnnnnnnnnnnnnnnnnnnnnnnnnnnnnnnnnnnnnnnnnnnnnnnnnnnnnnnnnnnnnnnnnnnnnnnnnnnnnnnnnnnnnnnnnnnnnnnnnnnnnnnnnnnnnnnnnnnnnnnnnnnnnnnnnnnnnnnnnnnnnnnnnnnnnnnnnnnnnnnnnnnnnnnnnnnnnnnnnnnnnnnnnnnnnnnnnnnnnnnnnnnnnnnnnnnnnnnnnnnnnnnnnnnnnnnnnnnnnnnnnnnnnnnnnnnnnnnnnnnnnnnnnnnnnnnnnnnnnnnnnnnnnnnnnnnnnnnnnnnnnnnnnnnnnnnnnnnnnnnnnnnnnnnnnnnnnnnnnnnnnnnnnnnnnnnnnnnnnnnnnnnnnnnnnnnnnnnnnnnnnnnnnnnnnnnnnnnnnnnnnnnnnnnnnnnnnnnnnnnnnnnnnnnnnnnnnnnnnnnnnnnnnnnnnnnnnnnnnnnnnnnnnnnnnntttttactgtgggtcggctgttgatatttcatcaagataagcatttctttcctgagttcaggtgactgaggaagagcnnnnnnnnnnnnnnnnnnnnnnnnnnnnnnngaatcatctttaacctgactttttatacgatgccccagttccccataactttgcacacaagcttctgtgttcagttgaattgtaactgctttttgtatttggagagagtgtgactattgaacttgaaaccttttattccgggcgtcttggtagtttctggtgggattcagtgggtgagagggaaggaggggaggttggggggctccttcccttcagaacttgaagtttctcccactgcctcctctccagtggtctcccaggtgccagacccaaaagcttttcctacagtgataccctttatttttacttccccttgactcatatgttttaacatgattttaacaaactgcacttattaagaaatgtgtttgccctgttttgtttggtttcgttttgttttctttgaataaatgacatagcacctcctagcaggaaggaagcagggt

SEQ ID NO: 29691 - DNA, 135 bp, Macaca Mulatta
tttgtcctggatgacctccgccgctattctgtggacctacgctacacggtctttcagaccacgggctccgtccccatcgccacggtcatcatcaacgaggccagtggtagccgcaccatcctatactacgacagg

SEQ ID NO: 29692 - DNA, 1140 bp, Macaca Mulatta
  misc_feature (1)...(1140): n = A,T,C or G
ctgtaagtgttggaaacttaccccctaaggctaaggttcttataaaaattacctacatcacagaactcagcatcctgggcactgttggtgtctttttcatgcccgccaccgtagcgccctggcaacaggacaaggctttgaatgaaaaccttcaggnnnnnnnnnnnnnnnnnnnnnnnnnnnnnnnnnnnnnnnnnnnnnnnnnnnnnnnnnnnnnnnnnnnnnnnnnnnnnnnnnnnnnnnnnnnnnnnnnnnnnnnnnnnnnnnnnnnnnnnnnnnnnnnnnnnnnnnnnnnnnnnnnnnnnnnnnnnnnnnnnnnnnnnnnnnnnnnnnnnnnnnnnnnnnnnnnnnnnnnnnnnnnnnnnnnnnnnnnnnnnnnnnnnnnnnnnnnnnnnnnnnnnnnnnnnnnnnnnnnnnnnnnnnnnnnnnnnnnnnnnnnnnnnnnnnnnnnnnnnnnnnnnnnnnnnnnnnnnnnnnnnnnnnnnnnnnnnnnnnnnnnnnnnnnnnnnnnnnnnnnnnnnnnnnnnnnnnnnnnnnnnnnnnnnnnnnnnnnnnnnnnnnnnnnnnnnnnnnnnnnnnnnnnnnnnnnnnnnnnnnnnnnnnnnnnnnnacaggttacaaggagttattttcgtatcctaagcatatcacaagcaatatcgtggcaacagagttcatcatgnnnnnnnnnnnnnnnnnnnnnnnnnnnnnnnnnnnnnnnnnnnnnnnnnnnnnnnnnnnnnnnnnnnnnnnnnnnnnnnnnnnnnnnnnnnnnnnnnnnnnngatgggcacctccaggacgagagcctgacgttgcagctggtgaagaggagccgcccccacaccaggttattcgcctgcggtatcgnnnnnnnnnnnnnnnnnnnnnnnnnnnnnnnnnnnnnnnnnnnnnnnnnnnnnnnnnnnnnnnnnnnnnnnnnnnnnnnnnnnnnnnnnnnnnnnnnngatagaataccaaatgagtaggctatgttctccaagctgccactctgtctcggtcaaatggcagctactcaacccagatgcgcctgatgccctgcaagccccagcccaggtgccgtccttgtttctcaatgatctaatccttgtctactgattcattcctcactgcacacagg

SEQ ID NO: 29693 - DNA, 189 bp, Macaca Mulatta
ggagtgacgactgtgttatcaatgaccacactgatgatcgggtcccgcacttctcttcccaacaccaactgcttcataaaggccatcgatgtgtacctggggatctgctttagcttcgtgtttggggccttgctggaatacgcagttgctcactacagttccttacagcagatggcagccaaagatagg

SEQ ID NO: 29694 - DNA, 139 bp, Macaca Mulatta
aattcatgccgaagtccaacttaagaattatgggaaatttcttgaggagtatacatctcaactgagaagaattgaggatgctctggatgactcaattggagatgtttgggatttcaatcttgatcctatagcattaaag

SEQ ID NO: 29695 - DNA, 142 bp, Macaca Mulatta
ctagcaatcctagaagactatgcggacccgtttgatgttcaggagactggtgaaggttcagcaggagcttcaggagccccagagaaggtccctgaaaatgatggctacatggagccctatgaggctcaaaagatgatggccg

SEQ ID NO: 29696 - DNA, 215 bp, Macaca Mulatta
agagtgggggagacagagagagatagacatgtacacccatatgtatcatagagcacgattctccagtggatggatacctggaatggatcattaagatgaagagagtaattcacactctagaacctttaacaagcactgaaaggaagaagcctgagatttggtccttggcaatttcttggaaagcactgatcagtcacgctgtccgtgaacagagt

SEQ ID NO: 29697 - DNA, 284 bp, Macaca Mulatta
aatctataatgtttaaccacttatctaagattctacataagtaaaattatttaataatgtctattgaattgatatttatatcttgcatcctatatcatgtcaatatgtgatatagaaaagagatacatgaatttttaagctaagcttgacagattgaaagacaagtgtcatttttttgtggagtgtgatacataccatataaatgaataaagacattttaaatttaatcactttgtttttattataagttccttagttcagatatcctttattaatttataaga

SEQ ID NO: 29698 - DNA, 347 bp, Macaca Mulatta
  misc_feature (1)...(347): n = A,T,C or G
agattgttcacggaacaggattggcttatatacagtctcgacaagcgcnntgaattctnnntagttaaaattacatccaaaaaaaaacatcctgaactcattaccttcaagtatggaaatagcagtgcttcaggaaatagaatcggagaagtatgtcaatgcgggatgactagctaacaggatcatgaagttgtgctgaagtatatagaatttaagatagaaccagagaactgctatactcctggataacggactctgctcatgggctgcttaatagcagcagaagcatatatattcaatctgtggacagaattttaaaagtgttctttgcattggttataaatgat

SEQ ID NO: 29699 - DNA, 409 bp, Macaca Mulatta
gtataatcattgtccattacaggtgcctgtggggacattgtgatgacccagtctccagactccctggctgtgtctctgggagagagggtcaccatcaactgcaagtccagccggagtcttttatacagctccaacaataagaactacttagcctggtaccagcagaaaccaggacaggctcctaagctgctcgtttactgggcatctacccgggaatccggggtccctaaccgattcagtggcagcgggtctgggacagatttcactctcaccatcagtggcctgcaggctgaagatgtggcagtttattactgtcagcagtattatagctctcctctcacagtgcttcagcctcgaacacaaacctcctccccatgcactgggccagtgagtctttgctgcaacagct

SEQ ID NO: 29700 - DNA, 665 bp, Macaca Mulatta
agatttttgatagatgccacttaaaattcctcctgaccgtgccgctggcagctggaggaagtagaagcttggtactttgtgggacactgaccactctaactggactttcctttggcagagtctttggattcgtggcccggaagcagggcagtgccacggataatgtgtgccacctgtttgcagagcatgaccctgagcagcctgccagcgccatcgtcaacttcgtatcaaaggtcatgattggctccccaaagaaggtctaagaacccacttcccaccctggacccaccgatgcctctcaaagccctggagacagctgtggggtgagggtggggcccccactttttaccaaactagtaaccctgacattccaggcccatgaggggaaagaggatcttccagctctacaaaaacaagaacaaacaacatcaccatgaattgacctttcctgaaactgacttacctgacacatctctgtagccacatgttttttgggtagaagaagctgggcatgggtgcaccccaccccctagggcccccatgggaaagggacatgcaaggaaacagcacagaacacgaggtggtccccacatccctggcacaccagcattccgggggatgaggaatccccagcccttgaggcagaggtgacaagtgactgccat

SEQ ID NO: 29701 - DNA, 612 bp, Macaca Mulatta
  misc_feature (1)...(612): n = A,T,C or G
ttgccagatgtcctctgttgcaagaggcaggacaaacagtgaggactccaccaacactcaccgggtgacccctttgctttggtaactcactcagggtgaaaggaattccgatttcaaatggcatctctttgtgtggcctgtttgaggcaccacgcagaccttgctgnnnnnnnnnnnnnnnnnnnnnnnnnnnnnnnnnnnnnnnnnnnnnagattcaaaagtgaggctgctgccccagtttcatggatgctggcagaagacttaagatttctgaatcagagacaaaagacttcacttattattcacagataaagcaatggccagtgtcagtgtatttgcactggtgccccaagccctgatacccacggggtgatgcagagaccccatgactcccgcacatgcactgggtcaagtcacagtggaggaccgctgagctagggcaccgcgtgggcccacagcaggcagtaggcaagccctctcctttgaggttcctccctgcaactacgaccctgaaaaatggatccggtaaagaagagtcaaggctttacagtcttggtgcacccagtaagacctgtaggagaacagtaagcctgtggaggactatttcttcc

SEQ ID NO: 29702 - DNA, 87 bp, Macaca Mulatta
aggaactccttcacagacatccttcgtgccatcttgctgtcgttggaagtcctaatcgaagatccggagcttcagataaatggcttc

SEQ ID NO: 29703 - DNA, 1735 bp, Macaca Mulatta
  misc_feature (1)...(1735): n = A,T,C or G
gggcattttgagtcagcaccaatttcttgaaggccccgagggcattgaaaatgctcgatttggttcagcaattgcagctctttcagacatcaacatggatggctttaacgatgtgattgttggttcgccactagaaaatcagaattctggagctgtatacatttataatggtcatcagggcactgtccgcacgaagtattcccagnnnnnnnnnnnnnnnnnnnnnnnnnnnnnnnnnnnnnnnnnnnnnnnnnnnnnnnnnnnnnnnnnnnnnnnnnnnnnnnnnnnnnnnnnnnnnnnnnnnnnnnnnnnnnnnnnnnnnnnnnnnnnnnnnnnnnnnnnnnnnnnnnnnnnnnnnnnnnnnnnnnnnnnnnnnnnnnnnnnnnnnnnnnnnnnnnnnnnnnnnnnnnnnnnnnnnnnnnnnnnnnnnnnnnnnnnnnnnnnnnnnnnnnnnnnnnnnnnnnnnnnnnnnnnnnnnnnnnnnnnnnnnnnnnnnnnnnnnnnnnnnnnnnnnnnnnnnnnnnnnnnnnnnnnnnnnnnnnnnnnnnnnnnnnnnnnnnnnnnnnnnnnnnnnnnnnnnnnnnnnnnnnnnnnnnnnnnnnnnnnnnnnnnnnnnnnnnnnnnnnnnnnnnnnnnnnnnnnnnnnnnnnnnnnnnnnnnnnnnnnnnnnnnnnnnnnnnnnnnnnnnnnnnnnnnnnnnnnnnnnnnnnnnnnnnnnnnnnnnnnnnnnnnnnnnnnnnnnnnnnnnnnnnnnnnnnnnnnnnnnnnnnnnnnnnnnnnnnnnnnnnnnnnnnnnnnnnnnnnnnnnnnnnnnnnnnnnnnnnnnnnnnnnnnnnnnnnnnnnnnnnnnnnnnnnnnnnnnnnnnnnnnnnnnnnnnnnnnnnnnnnnnnnnnnnnnnnnnnnnnnnnnnnnnnnnnnnnnnnnnnnnnnnnnnnnnnnnnnnnnnnnnnnnnnnnnnnnnnnnnnnngttgatgggacagaagtaacatgccaggtggctgcatctcagaagtctgttgcctgtgatgtaggctaccctgctttaaagagagaacaacaggtnnnnnnnnnnnnnnnnnnnnnnnnnnnnnnnnnnnnnnnnnnnnnnnnnnnnnnnnnnnnnnnnnnnnnnnnnnnnnnnnnnnnnnnnnnnnnnnnnnnnnnnnnnnnnnnnnnnnnnnnnnnnnnnnnnnnnnnnnnnnnnnnnnnnnnnnnnnnnnnnnnnnnnnnnnnnnnnnnnnnnnnnnnnnnnnnnnnnnnnnnnnnnnnnnnnnnnnnnnnnnnnnnnnnnnnnnnnnnnnnnnnnnnnnnnnnnnnnnnnnnnnnnnnnnnnnnnnnnnnnnnnnnnnnnnnnnnnnnnnnnnnnnnnnnnnnnnnnnnnnnnnnnnnnnnnnnnnnnnnnnnnnnnnnnnnnnnnnnnnnnnnnnnnnnnnnnnnnnnnnnnnnnnnnnnnnnnnnnnnnnnnnnnnnnnnnnnnnnnnnnnnnnnnnnnnnnnnnnnnnnnnnnnnnnnnnnnnnnnnnnnnnnnnnnnnnnnnnnnnnnnnnnnnnnnnnnnnnnnnnnnnnnnnnnnnnnnnnnnnnnnnnnnnnnnnnnnnnnnnnnnnnnnnnnnnnnnnnnnnnnnnnnnnnnnnnnnnnnnnnnnnnnncaacgttccagacagtacagctaacggcagctgcagaaatcaacacctacaaccccgagatatacgtgatcgaagataacactgt

SEQ ID NO: 29704 - DNA, 1972 bp, Macaca Mulatta
  misc_feature (1)...(1972): n = A,T,C or G
gcagtgagccgctgattgaactatgtagctatggagatagtggttacatgttatatgtgtccagcgatgatgaatgcatttttaagacagtccaacatgaagaggtggagtttatgcagatgctggtttcaggatactacttgaacctcaaccagaaccctcggtctttgttgcgtaaattatatggacttgtattgtgtgcaggcaggtggcaagaacattgggagtgtggtgatgaacaatattttatcaagatcagtcaaaatgcataccaaatatgacctcaaaggctcaacatacaaacgccgggcttaccagaaagagcgagagaagcatcttcccacatttaaagacctagatttattacaagacatccatgatggtctttttttggatgatgacatgtacaatgctctctgtaagaccatgcagagtgagtgtttggtgttgcagagcttcaagataatggactatagcctcttgctgtcaatccacaatatagattatgcacaacgagagcccttaagcagcgacacccttcaagtgtccgttgacactcaaagactgaccccccaaaaggttctgtactccacacgccatggaatccatccagggagaggctcgcctgggcgacaccatggagactgatgaccatatgggtggcatccctgctcagactagtaaaggagaaaggcttctgctttatattggcatcattgacattatacagtattacacatgtcttaagaagtcggagcactcttggaaagccttggtacatgacggggacactgtctcagtgcacaaccacaggcttttatgatgaacggttccagcgcctcatgtgcaacgcagtatttacgaagatcccctgaacgccctctccttccaaannnnnnnnnnnnnnnnnnnnnnnnnnnnnnnnnnnnnnnnnnnnnnnnnnnnnnnnnnnnnnnnnnnnnnnnnnnnnnnnnnnnnnnnnnnnnnnnnnnnnnnnnnnnnnnnnnnnnnnnnnnnnnnnnnnnnnnnnnnnnnnnnnnnnnnnnnnnnnnnnnnnnnnnnnnnnnnnnnnnnnnnnnnnnnnnnnnnnnnnnnnnnnnnnnnnnnnnnnnnnnnnnntagttggagagactttgggtatgctaaatccaaagtccaaccttgaaaaactgaaacgtgcagagtcagagttcacccattaagcgcaaagcctcagaagaccctggtacgagattccgcctctctgtgatcccaagacgtcagcccttgccccagcaatgtggaaattttcttctacttggtcatcaaaaaaggagtgtaaaagaagcgaggtgggctctccatcttcttcctgaagaagagcctcctcctcttctctgtcctcatgaatgggcattagtgcctcggacagttgaggaccacagcatcccctccacnccacagcatcccctccactccagagctaggtggcacggattttcaactggctaaccttggcttccacaactgaatttttttcagacccccattcttcatgctggaaatgagattactagacttggcagttttctttcccctcatctttcaccaggaactggactcttaatttcctcaggacagactagctggcacattatccccacctctttctctctgatccctggaagaagacccctgtaatctctgtaaaggtttttgggggataggagtgtttaaccacctccaaactttnnnnnnnnnnnnnnnnnnnnnnnnnnnnnnngcgcaccgcacaaaatttcaagccagtttcagatacaaactccagaagtgttgatgagatccctattcgtagggttctctcagaagagccacaccgtctctgaagagaaaagtagtgattgctctgccagaagcagcacctctttaaactcctcctctcttgatcaatttcttgaggctgaaggaattgagagagtgggacgtggggtaa

SEQ ID NO: 29705 - DNA, 3088 bp, Macaca Mulatta
  misc_feature (1)...(3088): n = A,T,C or G
agcaggaattttaccctctagggcatgaatactgtgctgttcagttctgagctgtgctagcagtacccttcaaaggaatagcaatggctgcagcagcagcttctcacctgaacctggatgccctccgggaagtgctagaatgccccatctgcatggagtccttcacagaagagcagctgcgtcccaagctcctgcactgatggccataccatctgccgccagtgcctggagaagctattggccagtagcatcaatggtgtccgctgtcccttttgcagcaagattacccgcataaccagcttgacccagctgacagacaatctgacagtgctaaagatcattgatacagctgggctcagcgaggctgtggggctgctcatgtgtcggtcctgtgggcggcgtctgccccggcagttctgccggagctgtggtttggtgttatgtgagccctgccgggaggcagaccatcagcctcctggccactgtacactccctgtcaaagaagccgctgaggagcggcgtcgggactttggagagaagttgactcgtctgcgggaacttatgggggagctgcagcggcggaaggtagccttggaaggtgtctccaaggaccttcaggcaaggtataaagcagttctccaggagtatggacacgaggaacgcagggtccaggatgagctggctcgctctcggaaattcttcacaggctctttggctgaagttgagaagtccaatagtcaagtggtagaggagcagagttaccttcttaacattgcagaggtgcaggctgtgtctcgctgtgactactttctaagaagatcaagcaagcagatgtagcactactggaggagaaaggtgatgaggaggagccagagcnnnnnnnnnnnnnnnnnnnnnnnnnnnnnnnnnnnnnnnnnnnnnnnnnnnnnnnnnnnnnnnnnnnnnnnnnnnnnnnnnnnnnnnnnnnnnnnnnnnnnnnnnnnnnnnnnnnnnnnnnnnnnnnnnnnnnnnnnnnnnnnnnnnnnnnnnnnnnnnnnnnnnnnnnnnnnnnnnnnnnnnnnnnnnnnnnnnnnnnnnnnnnnnnnnnnnnnnnnnnnnnnnnnnnnnnnnnnnnnnnnnnnnnnnnnnnnnnnnnnnnnnnnnnnnnnnnnnnnnnnnnnnnnnnnnnnnnnnnnnnnnnnnnnnnnnnnnnnnnnnnnnnnnnnnnnnnnnnnnnnnnnnnnnnnnnnnnnnnnnnnnnnnnnnnnnnnnnnnnnnnnnnnnnnnnnnnnnnnnnnnnnnnnnnnnnnnnnnnnnnnnnnnnnnnnnnnnnnnnnnnnnnnnnnnnnnnnnnnnnnnnnnnnnnnnnnnnnnnnnnnnnnnnnnnnnnnnnnnnnnnnnnnnnnnnnnnnnnnnnnnnnnnnnnnnnnnnnnnnnnnnnnnnnnnnnnnnnnnnnnnnnnnnatataccttggatggccactgtgtggcctgtcacaggagccagctgagcaaaccatggggtatcacagccctgccatctggccagtttgtagtaaccgatgtggaaggtggaaagctttggtgtttcacagttgatcgaggatcaggggtggtcaaatacagctgcctgtgcagtgctgtgcggcccaaattcgtcacctgtgatgctgagggcaccgtatacttcacccagggcttaggcctcaatctggagaatcgacagaacgagcaccacctcgaaggtggctcttccattggttctgtaggtcccgatgggcagctgggtcgccagattagccacctcttctcggagaatgaggatttccgcagcattgctggcatgtgtgcggatgctcgtggtgatctcattgtggctgacagtagtcgcaaggaaattctccattttcctaagggtgggggctatagtgtccttattcgagagggacttacttgtccggtgggcatagccctcactcctaaggggcagctgctggtcttggactgttgggatcattgcatcaagatctacagctaccatctgagaagatactccaccccataggggatgagaaatatcattttcttctgctcccaagccagcttcccttcccatagttcttggttgttagtggcacatatagaatagactcggcatatgtcctgattccagctgggtagttctagaactttagaagctccatctttttatgttttttatttgttatttccccctccccacttcccaccctaaatttagagctttaaaagatgcactgcccaaataggacacgcaatggtgttagctgaagtttgattagcaattaggcacttccaaggcttagagagccactttagccctttgtgccatgtttgaaatgtgcccttgtattaaatccttgattttttcccgtttggctctgatgcccttgatccattgtttccttcctattacaatgtgcttcatctgtgacactttctcttcaactctgattggattcactgtgcatgcttcagtgggatatgctccacctttcagtgacatttcagacatattcctgtaacattatgtctcagtctgatcgtctttaccagtgtgaaagctcattcatttagtgctaaaaagaggggatacacaggccctttaggaagcagtacctctcgcctggaggatctgtgccatcttggattgagaactgcagatgtgacagaatggattgaccctagttggttggtattgacgacttcagcctggaaattgcttgccttttaaagaagtataatatggattggaattatgccaaagcataggaagctaggaataagcaaacaaacaaatgctgatatagtcagcaaacttggatagtctctagggctcatcgtttttcatactacctctctcttctggcctgtgtctaaggaattgtacagcataggccagggccaacaaaatggagaggtggacacattttcatgttcattactaaaacaaacagcaaaactgttggtttgttattctgtattttcctcaagtgagtacatactatttggtttcaggatttctttccatttctctatcaagcattaaataattgagaactgtttcttc

SEQ ID NO: 29706 - DNA, 89 bp, Macaca Mulatta
tacaccactacaaccactaccatagttgctccagcaaaagagtagctagcttggatataactaatacaggaaataagaagagtctctat

SEQ ID NO: 29707 - DNA, 1250 bp, Macaca Mulatta
  misc_feature (1)...(1250): n = A,T,C or G
gagcagagagcgtcaatccggttcaagaccaccctcatgaacacactcatggacgtccttcgccacaggccaggatgggtggaagtgaaggagaaggagagtgggatttttactggtgcgacgtcagctggctccgggagaacttcgaccacacctacatggacgaacacgtgcggatcagtcacttccggaaccactannnnnnnnnnnnnnnnnnnnnnnnnnnnnnnnnnnnnnnnnnnnnnnnnnnnnnnnnnnnnnnnnnnnnnnnnnnnnnnnnnnnnnnnnnnnnnnnnnnnnnnnnnnnnnnnnnnnnnnnnnnnnnnnnnnnnnnnnnnnnnnnnnnnnnnnnnnnnnnnnnnnnnnnnnnnnnnnnnnnnnnnnnnnnnnnnnnnnnnnnnnnnnnnnnnnnnnnnnnnnnnnnnnnnnnnnnnnnnnnnnnnnnnnnnnnnnnnnnnnnnnnnnnnnnnnnnnnnnnnnnnnnnnnnnnnnnnnnnnnnnnnnnnnnnnnnnnnnnnnnnnnnnnnnnnnnnnnnnnnnnnnnnnnnnnnnnnnnnnnnnnnnnnnnnnnnnnnnnnnnnnnnnnnnnnnnnnnnnnnnnnnnnnnnnnnnnnnnnnnnnnnnnnnnnnnnnnnnnnnnnnnnnnnnnnnnnnnnnnnnnnnnnnnnnnnnnnnnnnnnnnnnnnnnnnnnnnnnnnnnnnnnnnnnnnnnnnnnnnnnnnnnnnnnnnnnnnnnnnnnnnnnnnnnnnnntgttcacctcaccaacgtcgccgtgcaaaaaacatctcccgactaccacccaaagaaggnagggctgcaagtggatgctccagtgcttcctgcagtagctggtgtccaannnnnnnnnnnnnnnnnnnnnnnnnnnnnnnnnnnnnnnnnnnnnnnnnnnnnnnnnnnnnnnnnnnnnnnnnnnnnnnnnnnnnnnnnnnnnnnnnnnnnnnnnnnnnnnnnnnnnnnnnnnnnnnnnnnnnnnnnnnnnnnnnnnnnnnnnnnnnnnnnnnnnnnnnnnnnnnnnnnnnnnnnnnnnnnnnnnnnnnnnnnnnnnnnnnnnnnnnnnnnnnnnnnnnnnnnnnnnnnnnnnnnnnnnnnnnnnnnnnnnnaggctcacgggaagggagaagcgagtcgggggctttgacctcatgtggaatgatggccctgttagcagagaggagggggttcctgacctgtcgggaatgggaaactttgtgagcaacacacacctcg

SEQ ID NO: 29708 - DNA, 162 bp, Macaca Mulatta
accgccaagatcctgtagcttgctggcaacccggcgctcgacaacaagaagacccgcatcatcctgcgccacttgcatctggccattcgcaacgacgaggagcttaacaagctgctgggcaaagtcaccatctcccagggacgtgtcctgcccaacatccag

SEQ ID NO: 29709 - DNA, 345 bp, Macaca Mulatta
aacctaagttacacagtggttgctttcaccaaacagaccatgggcttcttggaagcatctctgaagctgtatttcccagagctgcacatggtacttttggagagcctggtggaaatcattttggttgcctttcagcatgtggattatagtcttcgatgtgagcaggatccagagaagaaagcttttatcagacagaatgcatcctttttatatgaaacagtcctccctgtggtggagaaaaggtttgaagaaggtgtggggaaacctgccaagcaactccaagatctgaggaatgcatctagacttattcgtgtgaatcctgaaagtacaacatcagtggtctaa

SEQ ID NO: 29710 - DNA, 165 bp, Macaca Mulatta
  misc_feature (1)...(165): n = A,T,C or G
gggctggagacgacgaggatgaggattaagcccacctttccctcctgggctgctggattgtctagttttcctgccaaataaacaggatcagcgcttttnnnnnnnnnnnnnnnnnnnnnnnnnnnnnnnnnnnnnnnnnnnnnnnnnnnnnnnnnnnnncttgtc

SEQ ID NO: 29711 - DNA, 137 bp, Macaca Mulatta
  misc_feature (1)...(137): n = A,T,C or G
ngctgcagatgacggaggccgccctggctctgtcagagcagaaggcccaggacctgggggagctcctggccacagcggagcaggagcagctgagcctatcgcagaggcaggccaaggagctcaagctggagcagcag

SEQ ID NO: 29712 - DNA, 81 bp, Macaca Mulatta
caggcctatcatcctggatccggctgacccgacaggcaacctgggccacagtgcccgctgggacctgctggccaaggaagc

SEQ ID NO: 29713 - DNA, 2044 bp, Macaca Mulatta
  misc_feature (1)...(2044): n = A,T,C or G
caggtgcccaaagctgaggaaacttgtcctgaacaagaaccgcctggtgaccctcccggaagccatccatttcctgacggagatcgaggtcnnnnnnnnnnnnnnnnnnnnnnnnnnnnnnnnnnnnnnnnnnnnnnnnnnnnnnnnnnnnnnnnnnnnnnnnnnnnnnnnnnnnnnnnnnnnnnnnnnnnnnnnnnnnnnnnnnnnnnnnnnnnnnnnnnnnnnnnnnnnnnnnnnnnnnnnnnnnnnnnnnnnnnnnnnnnnnnnnnnnnnnnnnnnnnnnnnnnnnnnnnnnnnnnnnnnnnnnnnnnnnnnnnnnnnnnnnnnnnnnnnnnnnnnnnnnnnnnnnnnnnnnnnnnnnnnnnnnnnnnnnnnnnnnnnnnnnnnnnnnnnnnnnnnnnnnnnnnnnnnnnnnnnnnnnnnnnnnnnnnnnnnnnnnnnnnnnnnnnnnnnnnnnnnnnnnnnnnnnnnnnnnnnnnnnnnnnnnnnnnnnnnnnnnnnnnnnnnnnnnnnnnnnnnnnnnnnnnnnnnnnnnnnnnnnnnnnnnnnnnnnnnnnnnnnnnnnnnnnnnnnnnnnnnnnnnnagacctttctggatgacagcggctccctcaactgggagatctactactggattggcggggaggccacactcgacaagaaagcttgctctgccatccacgctgtcaacttgcgcaactacctgggtgccgagtgccgcactgtccgggaggagatgggcgatgagagcgaggagttcctgcaggtnnnnnnnnnnnnnnnnnnnnnnnnnnnnnnnnnnnnnnnnnnnnnnnnnnnnnnnnnnnnnnnnnnnnnnnnnnnnnnnnnnnnnnnnnnnnnnnnnnnnnnnnnnnnnnnnnnnnnnnnnnnnnnnnnnnnnnnnnnnnnnnnnnnnnnnnnnnnnnnnnnnnnnnnnnnnnnnnnnnnnnnnnnnnnnnnnnnnnnnnnnnnnnnnnnnnnnnnnnnnnnnnnnnnnnnnnnnnnnnnnnnnnnnnnnnnnnnnnnnnnnnnnnnnnnnnnnnnnnnnnnnnnnnnnnnnnnnnnnnnnnnnnnnnnnnnnnnnnnnnnnnnnnnnnnnnnnnnnnnnnnnnnnnnnnnnnnnnnnnnnnnnnnnnnnnnnnnnnnnnnnnnnnnnnnnnnnnnnnnnnnnnnnnnnggtgggcctgggcttgggctacctggagctgccgcagatcaactacaagctctccgtggaacataagcagcgtcccaaggtggagctgatgccaagaatgcggctgngctgcagagtctgctggacacacgctgcgtgtacattctggactgttggtctgacgtgttcatctggctcggccgcaagtccccgcgcctggtgcgcgctgctgccctcaagctgggtcaggagctgtgcgggatgctgcaccggccacgccatgccacggtcagccgcagcctnnnnnnnnnnnnnnnnnnnnnnnnnnnnnnnnnnnnnnnnnnnnnnnnnnnnnnnnnnnnnnnnnnnnnnnnnnnnnnnnnnnnnnnnnnnnnnnnnnnnnnnnnnnnnnnnnnnnnnnnnnnnnnnnnnnnnnnnnnnnnnnnnnnnnnnnnnnnnnnnnnnnnnnnnnnnnnnnnnnnnnnnnnnnnnnnnnnnnnnnnnnnnnnnnnnnnnnnnnnnnnnnnnnnnnnnnnnnnnnnnnnnnnnnnnnnnnnnnnnnnnnnnnnnnnnnnnnnnnnnnnnnnnnnnnnnnnnnnnnnnnnnnnnnnnnnnnnnnnnnnnnnnnnnnnnnnnnnnnnnnnnnngcaggtactgggtgcccgtggagtacgaggaggaggaaaaaaaggaagacgaggaggagaaggccgagggcaaagaaggcgaggaggcaacagctgaggcagaggagaagcagccagaggaggacttccagtgcattgtgtacttctggcagggccgcgaagcctccaacatgggctggctcaccttcaccttcagcctgcagaagaagttcgagagcctcttccctgggaagctggaggt

SEQ ID NO: 29714 - DNA, 591 bp, Macaca Mulatta
  misc_feature (1)...(591): n = A,T,C or G
ttgcctttatttatgcaaaccacctcagaatccagtttaccctgttgctgtccagcttctcccttgggaaaaagtctctcctgtttctctttcctccttccgcctctccccgtccaccacctcacgcctttctgttccttgacctcaccttactcccctcaggaccccaccccaccctctttgaaaagacaaagctctgcctacatagaagactttttttattttaaccaaagttactgttgtttacagtgagnnnnnnnnnnnnnnnnnnnnnnnnnnnngctttcccagtccttgcatcaacgggacgccacatttcataactgtttttaatggnnnnnnnnnnnnnnnnnnnnnnnnnnnnnnnncacaattctgaaggacaaaaaaggtgactgctgaactgtgtgtggtttattgttgtacattcacaatcttgcaggagccaagaagttcgcagttgtgaacagaccctgttcactggagaggactgtgcagtacagtgtagaccctttcatgtactgtactgtacacctgatactgtaaacatactgtaataataatgtctcacatggaaacgagaaaacgctg

SEQ ID NO: 29715 - DNA, 590 bp, Macaca Mulatta
gaacagtgctcggcatggcagggattccagggctcctcttccttctcttccttctgctctgtgctgttggacaagtgagcccttacagtgccccctggaaacccacttggcctgcataccgcctccctgtcatcttgccccagtctaccctcagtttagccaagccagactttggagccgaagccaaattggaagtatcttcttcatgtggaccccagtgtcataagggaactccactgcccacttatgaagaggccaagcaatatctgtcttatgaaacgctctatgccaatggcagtcgcacggagacacaggtgggcatctacatcctcagcagtagtggaggtggggcccaacaccgagactcagggtcttcaggaaagtctcggaggaagcggcagatttatggctatgacagcaggttcagcatttttgggaaggacttcctgctcaactaccctttctcaacatcagtgaagttatccacaggctgcaccggcaccctggtggcagagaagcatgtcctcacagctgcccactgcatacacgatggaaaaacctatgtgaaaggaacccagaagcttcgagtg

SEQ ID NO: 29716 - DNA, 708 bp, Macaca Mulatta
  misc_feature (1)...(708): n = A,T,C or G
ccagcaggccangnggtagtagcccgctcagctcagcaaggttctcaactgcctcgagtacccaccagaccaagatggcccgcggcagagccgaggacgagccgaggacgctgggtcctcctctctgggacacaggggtacgcaagaaaattgggccgcatggtttggtgaaggtttgcaacggcggggactcacctccattctcttccttcactcttcccccacaccctacaataggtcggtcccacaaaagacttcagttatcatcacaaacatgagccaaaagcacatacctaccccatcccccatatacacacacacatgcacacaacacacacacacgcacagaggtgaacagaaactgaaacattttgtccataacttaacgggacgtggccacgctgggtttgcgttccaacctgcaaaacacaaatacattttttaaaatcatgaaaatttnnnnnnnnnnnnnnnnnnnnncattgataattctaactcagactttaacaatggcagaagtttactatgcgcaaatactgtgaaatgcccgccagtgttacagctttctgttacagcagataaatgccatgttgggcaactatgtcgtagatatctgctcctcctctcttttaatgaaataacgtgaccgtttnnnnnnnnnnnnnnnnnnnnnnnnnnnnnnnnnnnnnaattcgcgctatagtgagt

SEQ ID NO: 29717 - DNA, 763 bp, Macaca Mulatta
caacccagcttcttccctccctccttcctctctcccaactggccacttaggaagagtaaaaatggcaattagaacagtagcagctattttcactcaatagtcaaagaattggataccagcagagtggctgcctccatccgtatgctgatacataactactttgtcttgtatttgtagtctcaaaaatcttcccgaagtatagtagaatcagagaaaatcactctaatcattgaaaagcgccctgtgctgagtaaagcagccagtcttctcttgtcacagtaaaaggctgggagtaaaatttcccataaacacaggggaaacctacatttacccacatgccaaggaaaaaggcaaggaagacccacgtgtagccacagcagagtctatgcagagggcctgcaaatgtctagggtgtgcgtgaatgcctggaagggcggagtttccaagataacagctattgtggtttttttttcacacttcagaagtgaatcctaaggactagactccactcatggcattcctttttcatacactgatctcaagtacaatcacataattttgaaaatccatgaggtcttccctaaataaaattataaggataggtttctatttccttctgattacctagatacctctgtcttttggaaacccccaaaagaccagtagacgaatcaggaaggtcctaggagtgattcctccaatggcgggaatcataaaggactcaaagacctgcaaattcatggcgaatgatgtcatgatgaaa

SEQ ID NO: 29718 - DNA, 2238 bp, Macaca Mulatta
  misc_feature (1)...(2238): n = A,T,C or G
atttctagaagtggatgaatacccagaacatattaaaaacttggtgcagaaagagagagagttggaagaacaagaaaagagacaacgagaaattgagcgcaatacatgcaannnnnnnnnnnnnnnnnnnnnnnnnnnnnnnnnnnnnnnnnnnnnnnnnnnnnnnnnnnnnnnnnnnnnnnnnnnnnnnnnnnnnnnnnnnnnnnnnnnnnnnnnnnnnnnnnnnnnnnnnnnnnnnnnnnnnnnnnnnnnnnnnnnnnnnnnnnnnnnnnnnnnnnnnnnnnnnnnnnnnnnnnnnnnnnnnnnnnnnnnnnnnnnnnnnnnnnnnnnnnnnnnnnnnnnnnnnnnnnnnnnnnnnnnnnnnnnnnnnnnnnnnnnnnnnnnnnnnnnnnnnnnnnnnnnnnnnnnnnnnnnnnnnnnnnnnnnnnnnnnnnnnnnnnnnnnnnnnnnnnnnnnnnnnnnnnnnnnnnnnnnnnnnnnnnnnnnnnnnnnnnnnnnnnnnnnnnnnnnnnnnnnnnnnnnnnnnnnnnnnnnnnnnnnnnnnnnnnnnnnnnnnnnnnnnnnnnnnnnnnnnnnnnnnnnnnnnnnnnnnnnnnnnnnnnnnnnnnnnnnnnnnnnnnnnnnnnnnnnnnnnnnnnnnnnnnnnnnnnnnnnnnnnnnnnnnnnnnnnnnnnnnnnnnnnnnnnnnnnnnnnnnnnnnnnnnnnnnnnnnnnnnnnnnnnnnnnnnnnnnnnnnnnnnnnnnnnnnnnnnnnnnnnnnnnnnnnnnnnnnnnnnnnnnnnnnnnnnnnnnnnnnnnnnnnnnnnnnnnnnnnnnnnnnnnnnnnnnnnnnnnnnnnnnnnnnnnnnnnnnnnnnnnnnnnnnnnnnnnnnnnnnnnnnnnnnnnnnnnnnnnnnnnnnnnnnnnnnnnnnnnnnnnnnnnnnnnnnnnnnnnnnnnnnnnnnnnnnnnnnnnnnnnnnnnnnnnnnnnnnnnnnnnnnnnnnnnnnnnnnnnnnnnnnnnnnnnnnnnnnnnnnnnnnnnnnnnnnnnnnnnnnnnnnnnnnnnnnnnnnnnnnnnnnnnnnnnnnnnnnnnnnnnnnnnnnnnnnnnnnnnnnnnnnnnnnnnnnnnnnnnnnnnnnnnnnnnnnnnnnnnnnnnnnnnnnnnnnnnnnnnnnnnnnnnnnnnnnnnnnnnnnnnnnnnnnnnnnnnnnnnnnnnnnnnnnnnnnnnnnnnnnnnnnnnnnnnnnnnnnnnnnnnnnnnnnnnnnnnnnnnnnnnnnnnnnnnnnnnnnnnnnnnnnnnnnnnnnnnnnnnnnnnnnnnnnnnnnnnnnnnnnnnnnnnnnnnnnnnnnnnnnnnnnnnnnnnnnnnnnnnnnnnnnnnnnnnnnnnnnnnnnnnnnnnnnnnnnnnnnnnnnnnnnnnnnnnnnnnnnnnnnnnnnnnnnnnnnnnnnnnnnnnnnnnnnnnnnnnnnnnnnnnnnnnnnnnnnnnnnnnnnnnnnnnnnnnnnnnnnnnnnnnnnnnnnnnnnnnnnnnnnnnnnnnnnnnnnnnnnnnnnnnnnnnnnnnnnnnnnnnnnnnnnnnnnnnnnnnnnnnnnnnnnnnnnnnnnnnnnnnnnnnnnnnnnnnnnnnnnnnnnnnnnnnnnnnnnnnnnnnnnnnnnnnnnnnnnnnnnnnnnnnnnnnnnnnnnnnnnnnnnnnnnnnnnnnnnnnnnngccatgcaagtttctgctagatgctgtgtttgctaaaggaatgactgtacggcaatcaaaagaggaattaattcctcagctcagggagcaatgtggtttagagctcagtattgacaggtnnnnnnnnnnnnnnnnnnnnggaagaatcctggcactgtctttttggattatcatatttatgaagaagatattaatatttccagcaactgggaggttttccttgaagttcttgatggnnnnnnnnnnnnnnnnnnnnnnnnnnnnnnnnnnnnnnnnnnnnnnnnnnnnnnnnnnnnnnnnnnnnnnnnnnnnnnnnnnnnnnnnnnnnnnnnnnnnnnnnnnnnnnnnnnnnnnnnnnnnnnnnnnnnnnnnnnnnnnnnnnnnnnnnnnnnnnnnnnnnnnnnnnnnnnnnagggtagaggaacatttccctgtgatatttctgtccttgatattcatcaagatttagactggaatcccaaagtttctaccctgaatgtctggcctctttatatctgtgatgatggtgcagtcatattttatag

SEQ ID NO: 29719 - DNA, 334 bp, Macaca Mulatta
ggactcaggacacccctgcacggcggctgaccccgacagctgcttcacgcctgtgtctccgcagcacttcatcgacctcttcaagttttaagagttgcccctgccatccctgttggagattgtgcatcatgctgtctgtgcagggctcatagtgagtgttctgtgaggtgggtggaggctcctgggaggccccgcttccagaaagcctgggaagaactgcccttctgcacagggggagtgcatggttgcattttcatcattgaaggtcagaggccaaggaaatcatttctactttaaactcttcttctaagcatattaaaatgtgaaattttgc

SEQ ID NO: 29720 - DNA, 243 bp, Macaca Mulatta
  misc_feature (1)...(243): n = A,T,C or G
atgggggcagccatctcccagggggccctcatcgccatcgtctgcaacggtctcgtaggcttcttgctgctgctgctctgggtcatcctctgctgggcctgccattctcgctctgctgacgttgactctctctctgaatcnnccagcctgggggccagaactttttagtctgcctgcttggagctggacccagtggcctagagtctagcaagcctggctccaataggagctcagtggccctaa

SEQ ID NO: 29721 - DNA, 707 bp, Macaca Mulatta
  misc_feature (1)...(707): n = A,T,C or G
ggggtgcgtgtcgaaggtcacggcgcgctcacaatggagctctccgagtctgtgcagaaaggcttccagatgctggcggatcccggctccttcgactccaacgccttcacgcttctcctccgggcggctttccagagcctgctggacgcccaggcggacgaggccgtgttagatcatccagacttgaaacatatcgacccagtggttttaaaacattgtcatgcagcatctgcaacttacatactagaggcaggaaagcaccgagctgacaagtcaactctaagcacttatctagaagactgtaaatttgacagagagcgaatagaactgttttgcacggaatatcagaataataagaattccctagaaatcctactgggaagcataggtagatctctccctcatataacggatgtttcttggcgcttggaatatcagataaagaccaatcaacttcataagatgcacagacctgcatatttggtgaccttaagtatacagaacactgattccccatcctacccagagattagttttagttgcagcatggaacaattacaggacttggtggggaaacttaaagatgctcaaacctggaagacactcttgaactgggagtacatcgcgatgaagaacaaacctgcgcctgctgatgtacctcagatggcatcttgccaactagtgtnngnaagctnctgcatctganc

SEQ ID NO: 29722 - DNA, 960 bp, Macaca Mulatta
  misc_feature (1)...(960): n = A,T,C or G
nggcgtggcattcagcaacggggagcgcgccaagcagctccggcgcttctccatcgccaccttgcgggacttcggggtgggcaagcgcggcatcgaggagcgcatccaggaggaggcggatttcctcatcgaggccctccggggcacgcnnnnnnnnnnnnnnnnnnnnnnnnnnnnnnnnnnnnnnnnnnnnnnnnnnnnnnnnnnnnnnnnnnnnnnnnnnnnnnnnnnnnnnnnnnnnnnnnnnnnnnnnnnnnnnnnnnnnnnnnnnnnnnnnnnnnnnnnnnnnnnnnnnnnnnnnnnnnnnnnagctctatgagatgttctcttcagtgatgaaacacctgccaggaccacagcaacaggcctttaaggagttgcaagggctggaggacttcatagccaagaaggtggagcacaaccagcgcacgctggatcccaactccccacgggacttcatcgactcctttctcatccgcatgcaggaggnnnnnnnnnnnnnnnnnnnnnnnnnnnnnnnnnnnnnnnnnnnnnnnnnnnnnnnnnnnnnnnnnnnnnnnnnnnnnnnnnnnnnnnnnnnnnnnnnnnnnnnnnnnnnnnnnnnnnnnnnnnnnnnnnnnnnnnnnnnnnnnnnnnnnnnnnnnnnnnnnnnnnnnnnnnnnnnnnnnnnnnnnnnnnnnnnnnnnnnnnnnnnnnnnnnnnnnnnnnnnnnnnnnnnnnnnnnnnnnnnnnnnnnnnnnnnnnnnnnnnnnnnnnnnnnnnnnnnnnnnnnnnnnnnnnnnnnnnnnnnnnnnnnnnnnnnnnnnnnnnnnnnnnagggcaccgaagtgttccctatgctgggctccgtgctgaaagaccccaagttcttctccaacccccaggacttcaatccccagcacttcctggatgagaaggggcagtttaagaagagtgatgcttttgtgcccttttccatcg

SEQ ID NO: 29723 - DNA, 683 bp, Macaca Mulatta
cagtcctggcctgggccgcccccgctcccgtcagtgctcactgaaagtctgtcctaactgcctgttcgaatgaatgttctttttctcatttttaattcttggaaaagactcgtgtcctcatttcttcactcaattaaaaaaagagaatattctccagtcccctcccactttgcttctcgtgtgcattgtgaccaaccccacttccccagaatgtaacggggccagagggaaacttctcacaaacttcgtagagcctcctcaggggaagctaggaagaagacatcaaatttttttaagtcatgaccaaacaggcttattggggacatttcatggggtgagctttgaagtgctagtggtccagaggggttgcaaatacatgacttggagcacctgtgtcttacgatggacagtgataaaggtgaacacacagagacagactgttctcttaagaatgtgaaaaacctaatctggaagaggagctatagaaacactatctgactatctttgtcttttggggcagtggctgttgccataatcacaagcctgtctgtcttcgagaagggacagtggagtcacccaggtgctaccacatggcaggcacggtgggcaccgatccacagtgggccccgccttccccagcttgcctccctgcccatgctggcctggccttgcctgctggcaca

SEQ ID NO: 29724 - DNA, 638 bp, Macaca Mulatta
  misc_feature (1)...(638): n = A,T,C or G
attaaaagacgcctcagagaagctcaaacagcttgagatggagaacagtcctttgctgtcccctcgatccaacatcgatgttaacataaacagccaggnnaggaagaagtggtgaagttgactgaaaaatgccttaataatgtcattgagaacccaggactgaatgccatgagagttcctcctgacttcaagagtaacattttgaaggctcaagtagaagcagtgcataaggnngttacgaaagaagatagcttacttatgtcataaaaatgccaatgttcaggatgctgccacaaacagnnnnnnnnnnnnnnnnnnnnnnnnnnnnnnnnnnnnnnnnnnnnnnnnnnnnnnnnnnnnnnnnnnnnnnnnnnnnnnnnnnnnnnnnnnnnnnnnnnnnnnnnnnnnnnnnnnnnnnnnnnnnnnnnnnnnnnnnnnnnnnnnnnnnnnnnnnnnnnnnnnnnnnnggtgtcttccacatccatgatcacaccccggtggattgttccgnnnggtgccatgtctaatggacttgcgggatgtgaaatgcttttggcagggaaggagagagcacggtaataaagatggaatctcactgatctctcccccagcgccattcttggtagatgctgtgacca

SEQ ID NO: 29725 - DNA, 1305 bp, Macaca Mulatta
  misc_feature (1)...(1305): n = A,T,C or G
gatttctagtttatgataaataggactttaaaaaccagggacgggagggcgagtgttcaggttctttagctatgcagctggagcactgcctttctccttctatcatgctctccaagaaatttctcaatgtgagcagcagctacccacattcaggcggatccgagcttgtcttgcacgatcatcccattatctcgaccactgacaacctggagagaagttcacctttgaaaaaaattaccagggggatgacgaatcagtcagatacagacaattttcctgactccaaggactcaccaggggacgtccagagaagtaaactctctcctgtcttggacggggtctctgagcttcgtcacagtttcgatggctctgctgcagatcgctacctcctctctcagtccagccagccacagtctgcggccactgctcccagtgccatgttcccgtaccccggccagcacggaccggcgcaccccgccttctccatcggcagccccagccgctacatggcccaccacccggtcatcaccaacggagcctacaacagcctcctgtccaactcctcgccgcagggataccccacggccggctacccctacccacagcagtacggccactcctaccaaggagctccgttctaccagttctcctccacccagccggggctggtgcccggcaaagcacaggtgtacctgtgcaacaggcctctttggctgaaatttcaccggcaccaaacggagatgatcatcaccaaacagggaaggnnggcgcatgtttccttttttaagttttaacatttctggtctcgatcccacggctcattacaatatttttgtggatgtgattttggcggatcccaatcactggaggtttcaaggaggcaaatgggttccttgcggcaaagcggacaccaatgtgcaaggcaagtccttccaattaacacattttcttgacacttatttaggnnnnnnnnnnnnnnnnnnnnnnnnnnnnnnnnnnnnnnnnnnnnnnnnnnnnnnnnnnnnnnnnnnnnnnnnnnnnnnnnnnnnnnnnnnnnnnnnnnnnnnnnnnnnnnnnnnnnnnnnnnnnnnnnnnnnnnnnnnnnnnnnnnnnnnnnnnnnnnnnnnnnnnnnnnnnnnnnnnnnnnnnnnnnnnnnnnnnnnnnnnnnnnnnnnnnnnnnnnnnnnnnnnnnnnnnnnnnnnnnnnnnnnnnnnnnnnnnnnnnnnnnnnnnnnnnnnnnnnnnnnnnnncaactgaaaatagatcacaaccccttgcaaaaggaaaggggataattatgacac

SEQ ID NO: 29726 - DNA, 911 bp, Macaca Mulatta
  misc_feature (1)...(911): n = A,T,C or G
gattttgagtaaccaagaggagtggtttaaggcggagcttgggagccaggaaggatatgtgcccaagaatttcatagacatccagtttcccnnnnnnnnnnnnnnnnnnnnnnnnnnnnnnnnnnnnnnnnnnnnnnnnnnnnnnnnnnnnnnnnnnnnnnnnnnnnnnnnnnnnnnnnnnnnnnnnnnnnnnnnnnnnnnnnnnnnnnnnnnnnnnnnnnnnnnnnnnnnnnnnnnnnnnnnnnnnnnnnnnnnnnnnnnnnnnnnnnnnnnnnnnnnnnnnnnnnnnnnnnnnnnnnnnnnnnnnnnnnnnnnnnnnnnnnnnnnnnnnnnnnnnnnnnnnnnnnnnnnnnnnnnnnnnnnnnnnnnnnnnnnnnncagggtcaccggggcaacagcctggaccggaggtcccagggaggcccacacctcagtggggctgtgggagaagaaatccggccttcgatgaaccggaagctgtcggatcaccccccagcccttcccctgcagcagcaccagcaccagctacagcctccgcagtacgcctttttgccccagcagctgcagcagcccccacagcagcggtatctgcagcaccaccatttccaccaggnnnnnnnnnnnnnnnnnnnnnnnnnnnnnnnnnnnnnnnnnnnnnnnnnnnnnnnnnnnnnnnnnnnnnnnnnnnnnnnnnnnnnnnnnnnnnnnnnnnnnnnnnnnnnnnnnnnnnnnnnngcgagtgcggtgggcccgggcgctgtacgactttgaggccctggaggatgacgagctgggtttccacagcggggaggtggtggaagtcctggatagctccaaagcatcctggtggaccggccgcctgcacaacaagctggactgttccctgccaactacgggcacccatgacccga

SEQ ID NO: 29727 - DNA, 823 bp, Macaca Mulatta
  misc_feature (1)...(823): n = A,T,C or G
ggaaggtcgaaacattttctgaatcaagaatctttaatgagctgaaaactaaaatgcttaatgtaaaagaatataaggagaaactcttgagtaccttgggcaagtttctagaagaccattttcctctgcctgatagaagtgnnnnnnnnnnnnnnnnnnnnnttcaagaatcaactgtacagctgataacactgcatgaaatgttagagattcttataaatagattatttgatgttccacatgatccatatgtcaaaattagtgattccttttggccaccttatgttgagctgctgctgcgtaatggaattgccttgagacatccagaagatccaactcgaataagattagaagctttccatcagtaaaaggatgttttctttttttcacacagtaaaaaaaatcttatcattcaaggatattgggaaccacaggactaatttggaataaaaaacatttaatttgccaaattaatggccacataggtcccatccttccctttttatccgcctaaaatgggaatgggggctgccccacccaatttatttccatttttttaaaaagggaaccctttttctttcaaacacaagggccttttggggggttttttaaaacccaatannnnnnnnnnnnnnnnnnnnnnnnnnnnnnnnnnnnnnnnnnntcgggggcaaataaaaacannnnnnnnnnnnnnnnnnnnnnaaaccccccccaatggaaaaattattttttttgtgggaaaaaacaaatccctttggggggggaaatttttatatcaaatatcggcccacaaaggggttttcttcctctaaaaaaaagg

SEQ ID NO: 29728 - DNA, 503 bp, Macaca Mulatta
acaaatcctggtagttccttcaactgttttgcacaacagactgctgattcttctgaagcaaagcaagagctgaaaactgtgtgcataagagattcacagtcaattcttgttaggacacgaggtgggaacactggagttgtaaaagtacagaccaacccagatcaaaattcacccaatactgtaacttcaagttcagttttcacttttgctcctcagctccaggcatttctggtgccaaaatcaacaacttcttcctctgctttttcacctgtagctggaacaactactacatctagtctttcacctttcagccaaacaccggcttctgtttccattccagctagcttggctccatctatggggaaaaatctcaaacttacattaggctaccccactggcagtggtgatttgggccacatgatagataaaacttcacacatgccctcttctcccttgaagtcctctgtttgttctagcactctaataccatcaacaacaagtag

SEQ ID NO: 29729 - DNA, 420 bp, Macaca Mulatta
tcagctacggatattgaatatctagctaaagtgacctttgaagaaagcgcaaaagctttcatgaaggaaaccatcaaattgggaattaagagtcgacccaaaggtctttggggttattatttatatcctgattgtcacaattataatgtttatgccccaaactatactgggtcatgcccagaagaggaagtcttgaggaacaatgagctctcttggctctggaacagcagtgctgctttatatccttctatcggtgtctggaaatcccttggagacagtgaaaacattttgcgcttctcccaatttcgggtacatgaatccatgaggatctccaccatgacatctcatgattatgctctgcctgtatttgtctacacaaggctagggtacagagatgaacctttattttttctttctaag

SEQ ID NO: 29730 - DNA, 279 bp, Macaca Mulatta
caaccttaagtaatctcaacaataaaattttctgatctgtattatatccagtgttgggtttatattttcacccacaaacaactgacactactatcttttactgtatttttaaaaatttatcttgaaaaggtcacccagaagcattctgaaggagatggttctagaatgatagagtatgtagccttaatagttttccctcctagcaaaaagtctgaaacttatctttcttacaaactgttccatttcttctaaggatcacttatttatttatctctttaa

SEQ ID NO: 29731 - DNA, 2197 bp, Macaca Mulatta
  misc_feature (1)...(2197): n = A,T,C or G
ccagatccccgagcctcggtcgcgcgggtcgcccccgccccgacctcttcggctgacgcgctctgcggcnnnnnnnnnnnnnnnnnnnnnnnnnnnnnnnnnnnnnnnnnnnnnnnnnnnnnnnnnnnnnnnnnnnnnnnnnnnnnnnnnnnnnnnnnnnnnnnnnnnnnnnnnnnnnnnnnnnnnnnnnnnnnnnnnnnnnnnnnnnnnnnnnnnnnnnnnnnnnnnnnnnnnnnnnnnnnnnnnnnnnnnnnnnnnnnnnnnnnnnnnnnnnnnnnnnnnnnnnnnnnnnnnnnnnnnnnnnnnnnnnnnnnnnnnnnnnnnnnnnnnnnnnnnnnnnnnnnnnnnnnnnnnnnnnnnnnnnnnnnnnnnnnnnnnnnnnnnnnnnnnnnnnnnnnnnnnnnnnnnnnnnnnnnnnnnnnnnnnnnnnnnnnnnnnnnnnnnnnnnnnnnnnnnnnnnnataccctcatgacgtggtgaaccacctcagctgtgacgaggcccggaaccactacggaggcgtggtcagcctcatccccctcgtgctagacttaatgaaagaatggattgcccactctgagaagttgccacgcaaggtgctgcagcacgtgagtgagccccaggcacgccaggagagcaccaggggagccgcaggtcctgcccaggccataggcacccagcccggggccactaaacacaagtgtagacagctcaccaaagtcagaagcaaacccaggggatgttcaaaaccgccctggatgccttatggggggaaactgtaactcagagcnnnnnnnnnnnnnnnnnnnnnnnnnnnnnnnnnnnnnnnnnnnnnnnnnnnnnnnnnnnnnnnnnnnnnnnnnnnnnnnnnnnnnnnnnnnnnnnnnnnnnnnnnnnnnnnnnnnnnnnnnnnnnnnnnnnnnnnnnnnnnnnnnnnnnnnnnnnnnnnnnnnnngagacggagtctcgctctgttacccaggctggagtgcagcggtgcgatctcggctcactgctgcaagctctgcctcccaggttcaagccattctcctgcctcagcctcccaagtagctggggctacaggcgccctccaccacacctgcctaatttttttgtatttttggtagagacggggtttcagcgtgttagccaggtggtctcaatttcctgacctcgtgatccgcccacctctgcctcccaaagtgctgggattacaggtgtgagccaccgcacccggcnnnnnnnnnnnnnnnnnnnnnnnnnnnnnnnnnnnnnnnnnnnnnnnnnnnnnnnnnnnnnnnnnnnnnnnnnnnnnnnnnnnnnnnnnnnnnnnnnnnnnnnnnnnnnnnnnnnnnnnnnnnnnnnnnnnnnnnnnnnnnnnnnnnnnnnnnnnnnnnnnnnnnnnnnnnnnnnnnnnnnnnnnnnnnnnnnnnnnnnnnnnnnnnnnnnnnnnnnnnnnnnnnnnnnnnnnnnnnnnnnnnnnnnnnnnnntgtaggcaaggcacatgctgtttgcgagccagggatgctcccctccaggatggagtgggggtgagcatgtggaacgcagtgtgtttatattttattgttattttttgaaatggagtctcactgtgcctcccaggctggcatgcagtggcatgatctcggctcactgcaacctccacctccaggttcaagcgattctcctgcctcagcctcctgagtagctggaattacaggcacccaccaccccacctggctaatttnnnnnnnnnnnnnnttttagtagagacggggcttcaccatgtcggccaggctggtcttgaactcctgacctcaactgatccacccacctcggcctctcgaagtgctgggattacaggtgtgagccaccgcatctggccagaactcagtgtgtttagttctctggaccacagccaaaggggaataaacccaccttcccttctcctttacttgggagagggagaccatgaccgaagccagaattctgattttacggctcctgagcaagggcagtgacctggttttcacagcatagttgaaccccaaacattgtaaaatgtgtccctggcttctgagcttgcccaaagtaatgtctgactgttggtttttcccttcacaggggacgacttagcttctgtattgttgcttcctcagggggagacagtcgagaataaaaagtattctaccacc

SEQ ID NO: 29732 - DNA, 188 bp, Macaca Mulatta
taacgtaccataggttttccatacctcaaaagctgtactctcatggcgactgcatcgaattttaatcacattttatggaaaactattaaactcactcttcataatcactgtttgctgtgtgtcatctgggcactaactcagagtgtccttttactcccttatcagtctgtcacctggacagttcactc

SEQ ID NO: 29733 - DNA, 1238 bp, Macaca Mulatta
  misc_feature (1)...(1238): n = A,T,C or G
gatcctcagaatggcccttggtgctacaggcgcagtgggctccgggcccaggcaccgagagggcactggatgactctccaggtgcaggaccctgctgtctatgactccaggccttcagcacccacccgccgnnnnnnnnnnnnnnnnnnnnnnnnnnnnnnnnnnnnnnnnnnnnnnnnnnnnnnnnnnnnnnnnnnnnnnnnnnnnnnnnnnnnnnnnnnnnnnnnnnnnnnnnnnnnnnnnnnnnnnnnnnnnnnnnnnnnnnnnnnnnnnnnnnnnnnnnnnnnnnnnnnnnnnnnnnnnnnnnnnnnnnnnnnnnnnnnnnnnnnnnnnnnnnnnnnnnnnnnnnnnnnnnnnnnnnnnnnnnnnnnnnnnnnnnnnnnnnnnnnnnnnnnnnnnnnnnnnnnnnnnnnnnnnnnnnnnnnnnnnnnnnnnnnnnnnnnnnnnnnnnnnnnnnnnnnnnnnnnnnnnnnnnnnnnnnnnnnnnnnnnnnnnnnnnnnnnnnnnnnnnnnnnnnnnnnnnnnnnnnnnnnnnnnnnnnnnnnnnnnnnnnnnnnnnnnnnnnnnnnnnnnnnnnnnnnnnnnnnnnnnnnnnnnnnnnnnnnnnnnnnnnnnnnnnnnnnnnnnnnnnnnnnnnnnnnnnnnnnnnnnnnnggaagttctcttctttcttcaagagtttggtcatcgagctggacaaatatctttatggtcctgacaaccaccttgttgagnagtggcatcggacatccacgacccaggagacggacggcttccaggtgaaacggcctggggatctgagtgtgcgctgcacgctgctcctcatgctggactaccagncagcctccccagttcaaactggatccccgcctagcccggctgctggggttgcacacacagagccgctcagccatcgtccaggccctgtggcagtatgtgaagaccnnnnnnnnnnnnnnnnnnnnnnnnnnnnnnnnnnnnnnnnnnnnnnnnnnnnnnnnnnnnnnnnnnnnnnnnnnnnnnnnnnnnnnnnnnnnnnnnnnnnnnnnnnnnnnnnnnnnnnnnnnnnnnnnnnnnnnnnnnnnnnnnnnnnnnnnnnncagcgtggacccttcagaccagaagaagacggcgtgctatgacattgacgtggaagtagaggagccattaaagggacagatgagcagcttcctcctgtccacggccaaccagcaggagatcagtgctctggacagtaa

SEQ ID NO: 29734 - DNA, 104 bp, Macaca Mulatta
gacttcagaaattaccagtataccttgccagtagttcaaggtttggtggttgatatggaagttcggaaaaccagcatcaaaattcccagcaacagatacaatga

SEQ ID NO: 29735 - DNA, 846 bp, Macaca Mulatta
  misc_feature (1)...(846): n = A,T,C or G
atgtaagacaaaagtctaccctgatgaacttccaaacacaagtgtagtcattgtgtttcataatgaagcttggagcactctccttagaactgtttacagtgnnnnnnnnnnnnnnnnnnnnnnnnnnnnnnnnnnnnnnnnnnnnnnnnnnnnnnnnnnnnnnnnnnnnnnnnnnnnnnnnnnnnnnnnnnnnnnnnnnnnnnnnnnnnnnnnnnnnnnnnnnnnnnnnnnnnnnnnnnnnnnnnnnnnnnnnnnnnnnnnnnnnnnnnnnnnnnnnnnnnnnnnnnnnnnnnnnnnnnnnnnnnnnnnnnnnnnnnnnnnnnnnnnnnnnnnnnnnnnnnnnnnnnnnnnnnnnnnnnnnnnnnnnnnnnnnnnnnnnnnnnnnnnnnnnnnnnnnnnnnnnnnnnnnnnnnnnnnnnnnnnnnnnnnnnnnnnnnnnnnnnnnnnnnnnnnnnnnnnnnnnnnnnnnnnnnnnnnnnnnnnnnnnnnnnnnnnnnnnnnnnnnnnnnnnnnnnnnnnnnnnnnnnnnnnnnnnnnnnnnnnnnnnnnnnnnnnnnnnnnnnnnnnnnnnnnnnnnnnnnnnnnnnnnnnnnnnnnnnnnnnnnnnnnnnnnnnnnnnnnnnnnnnnnnnnnnnnnnnnnnnnnnnnnnnnnnnnnnnnnnnatttggcaatgtggaggctccttggagattgttacttgctcccatgttggtcatgtttttcggaaggcgactccatacacttttcctggtggcactggtcatgtcatcaacaagaacaacaggagactggcagaagtttggatggatgaatttaaagatttcttctacatcatatccccaggt

SEQ ID NO: 29736 - DNA, 459 bp, Macaca Mulatta
cacctgacccatgaagcggcagggaggcctcaagcacaaaagccataagcctgatggaacactgcagccagcttgagtctgggctcagctgcactcttgggaagccaaggaagcagtgacaattggacaaaacatcccgacttaaaccccgtgtcaaaacaaggatcttctgctcctgggcattgtggggataattttcctgtggagctcataattgaagccaaacttggctttgccctggtggtactggggccagctcctttcagtttttctgtctttcctcataaaaccaaccaccactcctaacatagcaccatccaccccccgcaccaccacctctttagtctgctccacttaattctggtggctaaaagagggaatacggcctttgaccttccttcactatattgaatattatgttttatgtacaataatctccttacactagtaaatctgggt

SEQ ID NO: 29737 - DNA, 659 bp, Macaca Mulatta
gtatgtgcggtgaagcacgatgcaacactgacacagtagcggatcaaatcaaagaaagagaaaacctggaaagaaaagagacattctcagcacccgtttaggctctccctaagcttcctgaaagtaaagaggagtggactctgttttctctgcagattgaccttctattctaaacaataattcagtttccttgcaatctttccttcacatacaaactctttgttagagagacagatggcaaatattttaagctttatgggccttattgtctttgaaacagttgcttaactctgccattgtagcatgaaaccagccaaagacaatatataaatgaatggccatagctgtgttctaataaaactgtatttaccaaaacaggttatgggcccacagggtgtagtatgccgattcatgcttttttactcagtcagcaatttgcaatttatgagccctgcctgatgtaggcaggactagtaagattaatgcaaaaactaaaaggctcaaatataaagtcatagaactctcacacagccccatttatgtggatttctgacattccaaatcattacaattatatgaactctctctcatgactggctcatcaaaataagaaaacaagcaaccttcaaatcctcaaaccatgaaatagacttagtaca

SEQ ID NO: 29738 - DNA, 850 bp, Macaca Mulatta
gtttattccttgctggtttcactaccactgggaccctacaacttcttgccttcttggggaccttatgcatctatctcctctctcttgcaggaaacattctcatcattgtcctggtacagttagattctggactgttcacccccatgtacttctttatcagtgtcctctcctttgtagaggtgtggtatgtcagcaccacagtgcccacactgctgcataccttgctccacgggtgttcacccatctcatcagctgtatgctttattcagctgtatgtctttcactccttagggatgactgagtgctacttgttgggtgtcatggcactggatcgctaccttgctatctgcttcccactccactaccatgcactcatgagcagacaggtacagttacgactagccggggccacttgggtggctagcttctcagctgcacttgtgccagccaccctcactgccactctgcccttctgcttgaaagaggtggcccattacttttgtgacttggcaccgctaatgcggttggcatgtgtggacacaagctggcatactagggcccatggcgcagtgattggtgtggccactggttgcaactttgtgctcattttgggactctatggaggtatcctgaatgctgtgctgaagctaccctcagctgccagtcgtgccaaggccttctctacctgttcctcccacatgactgtggtggcactattctatgcttctgccttcacagtctacgtgggctcacctgggagtcgatccgagggcacagacaagcttattgccttggtgtatgcccttgttacccctttcctcaatcctatcatctacagccttcgcaacaa

SEQ ID NO: 29739 - DNA, 2071 bp, Macaca Mulatta
  misc_feature (1)...(2071): n = A,T,C or G
aggctccctggtgaaggcgcgtgtgctgacctgcgtggaggggatgaacctgcccttgttggaacaagccatccgggagcagaggctgtaccagcaggagcggggcggcggccagtaggaaacagcagcccagcaacacccccacctgcttccaaggccaaaccctctggagctgcgggagccccagagagcgcagacgcctccccagcgacggccttgtctggagccgaaagcagaggggcggatggtgaatccagccccatcccctactttgggattagctcatcagtgagagcccagaaagcatgccataaatccgacagccccacccggggagactgcaagtggctgagctnnnnnnnnnnnnnnnnnnnnnnnnnnnnnnnnnnnnnnnnnnnnnnnnnnnnnnnnnnnnnnnnnnnnnnnnnnnnnnnnnnnnnnnnnnnnnnnnnnnnnnnnnnnnnnnnnnnnnnnnnnnnnnnnnnnnnnnnnnnnnnnnnnnnnnnnnnnnnnnnnnnnnnnnnnnnnnnnnnnnnnnnnnnnnnnnnnnnnnnnnnnnnnnnnnnnnnnnnnnnnnnnnnnnnnnnnnnnnnnnnnnnnnnnnnnnnnnnnnnnnnnnnnnnnnnnnnnnnnnnnnnnnnnnnnnnnnnnnnnnnnnnnnnnnnnnnnnnnnnnnnnnnnnnnnnnnnnnnnnnnnnnnnnnnnnnnnnnnnnnnnnnnnnnnnnnnnnnnnnnnnnnnnnnnnnnnnnnnnnnnnnnnnnnnnnnnnnnnnnnnnnnnnnnnnnnnnnnnnnnnnnnnnnnnnnnnnnnnnnnnnnnnnnnnnnnnnnnnnnnnnnnnnnnnnnnnnnnnnnnnnnnnnnnnnnnnnnnnnnnnnnnnnnnnnnnnnnnnnnnnnnnnnnnnnnnnnnnnnnnnnnnnnnnnnnnnnnnnnnnnnnnnnnnnnnnnnnnnnnnnnnnnnnnnnnnnnnnnnnnnnnnnnnnnnnnnnnnnnnnnnnnnnnnnnnnnnnnnnnnnnnnnnnnnnnnnnnnnnnnnnnnnnnnnnnnnnnnnnnnnnnnnnnnnnnnnnnnnnnnnnnnnnnnnnnnnnnnnnnnnnnnnnnnnnnnnnnnnnnnnnnnnnnnnnnnnnnnnnnnnnnnnnnnnnnnnnnnnnnnnnnnnnnnnnnnnnnnnnnnnnnnnnnnnnnnnnnnnnnnnnnnnnnnnnnnnnnnnnnnnnnnnnnnnnnnnnnnnnnnnnnnnnnnnnnnnnnnnnnnnnnnnnnnnnnnnnnnnnnnnnnnnnnnnnnnnnnnnnnnnnnnnnnnnnnnnnnnnnnnnnnnnnnnnnnnnnnnnnnnnnnnnnnnnnnnnnnnnnnnnnnnnnnnnnnnnnnnnnnnnnnnnnnnnnnnnnnnnnnnnnnnnnnnnnnnnnnnnnnnnnnnnnnnnnnnnnnnnnnnnnnnnnnnnnnnnnnnnnnnnnnnnnnnnnnnnnnnnnnnnnnnnnnnnnnnnnnnnnnnnnnnnnnnnnnnnnnnnnnnnnnnnnnnnnnnnnnnnnnnnnnnnnnnnnnnnnnnnnnnnnnnnnnnnnnnnnnnnnnnnnnnnnnnnnnnnnnnnnnnnnnnnnnnnnnnnnnnnnnnnnnnnnnnnnnnnnnnnnnnnnnnnnnnnnnnnnnnnnnnnnnnnnnnnnnnnnnnnnnnnnnnnnnnnnnnnnnnnnnnnnnnnnnnnnnnnnnnnnnnnnnnnnnnnnnnnnnnnnnnnnnnnnnnnnnnnnnnnnnnnnnnnnnnnnnnnnnnnnnnnnnnnnnnnnnnnnnnnnnnnnnnnnnnnnnnnnnnnnnnnnnnnnnnnnnnnnnnnnnnnnnnnnnnnnnnnnnnnnnnnnnnnnnnnnnnggtgactcgaaaagccctgtttcctggtgactctgagattgaccagctctttcgtatctttcgtatgctggggacacccagcgaagccacatggcccggggtcacccagctgcctgactataagggcaacttccctaagtggaccaggaagggactgggagagattgtgcccagtctggagccagagggcagggacctgctcat

SEQ ID NO: 29740 - DNA, 972 bp, Macaca Mulatta
  misc_feature (1)...(972): n = A,T,C or G
ggggctgtgcctcgctgcttgtgcgcgcttgtggaccgcgcgggccttcgggagatcgatgcaggcctagggtagtctcctttctggactgagaagagaagaatggagaagagccccttcccattgtgagtggacaggaaatggagtgcctttgcattggtttggctttggctacacagcagtggttgtttctggtgggatcgttggctatgtaaaaacaggaagggtggcgtccctggctgcagggctgctcttcggcagcctcgctggcctgggttcttaccagatgtctcaggatccaaggaacgtttgggttttcctagctgctacatctgttactttggttggtgttttgggattgagatcctactactatggaaaagtcatgcctgtaggtttaattgcaggtgccagtttgctgatggccgccaaagttggagttcgtatgttgatgacagctgattagcagaagtcatgttccagcttggactcatgaaggattaaaaaatctgcatcttccactattttcaatgtgttaagagaaataagtgcagcatttttgcatttgacattttacctaaaaaaaaagacatccaaacttggcgggaggggtggaaaatcagttgtttaccattataacccctacagaaggttataatggaggatgttacttggagcttattggagaccctccatagagattgattccttgtataattggatgttctctttctttctgtatctaataggtaaatctccaagggtaaaaatgttaggtgtcaactttgagggccctgaaaccccattccgtgctctgaggaacagtgtgaaaaaatctcttatgagatttagaatatctgttcttttgctcatcttagattacagactgactttgaaattatgttaagtgaaatatcaatgaaaataaagtttaccaaannnnannnnnnnnnnnnnnnnnnnnnnnttgtc

SEQ ID NO: 29741 - DNA, 377 bp, Macaca Mulatta
cagcgggcgagacgggtgggaggactgtggcccaccacgtggggtactcctggtgaggcaggcagacctggccctgtgagtttgggggttctgtgccagctctgctcacgtcttcatgtgtggaggggatgtgagttaggctgtcagaacagtgcgggctcgaggcacacacgtttcatctaggcttcgggcggggcgcagcaggtgggtgaggctgcggtggtggctgctgcccagggtgggaggctcaggggaggcgctcggcaacaggagcaggaagtgatgaggtggggagctcagccgagggctgtacaaagaccttcctcgcctgccccagacagagctgaggacccctggccgtgggcttggtaagtgcc

SEQ ID NO: 29742 - DNA, 683 bp, Macaca Mulatta
  misc_feature (1)...(683): n = A,T,C or G
attgcatagttccgaataccctcggccacacctggctttctccatgctcagaataactttctgcagcgaccaacaggctaaagacagggaagnnnnnnnnnnnnnnnnnnnnnnnnnnnnnnnnnnnnnnnnnnnnnnnnnnnnnnnnnnnnnnnnnnnnnnnnnnnnnnnnnnnnnnnnnnnnnnnnnnnnnnnnnnnnnnnnnnnnnnnnnnnnnnnnnnnnnnnnnnnnnnnnnnnnnnnnnnnnnnnnnnnnnnnnnnnnnnnnnnnnnnnnnnnnnnnnnnnnnnnnnnnnnnnnnnnnnnnnnnnnnnnnnnnnnnnnnnnnnnnnnnnnnnnnnnnnnnnnnnnnnnnnnnnnnnnnnnnnnnnnnnnnnnnnnnnnnnnnnnnnnnnnnnnnnnnnnnnnnnnnnnnnnnnnnnnnnnnnnnnnnnnnnnnnnnnnnnnnnnnnnnnnnnnnnnnnnnnnnnnnnnnnnnnnnnnnnnnnnnnnnnnnnnnnnnnnnnnnnnnnnnnnnnnnnnnnnnnnnnnnnnnnnnnnnnnnnnnnnnnnnnnnnnnnnnnnnnnnnnnnnnnnnnnnnnnnnnnnnnnnnnnnnggcttcccgggtgcaacctgtcttagagcagtgggtgaagttttggtaggtgagtgtcagagtgggccgcaccaggccacatcctg

SEQ ID NO: 29743 - DNA, 295 bp, Macaca Mulatta
  misc_feature (1)...(295): n = A,T,C or G
cgctgacggacgggctgtccagcctgactccagtgtcccccacggcctccatgccgcctgcctttccccgcctggagctgccagagctgctggannnnnnnnnnnnnnnnnnnnnnnnnnnnnnnnnnnnnnnnnnnnnnnnnnnnnnnnngtcctgagcgctgttgctaacccccagtcctgccacagtgaccgtgtctaccaggncagggctgcctgacgcctgcccgcctggagccgcagcccacggaggtcggagcctgcccacccgccttgtcctccaggactggagtca

SEQ ID NO: 29744 - DNA, 660 bp, Macaca Mulatta
acaagctaaagctggagcagagagggaggctactggtgttgttaggcctgtagccaagaccagggccaaagccaaagccaagacagggtctaagacagatgcagtagcagagatgaaggcagtgtctaagaacaaggttgttgctgaggtgaaggaaggagctctgtcagagcctaagactctgggcagagccatgggagatttcagttccaaggccgggaatgagtccaccagctccacatgtaaaaatgaggctggtattgatgcctggttctgggctggggaagaggccactatcaattcctggttctggaatggagaagaggcgggtaatagttccagcactaagaatgataaacctgaaattggtgcccaggtctgtgctgaggagttggagcctgcggctggggccgattgcaaacccaggtcaggggctgaggaggaggaggaagagaatgttattgggaactggttttgggaaggagatgataccagttttgaccctaatcctaaacccgtgagcaggatagttaagcctcagcccctgtatgaaattaatgaaaaaaataggcccaaggactggtctgaggtaactatctggcccaacgcccctgctgaactccaacggtgttaggatttagatcccaggcaccatctgag

SEQ ID NO: 29745 - DNA, 691 bp, Macaca Mulatta
ggggttgtataaatttgcgctccgccaaacggggggattcaggggcggccggctttgttgggtgtgcttggtttggtgtccctgcggctgaccgtgattggtgattcgcagcatcttcgtaaccgctaacaggtcaaaatgcagatcttcgtgaagaccctgaccggcaagaccatcacccttgaggtggagcccagtgacaccatcgaaaatgtgaaggccaaaatccaggataaggaaggcattccccccgaccagcagaggctcatctttgcaggcaagcagctggaagatggccgcactctttctgactacaacatcccagaaagagtcgaccctgcaccttgtcctgccgcctgagaggtggtatgcagatcttcgtgaaaaaccctgaacggcaaaaccttccccctggaagtggaccccaatgaccccttccaaaatgtgaagggccaaattccggaaaaagaaagcgttccctcccaacacacaaaaggctcttttttcaggaaaccactggaagaaggcccctccttttctggattaaaattcccaaaaggatccaccccgccccgtgtccgcccccgaaaggtggtttgcaaattttttggaaacccgaccgggaaaaccttcccttggagggggacccctggccccctatgaagttttggggcccaatccaaaaaaaagg

SEQ ID NO: 29746 - DNA, 889 bp, Macaca Mulatta
  misc_feature (1)...(889): n = A,T,C or G
aaagtacctagatcagtgctgtctaaaaaagtgggtgtcagtccagtgccaccaacttccagaacggatcttctgggactagtatgaataatgaaaaacaccgtgggcaaacntgcattnttagttactgcctaaaaaaggctttagaaaatggatagaacctctgtgtctaaagccccttgtcattgaaaacgtggcaaattctntaatgcagagaggaatgatccttgaggggctcaagggcacacagtcatcgtcagtgtctctttccaatcctcaggcatgctggtggcagaggcctttgaacacactccaggcatccaaatggctagcctgggcacatacctaaagaccaatctcttcctcttcctgtttgcacttggtttttacctgcttcttagactgctcaacattgacctactgtggtccgtgcccatagccaaaaagtggtgtgccaaccccgactggatccacgttgacaccacgccttttgctggactcgtgagaaacctcggggtcctcttcggcttgggctttgcagtcaactcggagatgttcctcctgagctgccgaggtggatatagctacacactgagcttccggttgctctgtgccttgacctcattgaccacattgcacctctaccatttcctccagatcccgactcaggaagagcatttattttatgtgctgtctttttgtaaaagtgcatccattcccctaactttggttactttcattccctactatgttcatatgttaatgaaacaaaacggaaagaagattcagtagagtggtgcctagagttagtgctcagtgtcacagatcacccttctccatccaccagtagagctacagagtaggcacagaccagaagcttgtagtccga

SEQ ID NO: 29747 - DNA, 609 bp, Macaca Mulatta
gaggagccgccgccagaccacgtcttccggatgtttccagatatttgtgcctcacaccagagaccgtttttcagagaaaaccaacagatcaccgtctaagtgtgtcgcttgggcgccccaccccggctgcatcctgcatccatctccctattgcagtggcctgcatcatgattaaaggatgtggattcctctgtctggggtgggatgccttactttgcacttaatttagtaagggcattctcggaggattagacgtttaatacaaagtggcggcatagccctgctgagatgtcagtggtggcctggatgctgtaaccccaacgtgtggctaaacattttattttctacattttccccttcattatcattagttgctgtgattctttctgcatttttggttaactatcatttccaaagacttgtcattcagtaatattagcagatagctgcttcgaataaaggaatttggagtttaaaaatcaactcgtgaaaacaaggttgtttttgtctttatcttttgttagaattatagatttatgatttcataggcttgattctatatgaaatatctttttacttttatgcattttaataagatttaaaaatatt

SEQ ID NO: 29748 - DNA, 447 bp, Macaca Mulatta
ttgtgctttataactcaagcctacagttgtgttcagcaaggagtcagggttatttcacactgcacacggccagaacctccctgagcctgttgagtgttctccgtatctgagcaaggcattcctgtgagctgtgttttaaagtagcagcaccagaaacatgactctgagagggacagaacctatgattcaaaagaaaagaccacacagtgtactcggcagcagcttttttaatgtgaacactttcttcttaaggacacaccttcagcacagttaacaaatggttacacctgaaatctgctgagagcagagctcaagatccacaattgcaaaggccactgctggctcacttcctcacaggctgtattaccttccagagctgagtgaggctgtgctctacctcctaacacttgttactgagaggacatgaggtgcaggtttagcacctta

SEQ ID NO: 29749 - DNA, 560 bp, Macaca Mulatta
tctactaaaattcaaaagaagcttaaatgaaagctatgaaactgaagcttaaaagtacaacacattgaacctgggaattatatctttaataagcctaaaaacatttataagtaaaaatattattcattctttactttttaatcataggaggggtgtgtgtgtatatctctttgttgcttaaattccagaaggtaatataaatgaatcaaagagagtgtacaaaatctgcccccatttaaacgcttgaagtttgtttttactgacatatatgatatctgcatgggctgaattcactatgttctatttcacagctgctctgactttcaagtgcctgggagatcagtggccagtgtactgccgagtgatccgtgaaaagaacctatgtcaggacatgcggtggtatcagcgctgctgtgaaacatgcagggacttctatgcccgaaagctgcagcagaagagttgacctctagcaggctggctggatcacagctcgttgcaattacattatttataaacacacacactagcatgtttttcagaccaaatattatcagattaca

SEQ ID NO: 29750 - DNA, 2235 bp, Macaca Mulatta
  misc_feature (1)...(2235): n = A,T,C or G
gagcattgctgaggttttccgatgtttcatttgtatggagaaattgcgggatgcacgcctgtgtcctcattgctccaagctgtgttgtttcagctgtattaggnnnnnnnnnnnnnnnnnnnnnnnnnnnnnnnnnnnnnnnnnnnnnnnnnnnnnnnnnnnnnnnnnnnnnnnnnnnnnnnnnnnnnnnnnnnnnnnnnnnnnnnnnnnnnnnnnnnnnnnnnnnnnnnnnnnnnnnnnnnnnnnnnnnnnnnnnnnnnnnnnnnnnnnnnnnnnnnnnnnnnnnnnnnnnnnnnnnnnnnnnnnnnnnnnnnnnnnnnnnnnnnnnnnnnnnnnnnnnnnnnnnnnnnnnnnnnnnnnnnnnnnnnnnnnnnnnnnnnnnnnnnnnnnnnnnnnnnnnnnnnnnnnnnnnnnnnnnnnnnnnnnnnnnnnnnnnnnnnnnnnnnnnnnnnnnnnnnnnnnnnnnnnnnnnnnnnnnnnnnnnnnnnnnnnnnnnnnnnnnnnnnnnnnnnnnnnnnnnnnnnnnnnnnnnnnnnnnnnnnnnnnnnnnnnnnnnnnnnnnnnnnnnnnnnnnnnnnnnnnnnnnnnnnnnnnnnnnnnnnnnnnnnnnnnnnnnnnnnnnnnnnnnnnnnnnnnnnnnnnnnnnnnnnnnnnnnnnnnnnnnnnnnnnnnnnnnnnnnnnnnnnnnnnnnnnnnnnnnnnnnnnnnnnnnnnnnnnnnnnnnnnnnnnnnnnnnnnnnnnnnnnnnnnnnnnnnnnnnnnnnnnnnnnnnnnnnnnnnnnnnnnnnnnnnnnnnnnnnnnnnnnnnnnnnnnnnnnnnnnnnnnnnnnnnnnnnnnnnnnnnnnnnnnnnnnnnnnnnnnnnnnnnnnnnnnnnnnnnnnnnnnnnnnnnnnnnnnnnnnnnnnnnnnnnnnnnnnnnnnnnnnnnnnnnnnnnnnnnnnnnnnnnnnnnnnnnnnnnnnnnnnnnnnnnnnnnnnnnnnnnnnnnnnnnnnnnnnnnnnnnnnnnnnnnnnnnnnnnnnnnnnnnnnnnnnnnnnnnnnnnnnnnnnnnnnnnnnnnnnnnnnnnnnnnnnnnnnnnnnnnnnnnnnnnnnnnnnnnnnnnnnnnnnnnnnnnnnnnnnnnnnnnnnnnnnnnnnnnnnnnnnnnnnnnnnnnnnnnnnnnnnnnnnnnttttaaggtttcaggtacgttcaccaactttctttcaaaaatcccgggaccagcattggtacattactcagttggaagctgcacagactagttatatccaacaaataaacaaccttaaagannnnnnnnnnnnnnnnnnnnnnnnnnnnnnnnnnnnnnnnnnnnnnnnnnnnnnnnnnnnnnnnnnnnnnnnnnnnnnnnnnnnnnnnnnnnnnnnnnnnnnnnnnnnnnnnnnnnnnnnnnnnnnnnnnnnnnnnnnnnnnnnnnnnnnnnnnnnnnnnnnnnnnnnnnnnnnnnnnnnnnnnnnnnnnnnnnnnnnnnnnnnnnnnnnnnnnnnnnnnnnnnnnnnnnnnnnnnnnnnnnnnnnnnnnnnnnnnnnnnnnnnnnnnnnnnnnnnnnnnnnnnnnnnnnnnnnnnnnnnnnnnnnnnnnnnnnnnnnnnnnnnnnnnnnnnnnnnnnnnnnnnnnnnnnnnnnnnnnnnnnnnnnnnnnnnnnnnnnnnnnnnnnnnnnnnnnnnnnnnnnnnnnnnnnnnnnnnnnnnnnnnnnnnnnnnnnnnnnnnnnnnnnnnnnnnnnnnnnnnnnnnnnnnnnnnnnnnnnnnnnnnnnnnnnnnnnnnnnnnnnnnnnnnnnnnnnnnnnnnnnnnnnnnnnnnnnnnnnnnnnnnnnnnnnnnnnnnnnnnnnnnnnnnnnnnnnnnnnnnnnnnnnnnnnnnnnnnnnnnnnnnnnnnnnnnnnnnnnnnnnnnnnnnnnnnagcatcatattctcgaaaagataaagaccaaaggaagcagcaggcaatgtggcgagtgccctctgatttaaagatgttaaaaagactcaaaactcaaatggccgaagttcgatgtatgaaaactgatgtaaagaatacactttcagaaataaaaagcagcattgccgcttctggagacatgcagacaagccttttttctgctgaccaggcagctctggctgcatgtggaactgaaaactctggcagattacaggatttgggaatggaactcctggcaaaatcatcagttgccagttgttacatacgaaac

SEQ ID NO: 29751 - DNA, 1214 bp, Macaca Mulatta
  misc_feature (1)...(1214): n = A,T,C or G
ggggcagtttgaatcgcggtgcgacgaaggagtaggtggtgggatctcaccgtgggtccgattagccttttctctgccttgcttgcttgagcttcagcagaattcgaaatggctggcggtaaggctggaaaggactccggaaaggccaagacaaaggcggtttcccgctcgcagagagccggcttgcagttcccagtgggccgtattcatcgacacctgaaatctaggacgaccagtcatggacgtgtgggcgcgactgccgctgtgtaaagcgcagccatcctggagtacctcaccgcagaggtacttgaactggcaggaaatgcatcaaaagacttaaaggtgaaacgtaattacccctcagtcacttggaaacttgctaattacgggggatgatgaaagaatttgcgatttctcctcctcgaaagagccaaaaaatttgccttggttgagtaggatgcttcacttctctactccaaatctcaccgaaattcttcttggaattgggggagaaagaaaaaggggtaccaatcccacgaatagagactgtgttccctcaagaatgggcaatgaacatatcgggaaaatttgaccactttgagctataattaaccgccacgagggatacactttatcatataaaaaaagaacaccacgcactgaattaaatctgataacgcctacgtgttatcgacccacaagaattgggtacattctattggggagttgtggaaaaaattatttttactgccaagaggaacattggtgagaaaaatacctgagcggtaaaaaaacagcaatgcccacccagggatggggcggaaataatgggtggaagcaagccccccccatatctctactttgtaggcaacaccgtcaatttttctttagtaggtgttagaaactcgtccacatagtacaattatatgggtaaacgctccaactaacatatggtcgtgnagaaaaacggccatttgcataaaaaataatatataaaaagctactctattattgatatatatacccccaatagagacccaataaaaaatactatttcactgcgaccttatctatnctatactaagatcatatctacttgagacacaaaatacaattgtcttacaaaaccggtatgatttacccgagggtatgagtcgatcttctatcgtgatttagatgtaaggccgcngctctgatgatattattattctata

SEQ ID NO: 29752 - DNA, 957 bp, Macaca Mulatta
  misc_feature (1)...(957): n = A,T,C or G
ctgtacaccgtgatcgagaaagccaagaaggcccgctccaccaagaagaagtccaagaaggcgngactgccccattgcctgggccaacctcatgctgtttgactacaaggaccagcttaagactggggaacgctgtctctacatgtggccctcggtcccagncagatgagaagggcgagctgctgaaccccacaggcactgtgcgtagtaaccccaacacggatagcgccgccgccctgctcatctgcctgcctgaggtggccccgcaccccgtgtactatcctgccctggagaagnnnnnnnnnnnnnnnnnnnnnnnnnnnnnnnnnnnnnnnnnnnnnnnnnnnnnnnnnnnnnnnnnnnnnnnnnnnnnnnnnnnnnnnnnnnnnnnnnnnnnnnnnnnnnnnnnnnnnnnnnnnnnnnnnnnnnnnnnnnnnnnnnnnnnnnnnnnnnnnnnnnnnnnnnnnnnnnnnnnnnnnnnnnnnnnnnnnnnnnnnnnnnnnnnnnnnnnnnnnnnnnnnnnnnnnnnnnnnnnnnnnnnnnnnnnnnnnnnnnnnnnnnnnnnnnnnnnnnnnnnnnnnnnnnnnnnnnnnnnnnnnnnnnnnnnnnnnnnnnnnnnnnnnnnnnnnnnnnnnnnnnnnnnnnnnnnnnnnnnnnnnnnnnnnnnnnnnnnnnnnnnnnnnnnnnnnnnnnnnnnnnnnnnnnnnnnnnnnnnnnnnnnnnnnnnnnnnnnnnnnnnnnnnnnnnnnnnnnnnnnnnnnnnnnnnnnnnnnnnnnnnnnnnnnnnnnnnnnnnnnnnnnnnnnnnnnnnnnnggacgatgagctgttccagtacttgctgcagctggtgcaggtgctaaagtatgagtcctacctggactgcgagctgaccaaattcctgctggaccgggccctggccaaccgcaagatcggccactaccttttctggcacctcc

SEQ ID NO: 29753 - DNA, 537 bp, Macaca Mulatta
ttggggccatgaagaaggttggaagggagagggggtgatggcagcttacctggtgtcccctaccccacctgttctcggagaaccaagttgccatacagaaagttctccaaggtccagttccctttctcccaccagtcggtgaaggcttcagagaagaccagagtcctggacagagagggtaacaggaggagtcggggataaacatcagacatcaatcatgtgtcctaatttgggagtgattccgggggatgggggtgggagagggttagttggtaatctcatagcctgatattttttgtttctattccttttatatcactgtttgactcgagggggaggggtggcaaccggaaataaagtcctccgatcttccgccccacatgcagtctttgtctttttggggggaatggggccccctgtcttctccgcacccggggcccctaagcagcagtgtctggccacgcccccgcagtgggaggtcggcctgcgctggtggccacagatggcctaaggctggcgggtctttgattggccccg

SEQ ID NO: 29754 - DNA, 238 bp, Macaca Mulatta
acaggtggcagtggtgacagtcattgggagaagcttctgaggaagcttttttatttaaatggctgttatgcttttaacagagttaggtacaaaatgcatccaagcaaaagaattttatacatactcattaacatagtgataaatgtaaattacactttgataatgtaaaatagagtgtgttaggccccaaaaagaaactacaaagttagccgcaacttaacatactggaaagactcct

SEQ ID NO: 29755 - DNA, 1017 bp, Macaca Mulatta
  misc_feature (1)...(1017): n = A,T,C or G
ggtcatagcctgcagtgctacaactgtcctaacccaactactgactgcaaaacagccatcaattgttcatctggttttgatacgtgtctcattgccagagctggnnnnnnnnnnnnnnnnnnnnnnnnnnnnnnnnnnnnnnnnnnnnnnnnnnnnnnnnnnnnnnnnnnnnnnnnnnnnnnnnnnnnnnnnnnnnnnnnnnnnnnnnnnnnnnnnnnnnnnnnnnnnnnnnnnnnnnnnnnnnnnnnnnnnnnnnnnnnnnnnnnnnnnnnnnnnnnnnnnnnnnnnnnnnnnnnnnnnnnnnnnnnnnnnnnnnnnnnnnnnnnnnnnnnnnnnnnnnnnnnnnnnnnnnnnnnnnnnnnnnnnnnnnnnnnnnnnnnnnnnnnnnnnnnnnnnnnnnnnnnnnnnnnnnnnnnnnnnnnnnnnnnnnnnnnnnnnnnnnnnnnnnnnnnnnnnnnnnnnnnnnnnnnnnnnnnnnnnnnnnnnnnnnnnnnnnnnnnnnnnnnnnnnnnnnnnnnnaaggaagaagtttaagagtgaagtaggtgtgacttgagctagattgcatgcttcttcctttgctcttgggaggaccagctttgcagtgacagcttgagtgggttctctgcaaccctcagattatttttcctctggctccttggatgtagtcagttagcatcattagtacatctttggaggattgggcaggagtgtgtgagcatcctctctcacatgaacgctttcgtaaacttcagggctcccgtgttgccatggaggcatgccaaatgttccatatgtgggtgtcagtcaggggcaacaagatccctaatgcagagctagaggacttctggaagggaagtgggtaagtgttccagatggcagggcatgaaaacttaagggagatacaagtggctgaaagtcgagtttttcctctatctttaaattttatatgggctttgttatctttcactggaaaagtataatagtatacattaatggtgtgttaaagctatttcc

SEQ ID NO: 29756 - DNA, 970 bp, Macaca Mulatta
  misc_feature (1)...(970): n = A,T,C or G
tttgtttagtggaaaaacattaaaaattttaaaaaaaaccctattaatttttttggcttggtgtttaagctttaaaattttattcatttaaatttaaggagggcccacaacaaaaatatgtttgccagcaggccatattcccaagccccctgtgggaagaaatgttttggttgctatttcaacctaaaggaaacaacctttgacttcagtcaccttaaaatgccagtgtggcaagattttttattcctcacaattnnnnnnnnnnnnnnnnnnnacccctaggatcttgaaggtcctatttcagaaaatcttcacacatgcaaaatgtcaccaaaataaatacatttccctcaattatcattaccacccagtattcatgttttcatttttagggatataatttctaaaattagataaatcaaatttcctgcttcctattttaatgcttaaaccctcctccaacaccaagttaagcaactgtggaggataaaatagttgaatctgactgaaagcatggaagaaaaacattagcacacattagtctgatcatttgccaattaggaaaggtgctgctttctacctctaccacagatgcatttgtgaaatgttgatcaatgaagccatttcaaatggttttagagaaggatcagagataatgggctagatagcatatattctaaaccttgttttccatatagtttgagctccctgaaccactgaagttggttaaatccctacacagcacagaagcctctctaggtcatgttattgggcatattatctagaaagcaaatactggatgctgctctaagataggtctagaataccttagtttgcattgtgcacacacaaatggctgtgttgaatataatgcaaggctctatttccctttaaccataagaattaaaacaatacttatcaccatacagtttgatattacttccaataagtacaatatttattaaacccc

SEQ ID NO: 29757 - DNA, 101 bp, Macaca Mulatta
ggaaagatgctgccactcagattttcttctctttatctgctgcatggggaggcctgattactctctcttcttacaacaaattccacaacaactgctacagg

SEQ ID NO: 29758 - DNA, 120 bp, Macaca Mulatta
cagtctagcaaggactccttatctggaagttggctgaacgccttggtcatgttatctttgttccccactctgcttttggggaggatgttttccatgactagctgacatgaggcttggggc

SEQ ID NO: 29759 - DNA, 646 bp, Macaca Mulatta
tgatggcatagcaaatatcctagatgatagccttccaagtcagcagtgagttgacattcaactgcttttaactattcaggctaccttttatactaaaccttgaaaactagaatctaaagtccaccccaaaaaggtagttctttgatattttatactctttatgtaccatatcagaaagagtatgttggcatttgtcatgggagtcatttcacatcataatagaatgcctagtctcattgaccgatcgttaaaaaaatcatatttgtgtgtcttttcatatttatatgttctctcaaatgtatgtctcttacgtaacatactctaagaatgaaattgtcaacacagataaatccttgttagcaaggaatctgtctgctccagtctactcctagtttgacccttggatgtaagaaccaagtcattacatgtcaaattcaatttttctgccttaagaatgaatgtcctacgtaaaatattggatgcagtgtaaaattatccaaggcagtgacttcagctttatatatataaaatatagttttaaagttattgacatttatttaaacttttagattggattgtttgctattgctctgtgtgaggatacataatctttcagtaaactatatttttaacttttccataagct

SEQ ID NO: 29760 - DNA, 861 bp, Macaca Mulatta
cactgggggataaaaatggaggctggctccagtttgcctctaaattctgaaaggaataagtctcggagatcagagggccatgaccaggtatctgatgactatatgtagctcctatttacagcctcagtgagagaagagaagcggaattttatacttggtatgcaaagatgttgcatcctcattaaaacaaaaactggtagtagattgcagctttagcgaagataagagtacttagtttggtgcaaatgggaaacccagagtgaggttaggcttactcaatacaaagcagttatcctgatccccagatcatttatctataaccctttctccagttggaattctgtttaaagaaatgtcaccctctataaatgcacatgtggtaggaacttctgcttttccatctctgtgctagcaagtagtgaataagccattattcacatttcccctagaagttcattggtcctggcccaggaaatgcttagttccatagagagatccttttatttgcctctaaattattttccagtagaaagttatgcatgcatagggaagagaactaccttccctttttaatatattgggaagtgattaggtttgacaagcagagatacagtttattattcaggaatctctaaattcttgtccatgatgagtgattatctttgatcaatgccttgcctgcaatctttcataatcataatcatggaaatgcctggtaaatggtggtcttcccaaataatcatggtgggaggaagggtggagaaagaaaaggatttcacttatttgcaaatgtgagtaagggcagaaataaggataaaaagattcagtttaggaatgttctccaaaatcaaattagatgta

SEQ ID NO: 29761 - DNA, 1321 bp, Macaca Mulatta
gggagaaatggcggctgcggcggctcgagttatgttgttacccgcggcgcggcggcggctctggggtttcagcgagagtctcctgatccgcggcgctgcgggacggtcattatattttggagagaacagattacgaagtacacaggctgctacccaagttgttctgaatgttcctgaaacaagagtaacatgtttagaaagcggactcagagtggcttcggaagactctgggctctcaacatgcacagttggactctggattgatgctggaagtagatatgaaaatgagaagaataatggaacagcacactttctggagcatatggctttcaagggcaccaaaaagagatcccagttagatctggaacttgagattgaaaatatgggtgctcatctcaatgcctatacctccagagagcagactgtatactatgccaaagctttctctaaagacttgccaagagctgtagaaattcttgctgatataatacaaaacagcacattgggagaagcagagattgaacgtgagcgtggagtaatccttagagagatgcaagaagttgaaaccaatttacaagaagttgtttttgattatcttcatgccacggcttatcaaaatactgcacttggacggacaattttgggaccaacagaaaatatcaaatctataagtcgtaaggacttagtggattatataaccacacattataagggaccaagaatagtgcttgctgctgctggaggtgtttcccatgatgaactgcttgacttagcaaagtttcatttttggtgactcctttatgcgcaccacaaaggaagaaataccaggctctgtcctccctgtcacattttcacagggaagttggagaattccgtgtgagggatgacaagatgcctttggcgcaccttgcaatagctgttgaagctgttggttgggcacatccagatacaatctgtctcatgggttgcaaacacgctgattggcaactgggatcgctcttttggaggaggaatgaatttatctagcaagctggcccagctcacttgtcatggcaatctttgccatagctttcagtctttcaacacttcctacacagatacaggattatggggactgtatatggtttgtgaaccagccactgttgcagacatgctacatgttggttcagaaagaatggatgcggctctgtacaaatgtcaccgaaagtgaagtcccacgagccaaaaatcttctggaaaacaaacatgttgtttgcaccttgatgggttcacctcccatttgtggaagatatttggtaggcaaaaggttatgcctataata

SEQ ID NO: 29762 - DNA, 559 bp, Macaca Mulatta
  misc_feature (1)...(559): n = A,T,C or G
agttaatgatgaagatgtcagactaatgttatgggacactgcagggcaagaggaatttgatgcaattacaaaggcctactatcgaggnnnnnnnnnnnnnnnnnnnnnnnnnnnnnnnnnnnnnnnnnnnnnnnnnnnnnnnnnnnnnnnnnnnnnnnnnnnnnnnnnnnnnnnnnnnnnnnnnnnnnnnnnnnnnnnnnnnnnnnnnnnnnnnnnnnnnnnnnnnnnnnnnnnnnnnnnnnnnnnnnnnnnnnnnnnnnnnnnnnnnnnnnnnnnnnnnnnnnnnnnnnnnnnnnnnnnnnnnnnnnnnnnnnnnnnnnnnnnnnnnnnnnnnnnnnnnnnnnnnnnnnnnnnnnnnnnnnnnnnnnnnnnnnnnnnnnnnnnnnnnnnnnnnnnnnnnnnnnnnnnnnnnnnnnnnggtgtgtttaatacatctggtggaagtcactcgggtcagaattcaagtaccctcaatggtggagatgtcatcaatcttagacccaacaaacaaaggaccaagaaaaacagaaatccttttagcagctgtagcataccctaa

SEQ ID NO: 29763 - DNA, 256 bp, Macaca Mulatta
aggccaaccgagcaataagtaccgttgggtttgtgacagctgctgttggtgccttctcattcctgggcttgtttccaaaaagacaaagaacaaaatactattaacagtttaccaacgaggtattgatattgaaggaatttgggaggaggaaaaagaaaacctggggtaaatacttattttcagtgcatcattactgttgcagattcctgtgatggatggcaggctctttaatataaattgcttgctgatattatct

SEQ ID NO: 29764 - DNA, 651 bp, Macaca Mulatta
  misc_feature (1)...(651): n = A,T,C or G
caacgtgtagtgggggtggtggcaggcaggacccacgtctccnggcagntggcggctgcaactttccagagtatgagcttcccgagctaaatacgcgcgctttccatgtgggcgcctttggggagctgtggcggggccgtctgcgcggggccggggacttgtcgctgagggagccgccggcgtccgctctgcctgggagccgggggattgcggactccgaccgggaggatgccgcggtggccagggatctcgactgcagcctggaggcggcggctgaactgagggcggtgtgcggccttgataaactgaaatgccttgaggacggtgaggatcctgaagtcattccggagaatactgacctggtgactttgggggttagaaaaaggttcttggaacatcgggaagaaaccattacaatagatcgagcctgcagacaagaaacattcgtttatgagatggagtcacatgccataggaaaaaagcctgaaaattcagcagacatgattgaagaaggggagcttatcctatctgtgaatatcctgtaccctgttatatttcataagcacaaagaacacaaaccataccaaacaatgctggtgctgggccagtccaaagctcacagaactgagggattcaattcgctgtgtcagt

SEQ ID NO: 29765 - DNA, 645 bp, Macaca Mulatta
ccgcgtccgccccgcgagcacagagcctcgcctttgccgctccgccgcccgttcacacccgccgccagctcgccatggatgatgatatcgccgcgctcgttgtcgacaacggctccggcatgtgcaaggccggcttcgcgggcgacgatgccccccgggccgtcttcccctccatcgtggggcgccccaggcaccagggcgtgatggtgggcatgggtcagaaggattcatatgtgggcgacgaggcccagagcaagagaggcattctcaccctgaagtaccccatcgagcacggcatcgtcaccaactgggacgacatggagaagatctggcaccacaccttctacaatgagctgcgtgtggctcctgaggagcaccccgtgctgctgaccgaggcccccctgaaccccaaggccaaccgcgagaagatgacccagatcatgtttgagaccttcaacaccccagccatgtacgtggccatccaggctgtgctgtccctgtacgcctctggccgtaccactggcatcgtgatggactccggtgacggggtcacccacactgtgcccatctacgaggggtatgccctcccccatgccatcctgcgtctggacctggctggccgggacctgactgagtacctcatga

SEQ ID NO: 29766 - DNA, 200 bp, Macaca Mulatta
  misc_feature (1)...(200): n = A,T,C or G
ncaagacatcaaggagggacctgcgccctgctcctcatcctcccgcctgtcgcccgcagagcctgcaggccccgccctcctggtctctggtccctacctctctgctctgtcttcatgtcgctgagggtcttgggctctggnnnnnnnnnnnnnnnnnnnnnatgttcctcctgctgacagcacttcaagtcctggctata

SEQ ID NO: 29767 - DNA, 905 bp, Macaca Mulatta
cctgataatcgtcctggccataatcgcaaaagaaggcgactgcgcccctgaggagaaaatctgggaggagctgagtgtgttggaggtgtttgaggggagggagcacagtatcttcgcggatcccaggaagctgctcacccaagatttcgtgcaggaaaactacctggagtaccggcaggtgcctggcggtgatcctgcatgctacgagttcctgtggggtccaagggccctccttgaaaccagctatgtgaaagtcctgtaccatatgctaaagatcagtggaggacctcacttttcctacccacccctccatgaatgggctttgagagagggggaagagtgagtccgagcacacgttgcagccagggccagtgggaggggtctgggccagtgcgccttccagggccccatccgttagtttccactgccttgtgtgacatgaggcccattcttcactctttgaagagagcagtcagcattctcagtagtgggcttctgttctattggatgacttggagatttatcgttgtttcctgttggaattgttcaaatgttccttttaacggatggttgaatgaacttcagcatccacgtttgtgaatgacagtagtcacacatagtgctgtttatgtagtttaggagtaagagtcttgttttttattcagattgggaaatccattccattttgtgaattgtgacataacagcagcagtggaaaaagtatttgcttaaaattgtgagcgaattagcaataacatacaagagataaagaactcaagacattaaaagatagttaattcttgccttatacctcagtctattctgtaaaatcaaacaaatatgcatacatggatttccttggcttctttgagaatgcaagagaaattaaatctgaataaataatt

SEQ ID NO: 29768 - DNA, 139 bp, Macaca Mulatta
caggcccacacagctgctgacactcacaccctggttagcacccatcgtctccgagggaaccttcaacccagagcttctgcagcacatctaccagccactgaacctgaccattggggtcacggcgtttgccgtggggaag

SEQ ID NO: 29769 - DNA, 118 bp, Macaca Mulatta
aggtaccacagcatgacgcggcagctgctccgcaaggctgatggggtagtgcttatgtacgacatcacctcccaggagagctttggccacgtgcgctactggctagactgtctccagg

SEQ ID NO: 29770 - DNA, 594 bp, Macaca Mulatta
  misc_feature (1)...(594): n = A,T,C or G
agtgtgaagccccaggaagcccccaaggaactcgtcatccctttgatccagaatggccatcgcaggcagtcaccagcccggccccctggtccannnnnnnnnnnnnnnnnnnnnnnnnnnnnnnnnnnnnnnnnnnnnnnnnnnnnnnnnnnnnnnnnnnnnnnnnnnnnnnnnnnnnnnnnnnnnnnnnnnnnnnnnnnnnnnnnnnnnnnnnnnnnnnnnnnnnnnnnnnnnnnnnnnnnnnnnnnnnnnnnnnnnnnnnnnnnnnnnnnnnnnnnnnnnnnnnnnnnnnnnnnnnnnnnnnnnnnnnnnnnnnnnnnnnnnnnnnnnnnnnnnnnnnnnnnnnnnnnnnnnnnnnnnnnnnnnnnnnnnnnnnnnnnnnnnnnnnnnnnnnnnnnnnnnnnnnnnnnnnnnaggggttagggctgggtgccaacctgtctgaggcccaggccttgacccccaccggcccctcccacatgccaaggccagatgaggagcaagagaaggataaggaagatcagcctcaagggctggtgccaggaggagctgtggtggttctttctggccctcaccgaggcctctatgggaagg

SEQ ID NO: 29771 - DNA, 759 bp, Macaca Mulatta
ctaccttccccagagctaagagaaatggtgcatggagacaaacacatatccaggcgtatgtgctctgccagaggtgaggacagagggttgtgggggcacagagaaggtccttcagctggaggagtgatgagagattgactggggagacgtcctggtgaaggcgatgcctgagctatgctgggaagggtggggcttcggcagcaagaccagacacactggtgggggcagcttcctcctttgcagaccagttccagcctaagagcaggagctataggggtgcttagaagcgcagtccctggtgagagcatgcaggctggctgcattcctgtggtatttgaggattgatcttgtcagattagcagctttgctttttttggttcaggtacaagatccccacgtggggagttcttgctgcttgtgaggagcagaagctggtgaaagcacagaacgtgatcctggccctcctcccgagctgtgtgaggctcccagccaggagcaagcagctctgcgagttcctcagtgagagggaaggcccaggtctgagctccacccacacaagtcccagcggtgaggcagcagctcagcagagagcaagatgctggcaccttcaggactgtgtcttgctttccctactctgtctgcacctggggacacaggtcactctctaactggtctccccaaataaatagccagagctagaggggagaaggagggctgaagcctcgcctccccactgtggaggcaggacagcagtctatg

SEQ ID NO: 29772 - DNA, 3816 bp, Macaca Mulatta
  misc_feature (1)...(3816): n = A,T,C or G
acagtgactacaggtatgtggcagctgctttggctgtcatgagaaatgtgactcagcagatcaacgaacgcaagcgacgtttagagaatattgacaagattgctcagtggcaggcttctgtcctagactgggaggnnnnnnnnnnnnnnnnnnnnnnnnnnnnnnnnnnnnnnnnnnnnnnnnnnnnnnnnnnnnnnnnnnnnnnnnnnnnnnnnnnnnnnnnnnnnnnnnnnnnnnnnnnnnnnnnnnnnnnnnnnnnnnnnnnnnnnnnnnnnnnnnnnnnnnnnnnnnnnnnnnnnnnnnnnnnnnnnnnnnnnnnnnnnnnnnnnnnnnnnnnnnnnnnnnnnnnnnnnnnnnnnnnnnnnnnnnnnnnnnnnnnnnnnnnnnnnnnnnnnnnnnnnnnnnnnnnnnnnnnnnnnnnnnnnnnnnnnnnnnnnnnnnnnnnnnnnnnnnnnnnnnnnnnnnnnnnnnnnnnnnnnnnnnnnnnnnnnnnnnnnnnnnnnnnnnnnnnnnnnnnnnnnnnnnnnnnnnnnnnnnnnnnnnnnnnnnnnnnnnnnnnnnnnnnnnnnnnnnnnnnnnnnnnnnnnnnnnnnnnnnnnnnnnnnnnnnnnnnnnnnnnnnnnnnnnnnnnnnnnnnnnnnnnnnnnnnnnnnnnnnnnnnnnnnnnnnnnnnnnnnnnnnnnnnnnnnnnnnnnnnnnnnnnnnnnnnnnnnnnnnnnnnnnnnnnnnnnnnnnnnnnnnnnnnnnnnnnnnnnnnnnnnnnnnnnnnnnnnnnnnnnnnnnnnnnnnnnnnnnnnnnnnnnnnnnnnnnnnnnnnnnnnnnnnnnnnnnnnnnnnnnnnnnnnnnnnnnnnnnnnnnnnnnnnnnnnnnnnnnnnnnnnnnnnnnnnnnnnnnnnnnnnnnnnnnnnnnnnnnnnnnnnnnnnnnnnnnnnnnnnnnnnnnnnnnnnnnnnnnnnnnnnnnnnnnnnnnnnnnnnnnnnnnnnnnnnnnnnnnnnnnnnnnnnnnnnnnnnnnnnnnnnnnnnnnnnnnnnnnnnnnnnnnnnnnnnnnnnnnnnnnnnnnnnnnnnnnnnnnnnnnnnnnnnnnnnnnnnnnnnnnnnnnnnnnnnnnnnnnnnnnnnnnnnnnnnnnnnnnnnnnnnnnnnnnnnnnnnnnnnnnnnnnnnnnnnnnnnnnnnnnnnnnnnnnnnnnnnnnnnnnnnnnnnnnnnnnnnnnnnnnnnnnnnnnnnnnnnnnnnnnnnnnnnnnnnnnnnnnnnnnnnnnnnnnnnnnnnnnnnnnnnnnnnnnnnnnnnnnnnnnnnnnnnnnnnnnnnnnnnnnnnnnnnnnnnnnnnnnnnnnnnnnnnnnnnnnnnnnnnnnnnnnnnnnnnnnnnnnnnnnnnnnnnncatcctctgtcctcagtcatgccagtctggacatgctctgttgtgccctgtgacataactgctcagtattcctattgcttttactgtgttttaggtactgtggagagatcaaaaaaccaaacagaagcaggggagtatcagactataatgatgctgagtggacttctgttcagggaacattttgcatnnnnnnnnnnnnnnnnnnnnnnnnnnnnnnnnnnnnnnnnnnnnnnnnnnnnnnnnnnnnnnnnnnnnnnnnnnnnnnnnnnnnnnnnnnnnnnnnnnnnnnnnnnnnnnnnnnnnnnnnnnnnnnnnnnnnnnnnnnnnnnnnnnnnnnnnnnnnnnnnnnnnnnnnnnnnnnnnnnnnnnnnnnnnnnnnnnnnnnnnnnnnnnnnnnnnnnnnnnnnnnnnnnnnnnnnnnnnnnnnnnnnnnnnnnnnnnnnnnnnnnnnnnnnnnnnnnnnnnnnnnnnnnnnnnnnnnnnnnnnnnnnnnnnnnnnnnnnnnnnnnnnnnnnnnnnnnnnnnnnnnnnnnnnnnnnnnnnnnnnnnnnnnnnnnnnnnnnnnnnnnnnnnnnnnnnnnnnnnnnnnnnnnnnnnnnnnnnnnnnnnnnnnnnnnnnnnnnnnnnnnnnnnnnnnnnnnnnnnnnnnnnnnnnnnnnnnnnnnnnnnnnnnnnnnnnnnnnnnnnnnnnnnnnnnnnnnnnnnnnnnnnnnnnnnnnnnnnnnnnnnnnnnnnnnnnnnnnnnnnnnnnnnnnnnnnnnnnnnnnnnnnnnnnnnnnnnnnnnnnnnnnnnnnnnnnnnnnnnnnnnnnnnnnnnnnnnnnnnnnnnnnnnnnnnnnnnnnnnnnnnnnnnnnnnnnnnnnnnnnnnnnnnnnnnnnnnnnnnnnnnnnnnnnnnnnnnnnnnnnnnnnnnnnnnnnnnnnnnnnnnnnnnnnnnnnnnnnnnnnnnnnnnnnnnnnnnnnnnnnnnnnnnnnnnnnnnnnnnnnnnnnnnnnnnnnnnnnnnnnnnnnnnnnnnnnnnnnnnnnnnnnnnnnnnnnnnnnnnnnnnnnnnnnnnnnnnnnnnnnnnnnnnnnnnnnnnnnnnnnnnnnnnnnnnnnnnnnnnnnnnnnnnnnnnnnnnnnnnnnnnnnnnnnnnnnnnnnnnnnnnnnnnnnnnnnnnnnnnnnnnnnnnnnnnnnnnnnnnnnnnnnnnnnnnnnnnnnnnnnnnnnnnnnnnnnnnnnnnnnnnnnnnnnnnnnnnnnnnnnnnnnnnnnnnnnnnnnnnnnnnnnnnnnnnnnnnnnnnnnnnnnnnnnnnnnnnnnnnnnnnnnnnnnnnnnnnnnnnnnnnnnnnnnnnnnnnnnnnnnnnnnnnnnnnnnnnnnnnnnnnnnnnnnnnnnnnnnnnnnnnnnnnnnnnnnnnnnnnnnnnnnnnnnnnnnnnnnnnnnnnnnnnnnnnnnnnnnnnnnnnnnnnnnnnnnnnnnnnnnnnnnnnnnnnnnnnnnnnnnnnnnnnnnnnnnnnnnnnnnnnnnnnnnnnnnnnnnnnnnnnnnnnnnnnnnnnnnnnnnnnnnnnnnnnnnnnnnnnnnnnnnnnnnnnnnnnnnnnnnnnnnnnnnnnnnnnnnnnnnnnnnnnnnnnnnnnnnnnnnnnnnnnnnnnnnnnnnnnnnnnnnnnnnnnnngcctacatttcttaactaggccctctcatttccccctttaagggggccttgtgcccagggctccatgatcagggctcttaaagctcaaccctcacttctctactgaacccactggcatcaccagatgccagtaatttgtgaacaacaataaatcctgttggttggagtattcccacagcctgtagcatcaaagcagaccagtggccaacagccccaaggggagcccaattaaatacctgggttcagtatcctaacctgttgtgtcctgacagcaatggtaaccccaagaattctgtaatcctctcatttccacatggccccgagctcccttttcctcaactcaatgaggccaggatttgctctccaaattgttttgctaatgtgttctatgggacctgctaccgggagtcctaagacagacatctaattattctctctttttttctccccctctctctatgtgtatatttctaatggatctataagaacagcaacaagagagttctaacaattctagtgtgaagccaaatagtgatcttttagtgctttggggatgggtgggctggggtggatggatgggcaacagtgactttgattacccttgctgctctgcatttgccagtttgttcttctgtttcttttatccgactgtttgactctgtcaaacaagtgtcaaagttgtgtgttnnnnnnnnnnnnnnnnnnnnnngttgtaatgacacaaagccttatgaaaatatttatggagttcaataaaagaagtaaaaagac

SEQ ID NO: 29773 - DNA, 976 bp, Macaca Mulatta
  misc_feature (1)...(976): n = A,T,C or G
ggtgctcctgtttcaggatcagaattatggtcttcactatgaatacactatcccatcagaccctcttccagaaaaccagagctctaaagcacccgagcccctcttcatgtggacacacacaagctgggaagattgcgatgccacttgtggaggagnnnnnnnnnnnnnnnnnnnnnnnnnnnnnnnnnnnnnnnnnnnnnnnnnnnnnnnnnnnnnnnnnnnnnnnnnnnnnnnnnnnnnnnnnnnnnnnnnnnnnnnnnnnnnnnnnnnnnnnnnnnnnnnnnnnnnnnnnnnnnnnnnnnnnnnnnnnnnnnnnnnnnnnnnnnnnnnnnnnnnnnnnnnnnnnnnnnnnnnnnnnnnnnnnnnnnnnnnnnnnnnnnnnnnnnnnnnnnnnnnnnnnnnnnnnnnnnnnnnnnnnnnnnnnnnnnnnnnnnnnnnnnnnnnnnnnnnnnnnnnnnnnnnnnnnnnnnnnnnnnnnnnnnnnnnnnnnnnnagtgttcagtcaagtgtggcaaaggcgtacgtcatcggaccgttagatgtaccaacccaagaaagaagtgtgtcctctctaccagacccagggaggctgaagactgtgaggattattcaaaatgctatgtgtggcgaatgggtgactggtctaannnnnnnnnnnnnnnnnnnnnnnnnnnnnnnnnnnnnnnnnnnnnnnnnnnnnnnnnnnnnnnnnnnnnnnnnnnnnnnnnnnnnnnnnnnnnnnnnnnnnnnnnnnnnnnnnnnnnnnnnnnnnnnnnnnnnnnnnnnnnnnnnnnnnnnnnnnnnnnnnnnnnnnnnnnnnnnnngctgctctgactttcaagtgcctgggagatcagtggccagtgtactgccgagtgatccgtgaaaagaacctatgtcaggacatgcggtggtatcagcgctgctgtgaaacatgcagggacttctatgcccgaaagctgcagcagaagagttg

SEQ ID NO: 29774 - DNA, 639 bp, Macaca Mulatta
gctgggctccccacccccggcacccagctctctacggccggtccgggagggctggggctttggggagccctccccgccaaacctgctgttggcccaggagagccccagaggctccccagagactgcagcctcccgtggttgggccgggagcaggcggggcttggggtgtgggcgtccccaccacccatagcaggaatggtgggaagagacaaaagtctgttccagaaaccctgggaggaccccaggcagggagaccccgcctgcccccacccttcccagcgagccatcttggtaactgggaacaaacgcaccgcagcccgtttttccttaaaagaggccttaatccccgagcccccgctgccagggcagagggaggagggggcacagctgtgccaagcccggccccactggtgtgtcctaacgatgtgaccccagaaatgccagcggggaatggaggccgctgcagagacacagcccaggcagccgggcctcctaggctggtggagatggtggggttcaatcccggcttccagggactctcagctccaaaggcccctaaagccacatcctcccgccccacagacgggaccctgcacagaagtcagagagcctggggtccaagcgttctaggtaaactga

SEQ ID NO: 29775 - DNA, 211 bp, Macaca Mulatta
ttactttattaaaaattttaagttgtattttttgagcataaattcagttttttatggtggaaatctgaaaaatcaatagaactagaaagaaaattagtacacagtgttatcacctagagctaacttgtatttcacatctctgggtattgttctttttctcttaggaattagttttttatccataggtgagatatataataagcttttaagg

SEQ ID NO: 29776 - DNA, 471 bp, Macaca Mulatta
taaagtcctgcaacctgcctgtgtttctggtgtgatctattggccccacatccgcagattcaaaccaccactaaccatgcaggacacaggacatagtaacaggctgaattcactttatttttcttgtataaaaaccctatgttgtagccacagctggagcctgggtccgctgcacggagactctggtgtgggtcttgacaaggtggtcggtgaattcctgatagggagacttggtaaacacagtctccttccagaggtcaggggtcaggtagctgtaggtcttagagatggcatcgaaggtggccttggctgcacaacaaaagaaccccaggagggtcagtggtgtgcttgaggcaagtcccccaacccaaaaactgtcgcactcctaggaacagagaggccatgctgggcgggtctgtcgtgcattaggagagcctttctctgcctccctgaaaacacgccaagcacacg

SEQ ID NO: 29777 - DNA, 1175 bp, Macaca Mulatta
  misc_feature (1)...(1175): n = A,T,C or G
aggaattctacgatgaatggccaatcaagctgggagaagtagagccttataaaggtccaaagacacctgatggcaggnnnnnnnnnnnnnnnnnnnnnnnnnnnnnnnnnnnnnnnnnnnnnnnnnnnnnnnnnnnnnnnnnnnnnnnnnnnnnnnnnnnnnnnnnnnnnnnnnnnnnnnnnnnnnnnnnnnnnnnnnnnnnnnnnnnnnnnnnnnnnnnnnnnnnnnnnnnnnnnnnnnnnnnnnnnnnnnnnnnnnnnnnnnnnnnnnnnnnnnnnnnnnnnnnnnnnnnnnnnnnnnnnnnnnnnnnnnnnnnnnnnnnnnnnnnnnnnnnnnnnnnnnnnnnnnnnnnnnnnnnnnnnnnnnnnnnnnnnnnnnnnnnnnnnnnnnnnnnnnnnnnnnnnnnnnnnnnnnnnnnnnnnnnnnnnnnnnnnnnnnnnnnnnnnnnnnnnnnnnnnnnnnnnnnnnnnnnnnnnnnnnnnnnnnnnnnnnnnnnnnnnnnnnnnnnnnnnnnnnnnnnnnnnnnnnnnnnnnnnnnnnnnnnnnnnnnnnnnnnnnnnnnnnnnnnnnnnnnnnnnnnnnnnnnnnnnnnnnnnnnnnnnnnnnnnnnnnnnnnnnnnngaaagaggacttgccagacccacgctctgcagaactgtacgaattccgcttcagtgacttccccattacagagcacggattgattcaatgtggaatacgactgttttttgaaataaatgtggtggagaaattcaaagtacctgtagaggnnnnnnnnnnnnnnnnnnnnnnnnnnnnnnnnnnnnnnnnnnnnnnnnnnnnnnnnnnnnnnnnnnnnnnnnnnnnnnnnnnnnnnnnnnnnnnnnnnnnnnnnnnnnnnnnnnnnnnnnnnnnnnnnnnnnnnnnnnnnnnnnnnnnnnnnnnnnnnnnnnnnnnnnnnnnnnnnnnnnnnnnnnnnnnnnnnnnnnnnnnnnnnnnnnnnnnnnnnnnnnnnnnnnnnnnnnnnnnnnnnnnnnnnnnnnnnnnnnnnnnnnnnnnnnnnnnnnnnnnnnnnnnnnnnnnnnnnnnnnnngagtttaaacatcttccagaacctaaataagcggcagtttgaaacagttattcatttgttcgaggtcgcaataatagcaactgacctggctttatatttcaag

SEQ ID NO: 29778 - DNA, 626 bp, Macaca Mulatta
  misc_feature (1)...(626): n = A,T,C or G
nnnnnnnnnnnnnnnnnnnnnnnnnnnnnnnnnnnnnnnnnnnnnnnnnnnnnnnnnncnnnnnnnnnnnnnnnnnnnnnnnnnncnnnnnnnnnnnnnnnnnnnnnnnnnnnnnnnnnnnnnnnnnnnnnnnnnnnnnnnnnnnnnnnnnnnnnnnnnnnnnnnnnnnnnnnnnnnnnnnnnnnnnnnnnnnnnnnnnnnnnnnnnnnnnnnnnnnnnnnnnnnnnnnnnnnnntagaagtttacaatttgtgttattaaaagctaaatcaacaaacatcacttcctagttatttctgcacgtaggactgttttctctgccccgggttatgtacatctgcggcacctatggacacagacaccacataacggggtgctgagggcatctcttccagctccccattcaatgacatctaactggtagctggaaatcagctgtggtgggagtatttacaccatgggaattggcaaattcttcacactgggacttgatttacagttacttgtctagacttaagatgattaaaatgtagattagacttcagggtgctgtgtctgctcattacattgtgaacagcacaagttgaggaaatgctcttctagttccaaaaaccatctgattcaac

SEQ ID NO: 29779 - DNA, 667 bp, Macaca Mulatta
ttaggggaaccccctcaaaggggaagggttggttctgacggccagagcccaaagaagacccattcgattgtttccggcagaggatgatgcagatgtacagacacaagcgggccaaacaaataggtatgtttacgggacagtgcataagcccctccgccctcaccggcgtgctggtatgcagagaaattccccaaacaaagttgatattccctgttcccccaaaaatgccacacacaaaaaaatcacaaaattctgtgagggaaacaaaagggtctctggatgcggatatgccccattcttacattccaggtttgctgaaggagcaaacctcatgttggccaagggcagctgcacgtggcctgcctggtgccctggttgtgagcccctcgaagcctctaggctaggctccgtggatgtgcgcgtggaaataggccacgcctgtctcttctcttgctcaagttttctctcacagatgagggccacctaccacataacatgaccagcaaacggattgtttagtccagagggccttgccatcatggaagtggaaggccgactgtgacagccaccgccacagaggatggcagttagctgtgtccctttgtgagggtcttcaaatccttttccttctgcagggccttgggcctgtaaatatcctcatctttct

SEQ ID NO: 29780 - DNA, 693 bp, Macaca Mulatta
gaaagtcaagcaaaaactcagaaataaagcgaatacatcttatggcaaaaggaaggtatcaagaagtgaagccatagtctcagatatttccgacattgtgaatatttagtgtctagaaggaaagtaaaccaacaacatcatggaattgaatattgttttgcctgcatttgagaaaactctcatccagtataaacatagaatagaatctgaaatttgtaagaaagccatcaataaattttattttaatagtaaataagaactcaactaaatgtttaaaaagtccagatattgaaaaatctgaaaaagaagaatgctaaggtaatgtcagatattaaaaagaaatggcagtgtttgactgatgtcccaggatgaactgctttggttagagccaccaaatgaagcaactacaaactaaatattatgaacataaggagagaacagtcttcccttaggaatgcagctatttctaatttaattcaaaacaacttcatcagaagtattcagatgttcaggagaaagaaccaaacataaaggaaacatatgattcatccagccttccaggtgttatttaaagcaggaacacttttgggagctaaaaacccaattctggttaaataaagtagtcaaacccatcatgagagaagttcctccaccaggaatgagagaccatcctactaaatatatgcctataga

SEQ ID NO: 29781 - DNA, 268 bp, Macaca Mulatta
tgtgtgcattttataggaagaaagttgggtctgagattatattgtaatttcatactttctatagacagaaaagttttcagagaaaaagaaatgattaaatatcttccagatgttgctgccttatcaaaatgcttctagaactgtctgtataagtggtatttcagacagtactaaatacttatattttatttttgaggcatgtaattttaaaactgcagtagcttaaaattctattaaacaaatgtagaaaatattttggttataattg

SEQ ID NO: 29782 - DNA, 768 bp, Macaca Mulatta
ggggcttctctcccggccgaggcccgggggaccagagcgagaagcggggaccatgttccgacgcaagttgacggctctcgactaccacaaccccgccggcttcaactgcaaagatgaaacagaatttagaaacttcattgtttggcttgaagaccagaaaatcagacactacaagattgaagacagaggtaatttaagaaacattcacagcagtgactggcccaagttctttgaaaagtatctcagagatgttaactgtcctttcaagattcaagatcgacaagaagctattgactggcttcttggtttagctgttagacttgaatatggagataatgctgaaaaatacaaggatttagtacctgataattcaaaaactgctgacaatgcaactaaaaatgcagaaccattgatcaatttggatgtaaataatcctgattttaaggctggtgtgatggctttggctaacctgcttcagattcagcgtcatgatgattacctggtaatgcttaaagcaattcgaattttggttcaggagcgcctgacacaggattgcattgctaaagcaaatcaaacaaaagagggctttgcctgttgctttagacaaaacatattcttgggtttttgatacaggaaaatgcagtttcttaatgaaagctgcttcaatttctgcgaattgctggcacatagaaagagcctccgagagcttccggaccaaaaatccattgaaagcccttagtaagctgtttcaggcaaattatttggcta

SEQ ID NO: 29783 - DNA, 94 bp, Macaca Mulatta
atgattcatgtgaataccttctctcaagtggcagatttcttggagagaaagtttggcaacctcacagctgtatgatgcataaatacaaaatcag

SEQ ID NO: 29784 - DNA, 595 bp, Macaca Mulatta
tagattggcagtgtagggagttgtgggtagtggggaagagggttgggagggtttcattgtctgtgaagtgagaccttccttttacttttcttctattgcctctgagagcatcaggcctagaggcctgccaggccatgggcagcctgtgtgtaaaacctggagatggtggatgatccccacaccacagcccttttgtctctgcaaactgccttcttcggaaagaaggaggtgggaggatgtgaattgttagtttctgagttttaccaaataaagtagaatctaagaagaaaggtacgtttgtttttgcttttattcaccctgcccagctatccaggacctcaggtatactattcctaatttactgcgaacgtaggcagtattctactgtttatggcagctgttgcattcacttgcccttgctgttagaacaactcttttcaggtagtgaaagtgaagacatctatacctcttcttgatcacgtgattgtttgatgggatcccaaggatgatgggtttagaaattcactggtctttttggttgtccttgacaccatttgattcttacttgcctctgccagtaacctgctgggcctgg

SEQ ID NO: 29785 - DNA, 1829 bp, Macaca Mulatta
  misc_feature (1)...(1829): n = A,T,C or G
ccaccaccgagtcggtgtgggcctgcctcaagtgctcccacgtggcttgcggccgctacattgaggaccacgccctgaaacactttgaagagactggacacccgctagccatggaagtccgggatctctacgtgttctgttacctgtgcaaggactacgtgctcaatgataacccagagggcgacctgaagctgctaagaagctccctcctggcggtccggggccagaagcaggacacgctggtgagacgcgggcggacgctgcggtccacggcttcgggtgaggacgtggtcccgccgcagcgcgctcctcagggacagccgcagatgctcaccgctctgtggtaccggcgccagcgcctgctggccaggacgctgcggctgtggttcgagaagagctcccggggccaggcgaagctggagcagcggcggcaggaggaggcgctggagcgcaagaaggaggaagcgcggaggcggcggcgcgaggtgaaacggcggctgctggaggagctggccagcgcccctccgcgtaagagtgcacggctgctcctgcacacgcntagcgacgcgggcccggncgcctcgcgccccaccaccctccctacctcacgcagagcgcccgccgccacgctcaagctgcgtcgccagcctgccgtggccnnnnnnnnnnnnnnnnnnnnnnnnnnnnnnnnnnnnnnnnnnnnnnnnnnnnnnnnnnnnnnnnnnnnnnnnnnnnnnnnnnnnnnnnnnnnnnnnnnnnnnnnnnnnnnnnnnnnnnnnnnnnnnnnnnnnnnnnnnnnnnnnnnnnnnnnnnnnnnnnnnnnnnnnnnnnnnnnnnnnnnnnnnnnnnnnnnnnnnnnnnnnnnnnnnnnnnnnnnnnnnnnnnnnnnnnnnnnnnnnnnnnnnnnnnnnnnnnnnnnnnnnnnnnnnnnnnnnnnnnnnnnnnnnnnnnnnnnnnnnnnnnnnnnnnnnnnnnnnnnnnnnnnnnnnnnnnnnnnnnnnnnnnnnnnnnnnnnnnnnnnnnnnnnnnnnnnnnnnnnnnnnnnnnnnnnnnnnnnnnnnnnnnnnnnnnnnnnnnnnnnnnnnnnnnnnnnnnnnnnnnnnnnnnnnnnnnnnnnnnnnnnnnnnnnnnnnnnnnnnnnnnnnnnnnnnnnnnnnnnnnnnnnnnnnnnnnnnnnnnnnnnnnnnnnnnnnnnnnnnnnnnnnnnnnnnnnnnnnnnnnnnnnnnnnnnnnnnnnnnnnnnnnnnnnnnnnnnnnnnnnnnnnnnnnnnnnnnnnnnnnnnnnnnnnnnnnnnnnnnnnnnnnnnnnnnnnnnnnnnnnnnnnnnnnnnnnnnnnnnnnnnnnnnnnnnnnnnnnnnnnnnnnnnnnnnnnnnnnnnnnnnnnnnnnnnnnnnnnnnnnnnnnnnnnnnnnnnnnnnnnnnnnnnnnnnnnnnnnnnnnnnnnnnnnnnnnnnnnnnnnnnnnnnnnnnnnnnnnnnnnnnnnnnnnnnnnnnnnnnnnnnnnnnnnnnnnnnnnnnnnnnnnnnnnnnnnnnnnnnnnnnnnnnnnnnnnnnnntccggctgcaccttaaaagattcaggtnnnnnnnnnnnnnnnnnnnnnnnnnnnatggggtccattcgtctttgaccagtattaaccatggaaccttactggtgcaagaacatctcttctctctgacaaaagagaccttgcnntatgatctctcgccagtggtcatgcatcacggaaaagggtttgcctcaggacactacacagcntattgntacaacacagagggaggtgcgtgcgctttactctgtggggtgggggacacggaaaggggt

SEQ ID NO: 29786 - DNA, 178 bp, Macaca Mulatta
atcccaggcacagagctcggctgctgaccaccccccgacttttctttctccccagtacctggagccctggctgccgctaaagcagccaaatatggtgagtgcaccccacaaccacttgtggctcccttgccaccacaccatccctgacagcacaggactcgggtggtcactatagaaa

SEQ ID NO: 29787 - DNA, 1091 bp, Macaca Mulatta
  misc_feature (1)...(1091): n = A,T,C or G
ggatagctgcaaaaaatttatatctgtacagatctaacataacactactacactcagtattcattttattgaagcatgcaagtaaagcactttttctaatttatatagagatacctaattaacacggcacattgtactaatgactaggagtagcagcttttcttccctccctctatgaattcttataatgtccctttttctgtaaatttttgagaggcagttggcaatttcggaggcagcagggtctgttttggtaaagtcttgaatttcattgttgcactcttgtgactgatctctgtgggaatgtcttttctttgcatggggctcatagagatgtgtgcagacatgcttattgaggttagtgtgtatcaagaatacacacacgcacatcacacacacgatattcgtgaccagcttcaagccttgccacacattgtaacaccctttggtgggctagtcaaaaaaagaaaccagtttttattttggacccccatgcccaatttggtaccacctattggggttggaaatggacacccccagaaatatgacaagggtcgaaaataatgttttagtgaattatccaacgggagacccatgtcccagagagtacccngtacaaagatattaccaactaacgccttattgaaaagagaaacataaaaaccacaaaataaggagaatcccttctactttattaaccaaatttctgttttttataaaactgctctctatataaacttcgaacactgacgggggaatttatttctttcttagaggacgaaggaaggaataacccattttaaaggtcaccaatgggaaaatacctatcanattaggggcgcctacgatacataaccctagcggacccgacttcaacttactcgacggggaaaggggatataatctttataagtattataacaaaatagcaccacacacaaataatttctcgtcactttcgaataaatggtggcgcaactcccataggcggcatatatctgacgacatatgtctccctctggaagacacagaaagaaagtgttatcattagcaacaacatgttaaaatactatatagagagacatatatan

SEQ ID NO: 29788 - DNA, 1312 bp, Macaca Mulatta
gggggggccctggtgtgattccgtcctgcgctgctgttctctggagcagcgttggtttatctccgtccgccttctctcccacctaagtgcgtgccgccacctgatggaagattcgatggacatggacatgagccccctgaggccccagaactatcttttcggttgtgaactaaaggccgacaaagattatcactttaaggtggataatgatgaaaatgagcaccagttatctttaagaacggtcagtttaggggctggtgcaaaggatgaattgcacattgttgaagcagaggcaatgaattacgaaggcagtccaattaaagtaacactggcaactttgaaaatgtctgtacagccaacggtttcccttgggggctttgaaataacaccaccagtggtcttaaggttgaagtgtggttcagggccagtgcatattagtggacagcacttagtagctgtggaggaagatgcagagtcagaagatgaagaggaggaggatgtgaaactcttaagtatatctggaaagcggtctgcccctggaggtggtagcaaggttccacagaaaaaagtaaaacttgctgctgatgaaagatgatgatgattatgatgaaagatgaatgatgattgaaaatgaatgaatttttgatgaattaggaagctgaagaaaaagcaccagtgaaagaaatctatacgaagatacttccagcccaaaaatgcacaaaagttcaaatcagaaatggaaaagaactccaaaacccatcatcaacaccccaagatcaaaaggacaagaatccttcaaaaaaacaggaaaaaaactcgtaaaacaccaaaaggaacctagttctgtagaagacattaaagcaaaaatgcaagcaagtatagaaaaaggtgggttctcttcccaaagtggaagcccaagttcatcaatttatgtgaaggaattgccttcccggaatgacctggacccaagaaggctaatttcaagattcttctgggcagtggaggaagtctctttaagaaaatagtttaaacaatttgttaaaaattttccgtcttatttcatttctgtaacagttgatatctggctgtcctttttataatgcagagtgagaactttccctaccgtgtttgataaatgttgtccaggttccattgccaagaatgtgttgtctaaaatgcctgtttagtttttaaagatggaactccaccctttgcttggttttaactacgtatggaatgttatgataggacatagtagtagcggtggtcagacatggaaatggtggggagacaaaatatacatgtgaaataa

SEQ ID NO: 29789 - DNA, 1040 bp, Macaca Mulatta
ggacgaggcggagaggtcagcggaggtttcctggtttcggacccttcggccggatggtgaaatcctccctgcagcggatcctcaatagccactgcttcgccagagagaaggaaagggataaacccagcgccaccatccacgccagccgcaccatgccgcttctaagcctgcacagccgcggaggcagcagcagtgagagttccaggttctccctccgctgctgtagtaacccgggtccggggcctcggtggtgctcctgatgcccctcacccacccctgaagatcccaggtgggcgagggaatagtcagagggatcacaatctttcagctaacttattctactccgatgatcggctgaatgtaacagaggaactaacgtccaacgacaagacgaggattctcaacgtccagtccaggctcacagacgccaaacgcattaattggcgaacagtgctgagtggaggcagcctctacatcgagatcccgggcggcgcgctgcctgaggggagcaaggacagctttgcagttctcctggaattcgctgaggagcagctgcgagccgaccatgtcttcatttgcttccacaagaaccgcgaggacagagccgccttgctccgaaccttcagctttttgggctttgagattgtgagaccgggggcatccccttgtccccaagagacccgacgcttgcttcatgggctacacgttcgagagagagtcttcgggagaggacgacgactaaggccgcctggggggctaggacaatccggccccggggtcacccatgatcacccggcgcgtgtaaacgggaaacacaccaacccccgggtagaccacatgagcatgggcaaaacaggtcactcaaaaacgaaatactgaaaaaacacgtgtaggaaacaaagagtcaagcgaaaaatcatctcgaagacgcccacccactaaaccggggcacaccatgagccgcaccgaccagaaagaaccggcccacaaacaagagaccttgcaacaaccctcgccccgcccccccttccccaccacac

SEQ ID NO: 29790 - DNA, 818 bp, Macaca Mulatta
  misc_feature (1)...(818): n = A,T,C or G
gggcttatagtccagggcctgtttccctgtagcagctccctattgctggagaaggagaaaagtgcccaagatcctttcaggatatttggttttttgggcgcgacacaaatcgaggtgagggaagagagaggaaaatcccctgaatccctgcaggattaatttattcaaaaaggaaattaaaaatactcaatatgcaaaagtcttgtgaagaaaatgagggaaaaccacagaacatgccaaaggccgaggaagatcgccctttggaggatgtaccacaggaggcagaaggaaatcctcaaccttccgaagaaggtataagccaggaggcagaaggaaaccccagaggagagccgaatcaacctggccagggatttaaagaggacacacnccgttaggcatttgaaccctgaagaaatgataagaggagtaggtgagcttgaaaggcttagggaagagataagaagagtaagaaacaagtttgtgatgatgcattggaagcaaagacatttccgcagccgtccttatcctgtgtgctttaagccttgaattcatttttgcctaatattaaaaatctggccccagctttctttctgttagcattttcctgatgtatctttgaacctccattttacttttaaaaatccgatgaaattttgttttagaaaatttcccttggtaccaccccccctccttggaattttgggatttttgacccattttttcccggtctcattttttccaattgggaaaacttttcatactttgtgcaaggggaaatgtgtttccattcccagggttgttaaagggggaacataaac

SEQ ID NO: 29791 - DNA, 736 bp, Macaca Mulatta
aagttagcaagcagcacattaataatcagcaacagccacctcaactacgttggagaagcaattctctcaataatggccagccgaaaagtacgcgttgccaggcatctgcctctgcggagtcattaaactcccacagtggtcaccccactgctgatgtgcagactttccaggcaaagcgccatattcatcaacaccgtcagtcttactgtaattataacactggaggtcagttagagggcagtgcggccacttcctgtcagaggcagactgacaaacccagccactgtagccagtttgtgacacctccgcggatgaggagacagttctcagcacccaatctcaaagctggtcgagaaaccacagtataaatcagttactggacaaacttgaaatcatggtggaagaaacagacagtgttagctcgtgatttgatttggttctacctttggccttgagttcttattatttacattataaatattaactggttttatattgttaagacaaaacactggtaaaagtttcaacacctcccttttgcttgtataccataaatgggcagtttttgaaattttggataaagcatcaagaactttttctgaaacgttcctcctttttagtgcctagataattaatatacttacttacatagacttgtcccatattgatgtaagtttgttatgtttttataatgcctataaattaatgtgacatccagaaagacctgcctcttagt

SEQ ID NO: 29792 - DNA, 3123 bp, Macaca Mulatta
  misc_feature (1)...(3123): n = A,T,C or G
ggtgatgacaacgggaagaaggccaacaaccccaaccactgcaactgcatcatagaccagatcttcacgggcgggttgcagtcagacgtcacctgccaagtttgccnnnnntctccactaccatagaccccttctgggacatcagcttggatctgcccagctgttccaccccattctggcccctgagcccagggagcaagggcagcatggcgaacaaggaaagccacgtgtctgggaatcaccacaatcatggactgcctnnnnnnnnnnnnnnnnccagagcacttgggcagcagcgccaagatcaaatgcagcggttgccatagcgaacaggagtccacgaagcagctnnnnnnnnnnnnnnnnnnnnnnnnnnnnnnnnnnnnnnnnnnnnnnnnnnnnnnnnnnnnnnnnnnnnnnnnnnnnnnnnnnnnnnnnnnnnnnnnnnnnnnnnnnnnnnnnnnnnnnnnnnnnnnnnnnnnnnnnnnnnnnnnnnnnnnnnnnnnnnnnnnnnnnnnnnnnnnnnnnnnnnnnnnnnnnnnnnnnnnnnnnnnnnnnnnnnnnnnnnnnnnnnnnnnnnnnnnnnnnnnnnnnnnnnnnnnnnnnnnnnnnnnnnnnnnnnnnnnnnnnnnnnnnnnnnnnnnnnnnnnnnnnnnnnnnnnnnnnnnnnnnnnnnnnnnnnnnnnnnnnnnnnnnnnnnnnnnnnnnnnnnnnnnnnnnnnnnnnnnnnnnnnnnnnnnnnnnnnnnnnnnnnnnnnnnnnnnnnnnnnnnnnnnnnnnnnnnnnnnnnnnnnnnnnnnnnnnnnnnnnnnnnnnnnnnnnnnnnnnnnnnnnnnnnnnnnnnnnnnnnnnnnnnnnnnnnnnnnnnnnnnnnnnnnnnnnnnnnnnnnnnnnnnnnnnnnnnnnnnnnnnnnnnnnnnnnnnnnnnnnnnnnnnnnnnnnnnnnnnnnnnnnnnnnnnnnnnnnnnnnnnnnnnnnnnnnnnnnnnnnnnnnnnnnnnnnnnnnnnnnnnnnnnnnnnnnnnnnnnnnnnnnnnnnnnnnnnnnnnnnnnnnnnnnnnnnnnnnnnnnnnnnnnnnnnnnnnnnnnnnnnnnnnnnnnnnnnnnnnnnnnnnnnnnnnnnnnnnnnnnnnnnnnnnnnnnnnnnnnnnnnnnnnnnnnnnnnnnnnnnnnnnnnnnnnnnnnnnnnnnnnnnnnnnnnnnnnnnnnnnnnnnnnnnnnnnnnnnnnnnnnnnnnnnnnnnnnnnnnnnnnnnnnnnnnnnnnnnnnnnnnnnnnnnnnnnnnnnnnnnnnnnnnnnnnnnnnnnnnnnnnnnnnnnnnnnnnnnnnnnnnnnnnnnnnnnnnnnnnnnnnnnnnnnnnnnnnnnnnnnnnnnnnnnnnnnnnnnnnnnnnnnnnnnnnnnnnnnnnnnnnnnnnnnnnnnnnnnnnnnnnnnnnnnnnnnnnnnnnnnnnnnnnnnnnnnnnnnnnnnnnnnnnnnnnnnnnnnnnnnnnnnnnnnnnnnnnnnnnnnnnnnnnnnnnnnnnnnnnnnnnnnnnnnnnnnnnnnnnnnnnnnnnnnnnnnnnnnnnnnnnnnnnnnnnnnnnnnnnnnnnnnnnnnnnnnnnnnnnnnnnnnnnnnnnnnnnnnnnnnnnnnnnnnnnnnnnnnnnnnnnnnnnnnnnnnnnnnnnnnnnnnnnnnnnnnnnnnnnnnnnnnnnnnnnnnnnnnnnnnnnnnnnnnnnnnnnnnnnnnnnnnnnnnnnnnnnnnnnnnnnnnnnnnnnnnnnnnnnnnnnnnnnnnnnnnnnnnnnnnnnnnnnnnnnnnnnnnnnnnnnnnnnnnnnnnnnnnnnnnnnnnnnnnnnnnnnnnnnnnnnnnnnnnnnnnnnnnnnnnnnnnnnnnnnnnnnnnnnnnnnnnnnnnnnnnnnnnnnnnnnnnnnnnnnnnnnnnnnnnnnnnnnnnnnnnnnnnnnnnnnnnnnnnnnnnnnnnnnnnnnnnnnnnnnnnnnnnnnnnnnnnnnnnnnnnnnnnnnnnnnnnnnnnnnnnnnnnnnnnnnnnnnnnnnnnnnnnnnnnnnnnnnnnnnnnnnnnnnnnnnnnnnnnnnnnnnnnnnnnnnnnnnnnnnnnnnnnnnnnnnnnnnnnnnnnnnnnnnnnnnnnnnnnnnnnnnnnnnnnnnnnnnnnnnnnnnnnnnnnnnnnnnnnnnnnnnnnnnnnnnnnnnnnnnnnnnnnnnnnnnnnnnnnnnnnnnnnnnnnnnnnnnnnnnnnnnnnnnnnnnnnnnnnnnnnnnnnnnnnnnnnnnnnnnnnnnnnnnnnnnnnnnnnnnnnnnnnnnnnnnnnnnnnnnnnnnnnnnnnnnnnnnnnnnnnnnnnnnnnnnnnnnnnnnnnnnnnnnnnnnnnnnnnnnnnnnnnnnnnnnnnnnnnnnnnnnnnnnnnnnnnnnnnnnnnnnnnnnnnnnnnnnnnnnnnnnnnnnnnnnnnnnnnnnnnnnnnnnnnnnnnnnnnnnnnnnnnnnnnnnnnnnnnnnnnnnnnnnnnnnnnnnnnnnnnnnnnnnnnnnnnnnnnnnnnnnnnnnnnnnnnnnnnnnnnnnnnnnnnaattcacgtggaagcatgctttataaaatgaattatcagagaaacagatgggctgagattttcagaaatggccccttgtgaccaagttttgctgtttcgatgacagtgctttgaagatctcttttgaggatgagcagtnnnnnnnnnnnnnnnnnnnnnnnnnnnnnnnnnnnnnnnnnnnnnnnnnnnnnnnnnnnnnnnnnnnnnnnnnnnnnnnnnnnnnnnnnnnnnnnnnnnnnnnnnnnnnnnnnnnnnnnnnnnnnnnnnnnnnnnnnnnnnnnnnnnnnnnnnnnnnnnnnnnnnnnnnnnnnnnnnnnnnnnnnnnnnnnnnngtctcgaactcctgacctcaggcaatccacccacctcagcctcccaaagtgctgggattacaagcatgagccactgcgcctggcctgtgagcagtcttttagtcaggaacaaatctaataggagagttgactgaagttggcccacaggattctgagctgggcagtgcctccctgaaggcttgctaccttgggacgccctggtttgctgcggtgtcttgcgg

SEQ ID NO: 29793 - DNA, 675 bp, Macaca Mulatta
  misc_feature (1)...(675): n = A,T,C or G
actggatcctatgccgaagtgtcagcagacctcaggacagaagagtcccctaacccaggagtccacagactgatttaacctcaggttcccacatcagtggccacagggcagggcccacctggtaaaagtgttctggacatggtcagggtgggtgtgtggctaagtaggcctgcacagagggaacccaaggggctcggccaatgtgattaaagctgccatnnnnnnnnnnnnnnnnnnnnnnnnnnnnnnnnnnnnnnnnnnnnnnnnnnnnnnnnnnnnnnnnnnnnnnnnnnnnnnnnnnnnnnnnnnnnnnnnnnnnnnnnnnnnnnnnnnnnnnnnnnnnnnnnnnnnnnnnnnnnnnnnnnnnnnnnnnnnnnnnnnnnnnnnnnnnnnnnnnnnnnnnnnnnnnnnnnnnnnnnnnnnnnnnnnnnnnnnnnnnnnnnnnnnnnnnnnnnnnnnnnnnnnnnnnnnnnnnnnnnnnnnnnnnnnnnnnnnnnnnnnnnnnnnnnnnnnnnnnnnnnnnnnnnnnnnnnnnnnnnnnnnnnnnnnnnnnnnnnnnnnnnnnnnnnnnnnnnnnnnnnnnnnnnnnnnnnnnnnnnnnnnnnnnnnnnnnnnnnnnnnnnnnnnnnnnnnnnnnnnnnnnnnnnnnnnnnnnnnnnnnnnnnnnnnnnnnnn

SEQ ID NO: 29794 - DNA, 754 bp, Macaca Mulatta
  misc_feature (1)...(754): n = A,T,C or G
gcatcatgctgctattcctgcacatactgaacaagcatgggatttgaatattatacttctaaataaatgtattactcaatctcctatgaccatctatacatactccaccttcaaaaagtacatcaatattatatcattaagaaaatagtaaccttctcttctccaatatgcatgacatttttggacaatgcaattttggcactggcacttatttcagtgaagaaaaactttgtggttctatggcattcatcatttgacaaatgcaagtatcttccttatcaatcagctcctattgaacttactagcactgactgtggaatccttaagggcccattacatttctgaagaagaaagctaagatgaaggacatgccactccgaattcatgtgctactcggcctagctatcactacactagtacaagctgtagataaaaaagtggattgtccacagttatgtacgtgtgaaatcaggccttggtttacacccagatccatttatatggaagcatctacagtggactgtaatgatttaggtcttttaactttcccagccagattgcctgctaacacacagattctgctcctgcagactaacaatattgcaaaaattgaatactccacagactttccagtaaaccttactggcctggatttatctcaaaacaatttatcttcggtcaccaatattaatgtaaaanagatgcctcagctcctttctgtgtacctagaggaaaacaaacttactgaactgcc

SEQ ID NO: 29795 - DNA, 791 bp, Macaca Mulatta
tttaaacatcaaaccaggaagcctagagagaaaaaaagaaatggctgattcaggaacaaaagctctacatttcaggcttcgctcaaataagagagaagcagctggctttcctcaagtggcctctgtcatagaatgtcacagtgttcaatctcaggatatctctaactgtcattgtgtaagaaaaaatgcatccgaagaaaacatgtgttctgcttgtgctgctttcaagtccagcaaaatcagcctgcaagttgataactctttgataacaaaatatgaaaatgcatttcagcaccgtgctcaccgatgccaaggaacaggacactctgtggaaaaaagcagctgtaaagtgagttatacatcaggggaaagggaacttgatgggagagaaacgaatggcagccttccaggagataagatcagaaacaaaatgacagcatgcttgttaaatagtggaatttcaaacaaaatcattcacacctccagtaacatcaaactcagtgaggaagggctggaaggaaaggaacaggatgtatccaaagaaactgtattttgtaagtataacatctctgatcatgctatacaagaactaaaccagactgtaaacattccaagtcctgaaaaagagttggaccagtctcctactgttatgttttccagttttaaaaacgtaaaagcagttgaaacactcgatcagaaggcagatgaagttcttgattgtcatagtaaccaaaacagaccagatgaatgcaaaagtgaaggtcagtcagccaaggagatgctaggtagtg

SEQ ID NO: 29796 - DNA, 3822 bp, Macaca Mulatta
  misc_feature (1)...(3822): n = A,T,C or G
ggaccttaggtgatccttagaaataaaggctagttcctgttcggccttggagtagggcgaagaggtgtagacaggcctcaagaagcgaagtaacagcctgagtaaaagcaagacggtggagagtatgagatacatctcatccttagtaaatacttagatgacttcccctcctcccggagtcaagcacaattcggggatgcaatgatgaacgtaggtgaagatactacaggaacttacagacaactggtttgtggcctgtttgattcctgtcagaggtttgctgacccaagacagtatcgaaaatgcatattaagtcaattattctagagggattcaagtcctatgctcagagaaccgaagtcaatggttttgaccccctcttcaatgctatcactggcttaaatggtagtggaaaatcaaacatattggactccatctgctttttgctgggcatctccaacctgtctcaggtnnnggttcgagcttctaatttacaagatttagtttacaaaaatgggcaggctggtattaccaaagcctctgtgtcaatcacatttgataattctgacaaaaagcaaagtcctttaggatttgaggttcatgatgaaatcacagtaacaaggcaggtgnnnnnnnnnnnnnnnnnnnnnnnnnnnnnnnnnnnnnnnnnnnnnnnnnnnnnnnnnnnnnnnnnnnnnnnnnnnnnnnnnnnnnnnnnnnnnnnnnnnnnnnnnnnnnnnnnnnnnnnnnnnnnnnnnnnnnnnnnnnnnnnnnnnnnnnnnnnnnnnnnnnnnnnnnnnnnnnnnnnnnnnnnnnnnnnnnnnnnnnnnnnnnnnnnnnnnnnnnnnnnnnnnnnnnnnnnnnnnnnnnnnnnnnnnnnnnnnnnnnnnnnnnnnnnnnnnnnnnnnnnnnnnnnnnnnnnnnnnnnnnnnnnnnnnnnnnnnnnnnnnnnnnnnnnnnnnnnnnnnnnnnnnnnnnnnnnnnnnnnnnnnnnnnnnnnnnnnnnnnnnnnnnnnnnnnnnnnnnnnnnnnnnnnnnnnnnnnnnnnnnnnnnnnnnnnnnnnnnnnnnnnnnnnnnnnnnnnnnnnnnnnnnnnnnnnnnnnnnnnnnnnnnnnnnnnnnnnnnnnnnnnnnnnnnnnnnnnnnnnnnnnnnnnnnnnnnnnnnnnnnnnnnnnnnnnnnnnnnnnnnnnnnnnnnnnnnnnnnnnnnnnnnnnnnnnnnnnnnnnnnnnnnnnnnnnnnnnnnnnnnnnnnnnnnnnnnnnnnnnnnnnnnnnnnnnnnnnnnnnnnnnnnnnnnnnnnnnnnnnnnnnnnnnnnnnnnnnnnnnnnnnnnnnnnnnnnnnnnnnnnnnnnnnnnnnnnnnnnnnnnnnnnnnnnnnnnnnnnnnnnnnnnnnnnnnnnnnnnnnnnnnnnnnnnnnnnnnnnnnnnnnnnnnnnnnnnnnnnnnnnnnnnnnnnnnnnnnnnnnnnnnnnnnnnnnnnnnnnnnnnnnnnnnnnnnnnnnnnnnnnnnnnnnnnnnnnnnnnnnnnnnnnnnnnnnnnnnnnnnnnnnnnnnnnncaggctcagatgaagctgaagcatgctcaacaggaattaaagaataaacaannnnnnnnnnnnnnnnnnnnnnnnnnnnnnnnnnnnnnnnnnnnnnnnnnnnnnnnnnnnnnnnnnnnnnnnnnnnnnnnnnnnnnnnnnnnnnnnnnnnnnnnnnnnnnnnnnnnnnnnnnnnnnnnnnnnnnnnnnnnnnnnnnnnnnnnnnnnnnnnnnnnnnnnnnnnnnnnnnnnnnnnnnnnnnnnnnnnnnnnnnnnnnnnnnnnnnnnnnnnnnnnnnnnnnnnnnnnnnnnnnnnnnnnnnnnnnnnnnnnnnnnnnnnnnnnnnnnnnnnnnnnnnnnnnnnnnnnnnnnnnnnnnnnnnnnnnnnnnnnnnnnnnnnnnnnnnnnnnnnnnnnnnnnnnnnnnnnnnnnnnnnnnnnnnnnnnnnnnnnnnnnnnnnnnnnnnnnnnnnnnnnnnnnnnnnnnnnnnnnnnnnnnnnnnnnnnnnnnnnnnnnnnnnnnnnnnnnnnnnnnnnnnnnnnnnnnnnnnnnnnnnnnnnngttggccctgacagcgttcgtgtggctctttccctggttgaatataaaccagaacttcagaaagcaatggagtttgtctttggaacaacatttgtttgtgacaatatggataatgccaaaaaagtggcctttgataagaggataatgactagaactgtaactctcggaggcgatgtgtttgatccgcatgggacattgagtggaggnnnnnnnnnnnnnnnnnnnnnnnnnnnnnnnnnnnnnnnnnnnnnnnnnnnnnnnnnnnnnnnnnnnnnnnnnnnnnnnnnnnnnnnnnnnnnnnnnnnnnnnnnnnnnnnnnnnnnnnnnnnnnnnnnnnnnntatcgccaactaaaacagcagtgggagatgaaaactgaagaggcagatttattacaaaccaagctccagcaaagctcatatcacaagcaacaagaagaattagatgcccttnnnnnnnnnnnnnnnnnnnnnnnnnnnnnnnnnnnnnnnnnnnnnnnnnnnnnnnnnnnnnnnnnnnnnnnnnnnnnnnnnnnnnnnnnnnnnnnnnnnnnnnnnnnnnnnnnnnnnnnnnnnnnnnnnnnnnnnnnnnnnnnnnnnnnnnnnnnnnnnnnnnnnnnnnnnnnnnnnnnnnnnnnnnnnnnnnnnnnnnnnnnnnnnnnnnnnnnnnnnnnnnnnnnnnnnnnnnnnnnnnnnnnnnnnnnnnnnnnnnnnnnnnnnnnnnnnnnnnnnnnnnnnnnnnnnnnnnnnnnnnnnnnnnnnnnnnnnnnnnnnnnnnnnnnnnnnnnnnnnnnnnnnnnnnnnnnnnnnnnnnnnnnnnnnnnnnnnnnnnnnnnnnnnnnnnnnnnnnnnnnnnnnnnnnnnnnnnnnnnnnnnnnnnnnnnnnnnnnnnnnnnnnnnnnnnnnnnnnnnnnnnnnnnnnnnnnnnnnnnnnnnnnnnnnnnnnnnnnnnnnnnnnnnnnnnnnnnnnnnnnnnnnnnnnnnnnnnnnnnnnnnnaggtatccaaaatgttgaaagattatgactggattaatgcagagagacacctctttggcaaacccaatagtgcctatgatttcaaaactaacaaccctaaagaagctggtcagagacttcagaagttgcaagaaatgaaggagaaactaggaagaaatgtcaatatgagagctatgaatgtattgacagaagctgaagagcnnnnaatgacttgatgaagaagaagagaattgtagaaaatgacaaatccaaaattcttacaactatagaagacctagaccagaagaaaaaccaagccctaaatattgcatggcaaaaggnnnnnnnnnnnnnnnnnnnnnnnnnnnnnnnnnnnnnnnnnnnnnnnnnnnnnnnnnnnnnnnnnnnnnnnnnnnnnnnnnnnnnnnnnnnnnnnnnnnnnnnnnnnnnnnnnnnnnnnnnnnnnnnnnnnnnnnnnnnnnnnnnnnnnnnnnnnnnnnnnnnnnnnnnnnnnnnnnnnnnnnnnnnnnnnnnnnnnnnnnnnnnnnnnnnnnnnnnnnnnnnnnnnnnnnnnnnnnnnnnnnnnnnnnnnnnnnnnnnnnnnnnnnnnnnnnnnnnnnnnnnnnnnnnnnnnnnnnnnnnnnnnagttcatcgtggtgtcactaaaagaaggtatgttcaacaatgcaaacgttctattcaaaaccaagtttgtggatggtgtttctacagtagccagatttactca

SEQ ID NO: 29797 - DNA, 1740 bp, Macaca Mulatta
  misc_feature (1)...(1740): n = A,T,C or G
agatgatgtcattgagaagcagattgaggatggtctcctgcgaccagagctccgggagagggtcagttacgtcctcctgaggaggcaccgtcaccaaaccaagaagcccatccaccgctcgttagtcgacattgggaagtcagtctccaccacaagnnnnnnnnnnnnnnnnnnnnnnnnnnnnnnnnnnnnnnnnnnnnnnnnnnnnnnnnnnnnnnnnnnnnnnnnnnnnnnnnnnnnnnnnnnnnnnnnnnnnnnnnnnnnnnnnnnnnnnnnnnnnnnnnnnnnnnnnnnnnnnnnnnnnnnnnnnnnnnnnnnnnnnnnnnnnnnnnnnnnnnnnnnnnnnnnnnnnnnnnnnnnnnnnnnnnnnnnnnnnnnnnnnnnnnnnnnnnnnnnnnnnnnnnnnnnnnnnnnnnnnnnnnnnnnnnnnnnnnnnnnnnnnnnnnnnnnnnnnnnnnnnnnnnnnnnnnnnnnnnnnnnnnnnnnnnnnnnnnnnnnnnnnnnnnnnnnnnnnnnnnnnnnnnnnnnnnnnnnnnnnnnnnnnnnnnnnnnnnnnnnnnnnnnnnnnnnnnnnnnnnnnnnnnnnnnnnnnnnnnnnnnnnnnnnnnnnnnnnnnnnnnnnnnnnnnnnnnnnnnnnnnnnnnnnnnnnnnnnnnnnnnnnnnnnnnnnnnnnnnnnnnnnnnnnnnnnnnnnnnnnnnnnnnnnnnnnnnnnnnnnnnnnnnnnnnnnnnnnnnnnnnnnnnnnnnnnnnnnnnnnnnnnnnnnnnnnnnnnnnnnnnnnnnnnnnnnnnnnnnnnnnnnnnnnnnnnnnnnnnnnnnnnnnnnnnnnnnnnnnnnnnnnnnnnnnnnnnnnnnnnnnnnnnnnnnnnnnnnnnnnnnnnnnnnnnnnnnnnnnnnnnnnnnnnnnnnnnnnnnnnnnnnnnnnnnnnnnnnnnnnnnnnnnnnnnnnnnnnnnnnnnnnnnnnnnnnnnnnnnnnnnnnnnnnnnnnnnnnnnnnnnnnnnnnnnnnnnnnnnnnnnnnnnnnnnnnnnnnnnnnnnnnnnnnnnnnnnnnnnnnnnnnnnnnnnnnnnnnnnnnnnnnnnnnnnnnnnnnnnnnnnnnnnnnnnnnnnnnnnnnnnnnnnnnnnnnnnnnnnnnnnnnnnnnnnnnnnnnnnnnnnnnnnnnnnnnnnnnnnnnnnnnnnnnnnnnnnnnnnnnnnnnnnnnnnnnnnnnnnnnnnnnnnnnnnnnnnnnnnnnnnnnnnnnnnnnnnnnnnnnnnnnnnnnnnnnnnnnnnnnnnnnnnnnnnnnnnnnnnnnnnnnnnnnnnnnnnnnnnnnnnnnnnnnnnnnnnnnnnnnnnnnnnnnnnncctggctgactccttccactccatctggtctccgtcatgctgcagagtgtccatctctgtgaagagggtggggttgggagcctcatcttcctcccccaggatgtcctggagctgctcagcagctggggacccnnnnnnnnnnnnnnnnnnnnnnnnnnnnnnnnnnnnnnnnnnnnnnnnnnnnnnnnnnnnnnnnnnnnnnnnnnnnnnnnnnnnnnnnnnnnnnnnnnnnnnnnnnnnnnnnnnnnnnnnnnnnnnncgggcgcctgcttgggaattcctgcaagtttatcacagacctggcgctcatgtccttcatccttttctttgggacatattccatgaccctgaccctgaagaagttcaaattcagccgctattttcctaccaa

SEQ ID NO: 29798 - DNA, 964 bp, Macaca Mulatta
  misc_feature (1)...(964): n = A,T,C or G
gggacaattccctgggcgggctctctcctcccgccgcccaagatgccgaaaggaaagaaggccaagggaaagaaggtggctccggcccctgctgtcgtgaaaaagcaggaggccaagaaagtggtgaatcccctgtttgagaaaagacctaagaattttggcattggacaggacatccagcccaaaagagacctcacccgctttgtgaaatggcctcgctatatcaggttgcagcggcagagagccatcctctataagcggctgaaagtgcctcctgctattaaccagttcacccaggccctggaccgccaaacagctactcagctgcttaagctggcccacaagtacagaccagagacaaaacaagagaagaagcagaggctgttggcccgggccgagaagaaagctgctggcaaaggggatgtccccactaaaagaccacctgtccttcgagcaggagttaacaccgtcaccaccttggtggagaacaagaaggctcagctggtggtgattgcacatgacgtagatcccatcgagctggttgtcttcttgcctgccctgtgtcgtaaaatgggggtcccttactgcattatcaaggggaaggccagactgggccgtctagtccacagggaagacctgcaccactgtcgcccttcacacaggtgaaactcgggaagaacaaaggcgctttggctaagctgggtgggaagctatccagggaccaatttacaacgacagataccaatgaagatccgccgttcactgggggcgggcaatgtccctggggtcccaaagtctgtgggcctcgttattcgccaagctcgaaaaggcaaaggctaaagaacttgccactaagctgggttaaatgtacactggttgagtttttctgtacattaaaaataatttaaaaattcaaattttttcttttcnnnnananaaanaanantaaataattacaataanc

SEQ ID NO: 29799 - DNA, 552 bp, Macaca Mulatta
ggatgccagtctgtaaccttagatgaacacaattatttaactgagatgatctttatccatacttttctctatttattgcttgctttgcacaggaaggaactgcaggagctgcagaatctttacaaacagaacagtacacatacagcccagcaagcagagctgatccagcagcttcaggttctcaatatggacacacaaaaagtactgagaaatcaggaagatgttcacacagctgaaagtatatcataccaaaaagtatgcttttattctgtaataaaaatgtaaatgtttatgtatgaacttatggacatacagagaatttatattttttcacatttcagcatttcattattacttccttttacatatgtttcctcaaaatttggaagtgaaggatggttcaatttggtaacatttaaaattttgtgaattttctttatggtaattagagctgaatcacttaaaatatagatagagatttgctctgtaggtattatttttataaattggcattcccatagctgcagtgaaacatactaggagtatagtctt

SEQ ID NO: 29800 - DNA, 2115 bp, Macaca Mulatta
  misc_feature (1)...(2115): n = A,T,C or G
ggccctcgggcccacttctgctttgcactatgttcattttggggttgtttctcacccatccaagggtctccagtgagatggctgcttgctgtctgagatgagggttcctaaaccttaaacctatctgcctctggaggagggtgggggactctggcaggatgaatcacaggatggcgtactgaagccacgatgttcgtccaggccaaagcatggtgtcctgggataggtttcccaggcaggggcatggcagagccggcaggcaccctgcagcctccctgctcccagcccaaggccagtcggcctgggaagttcactgccccaactcctttcccgggaccatactgagtcccccagccacgctgctgacattcttattacctttattatcttaccaagtaaactcactcctcttcccccacaggggttacaaccatctggttgtccctcccactcttcagaggcgaggccccacatctggggggttggagggaccctgtgtcttactcgcccctctagcctaagggccactctggttctctgccaaggttgcttgccctcaccccaatgctccaacagccattgcctgactcatgggctctgcccttctgttcggtgccctccacgnnnnnnnnnnnnnnnnnnnnnnnnnnnnnnnnnnnnnnnnnnnnnnnnnnnnnnnnnnnnnnnnnnnnnnnnnnnnnnnnnnnnnnnnnnnnnnnnnnnnnnnnnnnnnnnnnnnnnnnnnnnnnnnnnnnnnnnnnnnnnnnnnnnnnnnnnnnnnnnnnnnnnnnnnnnnnnnnnnnnnnnnnnnnnnnnnnnnnnnnnnnnnnnnnnnnnnnnnnnnnnnnnnnnnnnnnnnnnnnnnnnnnnnnnnnnnnnnnnnnnnnnnnnnnnnnnnnnnnnnnnnnnnnnnnnnnnnnnnnnnnnnnnnnnnnnnnnnnnnnnnnnnnnnnnnnnnnnnnnnnnnnnnnnnnnnnnnnnnnnnnnnnnnnnnnnnnnnnnnnnnnnnnnnnnnnnnnnnnnnnnnnnnnnnnnnnnnnnnnnnnnnnnnnnnnnnnnnnnnnnnnnnnnnnnnnnnnnnnnnnnnnnnnnnnnnnnnnnnnnnnnnnnnnnnnnnnnnnnnnnnnnnnnnnnnnnnnnnnnnnnnnnnnnnnnnnnnnnnnnnnnnnnnnnnnnnnnnnnnnnnnnnnnnnnnnnnnnnnnnnnnnnnnnnnnnnnnnnnnnnnnnnnnnnnnnnnnnnnnnnnnnnnnnnnnnnnnnnnnnnnnnnnnnnnnnnnnnnnnnnnnnnnnnnnnnnnnnnnnnnnnnnnnnnnnnnnnnnnnnnnnnnnnnnnnnnnnnnnnnnnnnnnnnnnnnnnnnnnnnnnnnnnnnnnnnnnnnnnnnnnnnnnnnnnnnnnnnnnnnnnnnnnnnnnnnnnnnnnnnnnnnnnnnnnnnnnnnnnnnnnnnnnnnnnnnnnnnnnnnnnnnnnnnnnnnnnnnnnnnnnnnnnnggcggtggaggtgcagcagctgctgctcaggcgccatgccctaaagaggcagggtacagacggggctgggagggcaaagatggggtggggcctccccctgagagagctcaccctccacagcgacccttttccttcctgcctaatcccgttgggctgcgaccttttcctcctgccctcagtttctgaaacagaaatctttggggcctcccctttccccagagtctggccagagctgatgaggtcctgaggaacaatgtccccaggaaccacgttctggagcctggtggccagatgtggcttctcctgagttctagggctcgggccagagtggccctactgcccggccagtccaggctcaggcaggaatcggatataggggcccgggctctgcacagagagctgggcttgagtggagtcgattgtagatttctcccaaggggatcacttagcttctcactgacacacccttcccaattgccactagcacaggggtatcttacagcactttggggaggggtgggacaaacggcaaggttctggggccaaggcctacccaggggcctctggccagagaaatcacaacccccctctgacctaggggtcaatgcaaacaggtcacagtgc

SEQ ID NO: 29801 - DNA, 2222 bp, Macaca Mulatta
  misc_feature (1)...(2222): n = A,T,C or G
attcttgtatgcggcgccgaaaatggatccggtacaggagatacaagtcccgggacatctgggccaannnnnnnnnnnnnnnnnnnnnnnnnnnnnnnnnnnnnnnnnnnnnnnnnnnnnnnnnnnnnnnnnnnnnnnnnnnnnnnnnnnnnnnnnnnnnnnnnnnnnnnnnnnnnnnnnnnnnnnnnnnnggtgtggtacagagaggacgtcagccactccnnnnnnnnnnnnnnnnnnnnnnnnnnnnnnnnnnnnnnnnnnnnnnnnnnnnnnnnnnnnnnnnnnnnnnnnnnnnnnnnnnnnnnnnnnnnnnnnnnnnnnnnnnnnnnnnnnnnnnnnnnnnnnnnnnnnnnnnnnnnnnnnnnnnnnnnnnnnnnnnnnnnnnnnnnnnnnnnnnnnnnnnnnnnnnnnnnnnnnnnnnnnnnnnnnnnnnnnnnnnnnnnnnnnnnnnnnnnnnnnnnnnnnnnnnnnnnnnnnnnnnnnnnnnnnnnnnnnnnnnnnnnnnnnnnnnnnnnnnnnnnnnnnnnnnnnnnnnnnnnnnnnnnnnnnnnnnnnnnnnnnnnnnnnnnnnnnnnnnnnnnnnnnnnnnnnnnnnnnnnnnnnnnnnnnnnnnnnnnnnnnnnnnnnnnnnnnnnnnnnnnnnnnnnnnnnnnnnnnnnnnnnnnnnnnnnnnnnnnnnnnnnnnnnnnnnnnnnnnnnnnnnnnnnnnnnnnnnnnnnnnnnnnnnnnnnnnnnnnnnnnnnnnnnnnnnnnnnnnnnnnnnnnnnnnnnnnnnnnnnnnnnnnnnnnnnnnnnnnnnnnnnnnnnnnnnnnnnnnnnnnnnnnnnnnnnnnnnnnnnnnnnnnnnnnnnnnnnnnnnnnnnnnnnnnnnnnnnnnnnnnnnnnnnnnnnnnnnnnnnnnnnnnnnnnnnnnnnnnnnnnnnnnnnnnnnnnnnnnnnnnnnnnnnnnnnnnnnnnnnnnnnnnnnnnnnnnnnnnnnnnnnnnnnnnnnnnnnnnnnnnnnnnnnnnnnnnnnnnnnnnnnnnnnnnnnnnnnnnnnnnnnnnnnnnnnnnnnnnnnnnnnnnnnnnnnnnnnnnnnnnnnnnnnnnnnnnnnnnnnnnnnnnnnnnnnnnnnnnnnnnnnnnnnnnnnnnnnnnnnnnnnnnnnnnnnnnnnnnnnnnnnnnnnnnnnnnnnnnnnnnnnnnnnnnnnnnnnnnnnnnnngcctgtctccctcggtgcagacgctgtccctgtccatcacgccggcccagaccgccgcctggaggaagcagatcttccagcagctcacagaaaggaccaagcgggagctggagaacttcagacactacgagcaggctgtggagcagnnnnnnnnnnnnnnnnnnnnnnnnnnnnnnnnnnnnnnnnnnnnnnnnnnnnnnnnnnnnnnnnnnnnnnnnnnnnnnnnnnnnnnnnnnnnnnnnnnnnnnnnnnnnnnnnnnnnnnnnnnnnnnnnnnnnnnnnnnnnnnnnnnnnnnnnnnnnnnnnnnnnnnnnnnnnnnnnnnnnnnnnnnnnnnnnnnnnnnnnnnnnnnnnnnnnnnnnnnnnnnnnnnnnnnnnnnnnnnnnnnnnnnnnnnnnnnnnnnnnnnnnnnnnnnnnnnnnnnnnnnnnnnnnnnnnnnnnnnnnnnnnngctcgccctgctcagcctgtcctgctgcgagagccgaaaggtgcaggaccgcccgtccccgcaggccatctggtccatcacctgcaagggggacatcttcgtgagcgagcccagcccagacctggaggcccatgagcaccccctgccctgcgaccagatgnnnnnnnnnnnnnnnnnnnnnnnnnnnnnnnnnnnnnnnnnnnnnnnnnnnnnnnnnnnnnnnnnnnnnnnnnnnnnnnnnnnnnnnnnnnnnnnnnnnnnnnnnnnnnnnnnnnnnnnnnnnnnnnnnnnnnnnnnnnnnnnnnnnnnnnnnnnnnnnnnnnnnnnnnnnnnnnnnnnnnnnnnnnnnnnnnnnnnnnnnnnnnnnnnnnnnnnnnnnnnnnnnnnnnnnnnnnnnnnnnnnnnnnnnnnnnnnnnnnnnnnnnnnnnnnnnnnnnnnnnnnnnnnnnnnnnnnnnnnnnnnnnnnnnnnnnnnnnnnnnnnnnggtttccgactggttcgtggatttcagcgtcccagggggcacggaccaggaggggtggcagtacgccagcgacttccctg

SEQ ID NO: 29802 - DNA, 306 bp, Macaca Mulatta
gtttaactcggctgctaagcagctgatagaatgggataagcctcctgtgccaggagttgatgctggagaatgttcctcggcggcagcccagagcagcactgccccaaagcactccgacaccaagaagaacaccaaaaagcggcactccttcacttccctcactatggccaacaagtcctcccaggcatcccagaaccgccactccatggagatcagcccccctgtcctcatcagctccagcaaccccactgctgctgcacggatcagcgagctgtctggcctctcctgcagtgccccttctcaggt

SEQ ID NO: 29803 - DNA, 618 bp, Macaca Mulatta
  misc_feature (1)...(618): n = A,T,C or G
agacatgtctgaggcatcccaactgcgaatcatcccataaaaacaaagaaggagtatttgaccgcatgaaagtggcattggataaggtcattgaaattgtgactgactgtaaaccgaatggagagactgacatttcatctgtcagtatttttactggaattaaggaattcaagnnnnnnnnnnnnnnnnnnnnnnnnnnnnnnnnnnnnnnnnnnnnnnnnnnnnnnnnnnnnnnnnnnnnnnnnnnnnnnnnnnnnnnnnnnnnnnnnnnnnnnnnnnnnnnnnnnnnnnnnnnnnnnnnnnnnnnnnnnnnnnnnnnnnnnnnnnnnnnnnnnnnnnnnnnnnnnnnnnnnnnnnnnnnnnnnnnnnnnnnncaaagcaagaaaacaaaaagcatcgctgaagaactggaactcagtattttgaaaatcagtcacagtcttaatgaacttaagaaagannnnnnnnnnnnnnnnnnnnnnnnnnnnnnnnnnnnnnnnnnnnnnnnnnnnnnnnnnnnnnnnnnnnnnnnnnnnnnnnnnnnnnnnnnnnnnnnnnttagaagctttggctgaatatgcctgtaaactctctgaacagaaagagcagcttgttgag

SEQ ID NO: 29804 - DNA, 1040 bp, Macaca Mulatta
  misc_feature (1)...(1040): n = A,T,C or G
gggctctttctgccgccatcttggttctgcgttccctgaacaaaatgcccggagaagccacagaaaccgtccctgctacagagcaggagttgccgcagccccaggctgagacagggtctggaacagaatctgatagtgatgaatcagtacaagagcttgaagaacaggattccacctaggcaaccacacaacaagcccagctggcggcagcagctgaaattgatgaagaaccagtcagtaaagcaaaacagagtcggagtgaaaagaaggcacggaaggctatgtccaaactgggtcttcgacaggttacaggagttactagagtcactatccggaaatctaagaatatcctctttgtcatcacaaaaacagatgtctacaaaaaccctgcttcagatacttacatagtttctggggaaaccaaaattcgaaaatttatcccgagcaagctacaaactagccagcctgctgaagaaaatttcaaaaagtttcaagggtggaaagcctggtacctccaaaaatattttcaaaagaaaaaaactgcaacgcagaaacttctcaaaaccccgtttaccaaaagaaaagggaaacgaaaggtggtaaaacccaaggggaaatagaaagggtgtccctgtaaattgtgtaaatatcacacggtgtggtcttaagnaaaaaacatttctatattagtaacacctatacaggaaaattgtggggggatcacatcggggagtcacgcacaaaagctgcgacaaattggtgtgtttctcctcgaacgaaaagacctctataagaggggaaaagaaatatcccacgaaaaacctccccctagtggaaagaggtaaacacatccacgtaaggtcctcatagtggggaagcttaaatttgtggtaaaaaaaaactgatcgacgctaactcaaatgtgtggagtaaaatattcaaaaacctatgaaggggttataaacaccccatctcgcctgagaacaaaaatgataaccnnnnnnnnnnnnnnnnnnnnggggagatggattccacacaca

SEQ ID NO: 29805 - DNA, 189 bp, Macaca Mulatta
aggtctcaactcctcccaaatgaacagaagccggtatgggagaagatatctcctcggggacccgcaaaggaatccccgagcagcgtgcagccacagcccttggagaccagtcacaaatacgagtctggggggcccctgtacatccaagagactggtgaggagcaggagttcactcaagatccgagaaag

SEQ ID NO: 29806 - DNA, 459 bp, Macaca Mulatta
ggaggctgcgctgagtcccgacggcatcgccacgtgccggcggcaaaggaaagaggaaattcccggaggaggcggcggagggcggcggtggcgcgggtctggtaggcagccggggccgcttcgcagagcggcccctcccggcctccaaggaggatctggtgtgcacaccgcagcagtaccgagcctcgggcagctacttcggcctggaagagaacggccgcctcttcgcgccgcccagtcccgagacgggcgaggcgaagcgcagcgccttcgtggaggtgaagaaggctattcgcgcggccggcctgcaggaggaggggaccgccgacggcgggggcgtcgcctccgaggaccaggacgctggcggcggcggcggctcctccacacccgcggccgcgtcgccggtaggcgccgagaagctgttggccccgcggcccggtggcccgctgccctgccggt

SEQ ID NO: 29807 - DNA, 322 bp, Macaca Mulatta
tgcagacccgtgatcaccttagtgcttcagtggattcactggttagattaaaaagaggctgagatgagcagggaactaagaggccacacaaaagcagaggtttgggaattccagaagggaattcttctcaagcagtgtgtagttatctcctgcaccagcctaagaacgtttgctgaaactgcttcctagaactgtgaggaaagcaggaaagtcgtgcacagtactctaagattattaccttcattaataccaacaggctgcaaagcaggagtatagattattgtataatccaggtagaggtcaaaaggaaggaagaagttga

SEQ ID NO: 29808 - DNA, 2003 bp, Macaca Mulatta
  misc_feature (1)...(2003): n = A,T,C or G
ggctgccggaggggcggccgcgcgtggatgcggcgggagctggaagcctcgagcagccggcgccgtctctgccccggggcgccctatggcttgaagnnnnnnnnnnnnnnnnnnnnnnnnnnnnnnnnnnnnnnnnnnnnnnnnnnnnnnnnnnnnnnnnnnnnnnnnnnnnnnnnnnnnnnnnnnnnnnnnnnnnnnnnnnnnnnnnnnnnnnnnnnnnnnnnnnnnnnnnnnnnnnnnnnnnnnnnnnnnnnnnnnnnnnnnnnnnnnnnnnnnnnnnnnnnnnnnnnnnnnnnnnnnnnnnnnnnnnnnnnnnnnnnnnnnnnnnnnnnnnnnnnnnnnnnnnnnnnnnnnnnnnnnnnnnnnnnnnnnnnnnnnnnnnnnnnnnnnnnnnnnnnnnnnnnnnnnnnggtggtaggtgagtggaaattcagcaggattcactgtgacatcttcgtcactctggacgtcatgatgtgcacggcgagcattctgaacttgtgtgccatcagcatcgacaggtnnnnnnnnnnnnnnnnnnnnnnnnnnnnnnnnnnnnnnnnnnnnnnnnnnnnnnnnnnnnnnnnnnnnnnnnnnnnnnnnnnnnnnnnnnnnnnnnnnnnnnnnnnnnnnnnnnnnnnnnnnnnnnnnnnnnnnnnnnnnnnnnnnnnnnnnnnnnnnnnnnnnnnnnnnnnnnnnnnnnnnnnnnnnnnnnnnnnnnnnnnnnnnnnnnnnnnnnnnnnnnnnnnnnnnnnnnnnnnnnnnnnnnnnnnnnnnnnnnnnnnnnnnnnnnnnnnnnnnnnnnnnnnnnnnnnnnnnnnnnnnnnnnnnnnnnnnnnnnnnnnnnnnnnnnnnnnnnnnnnnnnnnnnnnnnnnnnnnnnnnnnnnnnnnnnnnnnnnnnnnnnnnnnnnnnnnnnnnnnnnnnnnnnnnnnnnnnnnnnnnnnnnnnnnnnnnnnnnnnnnnnnnnnnnnnnnnnnnnnnnnnnnnnnnnnnnnnnnnnnnnnnnnnnnnnnnnnnnnnnnnnnnnnnnnnnnnnnnnnnnnnnnnnnnnnnnnnnnnnnnnnnnnnnnnnnnnnnnnnnnnnnnnnnnnnnnnnnnnnnnnnnnnnnnnnnnnnnnnnnnnnnnnnnnnnnnnnnnnnnnnnnnnnnnnnnnnnnnnnnnnnnnnnnnnnnnnnnnnnnnnnnnnnnnnnnnnnnnnnnnnnnnnnnnnnnnnnnnnnnnnnnnnnnnnnnnnnnnnnnnnnnnnnnnnnnnnnnnnnnnnnnnnnnnnnnnnnnnnnnnnnnnnnnnnnnnnnnnnnnnnnnnnnnnnnnnnnnnnnnnnnnnnnnnnnnnnnnnnnnnnnnnnnnnnnnnnnnnnnnnnnnnnnnnnnnnnnnnnnnnnnnnnnnnnnnnnnnnnnnnnnnnnnnnnnnnnnnnnnnnnnnnnnnnnnnnnnnnnnnnnnnnnnnnnnnnnnnnnnnnnnnnnnnnnnnnnnnnnnnnnnnnnnnnnnnnnnnnnnnnnnnnnnnnnnnnnnnnnnnnnnnnnnnnnnnnnnnnnnnnnnnnnnnnnnnnnnnnnnnnnnnnnnnnnnnnnnnnnnnnnnnnnnnnnnnnnnnnnnnnnnnnnnnnnnnnnnnnnnnnnnnnnnnnnnnnnnnnnnnnnnnnnnnnnnnnnnnnnnnnnnnnnnnnnnnnnnnnnnnnnnnnnnnnnnnnnnnnnnnnnnnnnnnnnnnnnnnnnnnnnnnnnnnnnnnnnnnnnnnnnnnnnnnnnnnnnnnnnnnnnnnnnnnnnnnnnnnnnnnnnnnnnnnnnnnnnnnnnnnnnnnnnnnnnnnnnnnnnncaagctctctcgccgaggagccaggcaacttcagtcctgggagacccatgtaaataccagacagcaggatggaccccagagattgccaagccaaaaaccttagctccctcccacaccccaatggggacctctactttcctggcgagtccggacccgcctcatcccgttacagctccccaag

SEQ ID NO: 29809 - DNA, 148 bp, Macaca Mulatta
agggttacatgatgaattatcgccacagacggaaaaactggactgaacgatggtttgtactaaagcccaacataatttcttactatgtgagtgaggatctgaaagataagaaaggagacattctcttagatgaaattgctgtgtagag

SEQ ID NO: 29810 - DNA, 8022 bp, Macaca Mulatta
  misc_feature (1)...(8022): n = A,T,C or G
gatggacactgacgtcgttgtcctcacaacaggcgtcttggtgttgataaccatgctaccaatgattccacagtctgggaaacagcatcttcttgatttctttgacatttttggccgtctttcatcatggtgtctgaagaaaccaggnnggccacgtggcggaagtctatctcgtccatctccatgccagtgtgtacgcactctttcatcgcctttatggaatgtacccttgcaactttgtctcctttttgcgttctcattacagtatgaaagaaaacctggagacttttgaagaagtggtcaagnnnnnnnnnnnnnnnnnnnnnnnnnnnnnnnnnnnnnnnnnnnnnnnnnnnnnnnnnnnnnnnnnnnnnnnnggtggaagagattagaaactcatgatgttgtgatcgagtgtgccaaaatctctctggatcccacagaagcctcatatgaagatggctattctgtgtctcaccaaatctcagctcgctttcctcatcgttcagccgatgtcaccaccagcccttatgttgacacacagaatagctatggnnnnnnnnnnnnnnnnnnnnnnnnnnnnnnnnnnnnnnnnnnnnnnnnnnnnnnnnnnnnnnnnnnnnnnnnnnnnnnnnnnnnnnnnnnnnnnnnnnnnnnnnnnnnnnnnnnnnnnnnnnnnnnnnnnnnnnnnnnnnnnnnnnnnnnnnnnnnnnnnnnnnnnnnnnnnnnnnnnnnnnnnnnnnnnnnnnnnnnnnnnnnnnnnnnnnnnnnnnnnnnnnnnnnngtggaaaaggaactcctctgggaaccccagcaacctctcctcctccagccccactctgtcattcggatgactacgtgcacatttcactcccccaggccacagccacaccccccaggaaggnnnnnnnnnnnnnnnnnnnnnnnnnnnnnnnnnnnnnnnnnnnnnnnnnnnnnnnnnnnnnnnnncagaagagccacctggcagcaaaggttctgtcactctaagtgatcttccagggtttttaggtgatctggcctctgaagaagatagtattgaaaaagataaagaagaagnnnnnnnnnnnnnnnnnnnnnnnnnnnnnnnnnnnnnnnnnnnnnnnnnnnnnnnnnnnnnnnnnnnnnnnnnnnnnnnnnnnnnnnnnnnnnnnnnnnnnnnnnnnnnnnnnnnnnnnnnnnnnnnnnnnnnnnnnnnnnnnnnnnnnnnnnnnnnnnnnnnnnnnnnnnnnnnnnnnnnnnnnnnnnnnnnnnnnnnnnnnnnnnnnnnnnnnnnnnnnnnnnnnnnnnnnnnnnnnnnnnnnnnnnnnnnnnnnnnnnnnnnnnnnnnnnnnnnnnnnnnnnnnnnnnnnnnnnnnnnnnnnnnnnnnnnnnnnnnnnnnnnnnnnnnnnnnnnnnnnnnnnnnnnnnnnnnnnnnnnnnnnnnnnnnnnnnnnnnnnnnnnnnnnnnnnnnnnnnnnnnnnnnnnnnnnnnnnnnnnnnnnnnnnnnnnnnnnnnnnnnnnnnnnnnnnnnnnnnnnnnnnnnnnnnnnnnnnnnnnnnnnnnnnnnnnnnnnnnnnnnnnnnnnnnnnnnnnnnnnnnnnnnnnnnnnnnnnnnnnnnnnnnnnnnnnnnnnnngttgcctttacccagcaagtctgtcgactggacccactttggagnnaggctctcctccttcagatgagatccgcaccctccgagaccagttgcttttactgcacaaccagttactctacgagcgttttaagaggcagcagcatgccctgcggaacaggcggctcctccgcaaggtgatcaaagcagcagctctggaggaacataatgctgccatgaaagatcagttgaagttacaagagaaagacatccagatgtggaaggttagtctgcagaaagaacaagctagatacagtcagcttcaggagcagcgtgacactatggtgaccaagctccacagccagatcagacagctgcagcatgaccgagaggaattctacaaccagagccaggaattacannnnnnnnnnnnnnnnnnnnnnnnnnnnnnnnnnnnnnnnnnnnnnnnnnnnnnnnnnnnnnnnnnnnnnnnnnnnnnnnnnnnnnnnnnnnnnnnnnnnnnnnnnnnnnnnnnnnnnnnnnnnnnnnnnnnnnnnnnnnnnnnnnnnnnnnnnnnnnnnnnnnnnnnnnnnnnnnnnnnnnnnnnnnnnnnnnnnnnnnnnnnnnnnnnnnnnnnnnnnnnnnnnnnnnnnnnnnnnnnnnnnnnnnnnnnnnnnnnnnnnnnnnnnnnnnnnnnnnnnnnnnnnnnnnnnnnnnnnnnnnnnnnnnnnnnnnnnnnnnnnnnnnnnnnnnnnnnnnnnnnnnnnnnnnnnnnnnnnnnnnnnnnnnnnnnnnnnnnnnnnnnnnnnnnnnnnnnnnnnnnnnnnnnnnnnnnnnnnnnnnnnnnnnnnnnnnnnnnnnnnnnnnnnnnnnnnnnnnnnnnnnnnnnnnnnnnnnnnnnnnnnnnnnnnnnnnnnnnnnnnnnnnnnnnnnnnnnnnnnnnnnnnnnnnnnnnnnnnnnnnnnnnnnnnnnnnnnnnnnnnnnnnnnnnnnnnnnnnnnnnaggcttgactgttgtaatgacgggtgctcagattccatggtagggcacaatgaagaggcatctggccacaacggtgagaccaagacccccaggcccagcagcacccggggcagtagtggaagcagaggaggtggannnnnnnnnnnnnnnnnnnnngagctttccaccccggagaagcccccacaccagagggcgggcccattcagcagtcggtgggagacgacgacgggagaaccgtctgccagcatccctaccactgtgggctcacttcccagttcaaaaagcttcctgggtatgaaggcccgagagttatttcgtaataagagcgagagtcagtgtgatgaggacggcatgaccagtagcctttctgagagcctaaagacggaactgagcaaagacttgggtgtggaagccaagactcccctgaacctagatggcccgcacccatctcccccgaacccggacagtgttggacagctacatatcatggactacaatgagactcatcatgaacacagctaaggatggtggtcaatcagtgttaacttgcatattgttgacagcagaacaggaggtgtgaatgcacgtttcaaagctttctagtgtccagggtctgagtgcaagttcatgtgtggaaatgggacggaggtcctttggacagctgactgaatgcagaacggtttttggatctggcattgaaatgcctcttgaccttcccctccacccgccctaacccctctcatttacctcgcagtgtgttctaatccaagggccagttggtgttcctcagtagctttactttcttcctttccccccagaatggttgcgtcctttgaacctgtgcaatatgaggccaaatttaatctttgagtctaacacaccactttctgctttcctgaagctcagattactgggttggctctcagttagaccaggtagtttgttgcattgcaggtaagtctggttttgtcccttccaggaggacatagcctgcaaagctggttgtcttcacttgaaagctgtcacatgagacttttccactgctttttgattctgaagttcagcatctaaagcagcaggtctagaagagcaatggtttattcnnnnnnnnnnnnnnnnnnnnnnnnnnnnnnnnnnnnnnnnnnnnnnnnnnnnnnnnnnnnnnnnnnnnnnnnnnnnnnnnnnnnnnnnnnnnnnnnnnnnnnnnnnnnnnnnnnnnnnnnnnnnnnnnnnnnnnnnnnnnnnnnnnnnnnnnnnnnnnnnnnnnnnnnnnnnnnnnnnnnnnnnnnnnnnnnnnnnnnnnnnnnnnnnnnnnnnnnnnnnnnnnnnnnnnnnnnnnnnnnnnnnnnnnnnnnnnnnnnnnnnnnnnnnnnnnnnnnnnnnnnnnnnnnnnnnnnnnnnnnnnnnnnnnnnnnnnnnnnnnnnnnnnnnnnnnnnnnnnnnnnnnnnnnnnnnnnnnnnnnnnnnnnnnnnnnnnnnnnnnnnnnnnnnnnnnnnnnnnnnnnnnnnnnnnnnnnnnnnnnnnnnnnnnnnnnnnnnnnnnnnnnnnnnnnnnnnnnnnnnnnnnnnnnnnnnnnnnnnnnnnnnnnnnnnnnnnnnnnnnnnnnnnnnnnnnnnnnnnnnnnnnnnnnnnnnnnnnnnnnnnnnnnnnnnnnnnnnnnnnnnnnnnnnnnnnnnnnnnnnnnnnnnnnnnnnnnnnnnnnnnnnnnnnnnnnnnnnnnnnnnnnnnnnnnnnnnnnnnnnnnnnnnnnnnnnnnnnnnnnnnnnnnnnnnnnnnnnnnnnnnnnnnnnnnnnnnnnnnnnnnnnnnnnnnnnnnnnnnnnnnnnnnnnnnnnnnnnnnnnnnnnnnnnnnnnnnnnnnnnnnnnnnnnnnnnnnnnnnnnnnnnnnnnnnnnnnnnnnnnnnnnnnnnnnnnnnnnnnnnnnnnnnnnnnnnnnnnnnnnnnnnnnnnnnnnnnnnnnnnnnnnnnnnnnnnnnnnnnnnnnnnnnnnnnnnnnnnnnnnnnnnnnnnnnnnnnnnnnnnnnnnnnnnnnnnnnnnnnnnnnnnnnnnnnnnnnnnnnnnnnnnnnnnnnnnnnnnnnnnnnnnnnnnnnnnnnnnnnnnnnnnnnnnnnnnnnnnnnnnnnnnnnnnnnnnnnnnnnnnnnnnnnnnnnnnnnnnnnnnnnnnnnnnnnnnnnnnnnnnnnnnnnnnnnnnnnnnnnnnnnnnnnnnnnnnnnnnnnnnnnnnnnnnnnnnnnnnnnnnnnnnnnnnnnnnnnnnnnnnnnnnnnnnnnnnnnnnnnnnnnnnnnnnnnnnnnnnnnnnnnnnnnnnnnnnnnnnnnnnnnnnnnnnnnnnnnnnnnnnnnnnnnnnnnnnnnnnnnnnnnnnnnnnnnnnnnnnnnnnnnnnnnnnnnnnnnnnnnnnnnnnnnnnnnnnnnnnnnnnnnnnnnnnnnnnnnnnnnnnnnnnnnnnnnnnnnnnnnnnnnnnnnnnnnnnnnnnnnnnnnnnnnnnnnnnnnnnnnnnnnnnnnnnnnnnnnnnnnnnnnnnnnnnnnnnnnnnnnnnnnnnnnnnnnnnnnnnnnnnnnnnnnnnnnnnnnnnnnnnnnnnnnnnnnnnnnnnnnnnnnnnnnnnnnnnnnnnnnnnnnnnnnnnnnnnnnnnnnnnnnnnnnnnnnnnnnnnnnnnnnnnnnnnnnnnnnnnnnnnnnnnnnnnnnnnnnnnnnnnnnnnnnnnnnnnnnnnnnnnnnnnnnnnnnnnnnnnnnnnnnnnnnnnnnnnnnnnnnnnnnnnnnnnnnnnnnnnnnnnnnnnnnnnnnnnnnnnnnnnnnnnnnnnnnnnnnnnnnnnnnnnnnnnnnnnnnnnnnnnnnnnnnnnnnnnnnnnnnnnnnnnnnnnnnnnnnnnnnnnnnnnnnnnnnnnnnnnnnnnnnnnnnnnnnnnnnnnnnnnnnnnnnnnnnnnnnnnnnnnnnnnnnnnnnnnnnnnnnnnnnnnnnnnnnnnnnnnnnnnnnnnnnnnnnnnnnnnnnnnnnnnnnnnnnnnnnnnnnnnnnnnnnnnnnnnnnnnnnnnnnnnnnnnnnnnnnnnnnnnnnnnnnnnnnnnnnnnnnnnnnnnnnnnnnnnnnnnnnnnnnnnnnnnnnnnnnnnnnnnnnnnnnnnnnnnnnnnnnnnnnnnnnnnnnnnnnnnnnnnnnnnnnnnnnnnnnnnnnnnnnnnnnnnnnnnnnnnnnnnnnnnnnnnnnnnnnnnnnnnnnnnnnnnnnnnnnnnnnnnnnnnnnnnnnnnnnnnnnnnnnnnnnnnnnnnnnnnnnnnnnnnnnnnnnnnnnnnnnnnnnnnnnnnnnnnnnnnnnnnnnnnnnnnnnnnnnnnnnnnnnnnnnnnnnnnnnnnnnnnnnnnnnnnnnnnnnnnnnnnnnnnnnnnnnnnnnnnnnnnnnnnnnnnnnnnnnnnnnnnnnnnnnnnnnnnnnnnnnnnnnnnnnnnnnnnnnnnnnnnnnnnnnnnnnnnnnnnnnnnnnnnnnnnnnnnnnnnnnnnnnnnnnnnnnnnnnnnnnnnnnnnnnnnnnnnnnnnnnnnnnnnnnnnnnnnnnnnnnnnnnnnnnnnnnnnnnnnnnnnnnnnnnnnnnnnnnnnnnnnnnnnnnnnnnnnnnnnnnnnnnnnnnnnnnnnnnnnnnnnnnnnnnnnnnnnnnnnnnnnnnnnnnnnnnnnnnnnnnnnnnnnnnnnnnnnnnnnnnnnnnnnnnnnnnnnnnnnnnnnnnnnnnnnnnnnnnnnnnnnnnnnnnnnnnnnnnnnnnnnnnnnnnnnnnnnnnnnnnnnnnnnnnnnnnnnnnnnnnnnnnnnnnnnnnnnnnnnnnnnnnnnnnnnnnnnnnnnnnnnnnnnnnnnnnnnnnnnnnnnnnnnnnnnnnnnnnnnnnnnnnnnnnnnnnnnnnnnnnnnnnnnnnnnnnnnnnnnnnnnnnnnnnnnnnnnnnnnnnnnnnnnnnnnnnnnnnnnnnnnnnnnnnnnnnnnnnnnnnnnnnnnnnnnnnnnnnnnnnnnnnnnnnnnnnnnnnnnnnnnnnnnnnnnnnnnnnnnnnnnnnnnnnnnnnnnnnnnnnnnnnnnnnnnnnnnnnnnnnnnnnnnnnnnnnnnnnnnnnnnnnnnnnnnnnnnnnnnnnnnnnnnnnnnnnnnnnnnnnnnnnnnnnnnnnnnnnnnnnnnnnnnnnnnnnnnnnnnnnnnnnnnnnnnnnnnnnnnnnnnnnnnnnnnnnnnnnnnnnnnnnnnnnnnnnnnnnnnnnnnnnnnnnnnnnnnnnnnnnnnnnnnnnnnnnnnnnnnnnnnnnnnnnnnnnnnnnnnnnnnnnnnnnnnnnnnnnnnnnnnnnnnnnnnnnnnnnnnnnnnnnnnnnnnnnnnnnnnnnnnnnnnnnnnnnnnnnnnnnnnnnnnnnnnnnnnnnnnnnnnnnnnnnnnnnnnnnnnnnnnnnnnnnnnnnnnnnnnnnnnnnnnnnnnnnnnnnnnnnnnnnnnnnnnnnnnnnnnnnnnnnnnnnnnnnnnnnnnnnnnnnnnnnnnnnnnnnnnnnnnnnnnnnnnnnnnnnnnnnnnnnnnnnnnnnnnnnnnnnnnnnnnnnnnnnnnnnnnnnnnnnnnnnnnnnnnnnnnnnnnnnnnnnnnnnnnnnnnnnnnnnnnnnnnnnnnnnnnnnnnnnnnnnnnnnnnnnnnnnnnnnnnnnnnnnnnnnnnnnnnnnnnnnnnnnnnnnnnnnnnnnnnnnnnnnnnnnnnnnnnnnnnnnnnnnnnnnnnnnnnnnnnnnnnnnnnnnnnnnnnnnnnnnnnnnnnnnnnnnnnnnnnnnnnnnnnnnnnnnnnnnnnnnnnnnnnnnnnnnnnnnnnnnnnnnnnnnnnnnnnnnnnnnnnnnnnnnnnnnnnnnnnnnnnnnnnnnnnnnnnnnnnnnnnnnnnnnnnnnnnnnnnnnnnnnnnnnnnnnnnnnnnnnnnnnnnnnnnnnnnnnnnnnnnnnnnnnnnnnnnnnnnnnnnnnnnnnnnnnnnnnnnnnnnnnnnnnnnnnnnnnnnnnnnnnnnnnnnnnnnnnnnnnnnnnnnnnnnnnnnnnnnnnnnnnnnacataatctagttttataactcaatcatggatgaaccatgtgcggcaaacttgcagtttaaaggggtcccatcagtgaaaagaaactgattgtttttaacggactgctnttagttaaattgaagaaagtcaagctcttgtcaaaaggtctcaactttcccgcctcaatcctaaaagcatgtcaacaatccacatcagatgccataaaaatgaactgcaagataaaatggtacaatcttagtgaatgggaattggaatcaaaagggtttgctgtccttcttagaatgttctaaaacgtcaaggcagttgcttgtgtttaactgtgaacaaataaaaatttattgttttgcact

SEQ ID NO: 29811 - DNA, 285 bp, Macaca Mulatta
agatcatcaactttgttgacagggtctgtgtccttgtcctacctatggacctggtctttgtcttttatgtcctcatcatctccaccattcttacgattgcctcagctgaaggtcggaagaaggcctttgccacctgcgcctcccacctcacggtggtcatcatccactatggctgtgcctccatcatctacctgaagcctaagtcccagagttccctgggacaggacagactcatcgcagtgatctacactgtcatcactcccctactgaacactgttgtgtaca

SEQ ID NO: 29812 - DNA, 105 bp, Macaca Mulatta
tataatctggaatagtacggatttgggaacagagctttacaaaatggggtgaaatggatagtttttggtgacaggaacgtaaaaactctcattataagatggtca

SEQ ID NO: 29813 - DNA, 722 bp, Macaca Mulatta
caacatcgacagcactcatccactgctgctggaagtgagagggtccaagcctggtaagaacgtccagcttcaggagaatgaaatcagaggactgtgtttaaaatctcgtgaaatctttctcagtcagcctatcctactagaacttgaagcaccactcaaaatatgtggtgacatccatgggcaatactatgatttgctgcgactttttgagtacggtggtttcccgccagaaagcaactacctgtttcttggggactatgtggacaggggaaagcagtcattggagacgatctgcctcttactggcctacaaaatcaaatatcctgagaatttttttcttctcagagggaaccatgaatgtgccagcatcaacagaatttatggattttatgatgaatgtaaaagaagatacaacattaaactatggaaaactttcacagactgttttaactgtttaccgatagcagccatcgtggatgagaagatattctgctgtcatggaggtttatcaccagatcttcaatctatggagcagattcggcgaattatgcgaccaactgatgtaccagatcaaggtcttctttgtgatcttttgtggtctgaccccgataaagatgtcttaggctggggtgaaaatgacagaggagtgtccttcacatttggtgcagaagtggttgcaaaatttctccataagcatgatttggatcttatatgtagagccc

SEQ ID NO: 29814 - DNA, 352 bp, Macaca Mulatta
  misc_feature (1)...(352): n = A,T,C or G
agggtttggaccccgcaagccagacaaaggtggtagaactgctgaaagatggcagtggcgggcggggagaccgccgtggcagccgagacgtggccgggggtgccgggccccggtctgagtctgacctcgaggatgcgggacctacagctgagtggagtggggnggatggcagtggctccttgcggcgcagcggctcctttgggaagctccgagacgccctgaggcgcagcagtgagatgctagtaaagaagctgcaggggggcggcccccaggagccccctaaccccaggncaggatgaagcgagccagttccctcaacttcctcaacaagagcgtggaagagccgacccag

SEQ ID NO: 29815 - DNA, 979 bp, Macaca Mulatta
  misc_feature (1)...(979): n = A,T,C or G
nccgtggaccgagcctccaaccggcccctggagcccccatcagagttcatcatcaaagtgcaagacatcaacgacaatccacccatttttcnccttggaccctaccatgccaccgtgcccgagatgtccaatgtcgnnnnnnnnnnnnnnnnnnnnnnnnnnnnnnnnnnnnnnnnnnnnnnnnnnnnnnnnnnnnnnnnnnnnnnnnnnnnnnnnnnnnnnnnnnnnnnnnnnnnnnnnnnnnnnnnnnnnnnnnnnnnnnnnnnnnnnnnnnnnnnnnnnnnnnnnnnnnnnnnnnnnnnnnnnnnnnnnnnnnnnnnnnnnnnnnnnnnnnnnnnnnnnnnnnnnnnnnnnnnnnnnnnnnnnnnnnnnnnnnnnnnnnnnnnnnnnnnnnnnnnnnnnnnnnnnnnnnnnnnnnnnnnnnnnnnnnnnnnnnnnnnnnnnnnnnnnnnnnnnnnnnnnnnnnnnnnnnnnnnnnnnnnnnnnnnnnnnnnnnnnnnnnnnnnnnnnnnnnnnnnnnnnnnnnnnnnnnnnnnnnnnnnnnnnnnnnnnnnnnnnnnnnnnnnnnnnnnnnnnnnnnnnnnnnnnnnnnnnnnnnnnnnnnnnnnnnnnnnnnnnnnnnnnnnnnnnnnnnnnnnnnnnnnnnnnnnnnnnnnnnnnnnnnnnnnnnnnnnnnnnnnnnnnnnnnnnnnnnnnnnnnnnnnnnnnnnnnnnnnnnnnnnnnnnnnnnnnnnnnnnnnnnnnnnnnnnnnnnnnnnnnnnnnnnnnnnnnnnnnnnnnnnnnnnnnnnnnnnnnnnnnnnnnnnnnnnnnnnnnnnnnnnnnnnnnnnnnnnnnnnnnnnnnnnnnnnnnnnnnnnnnnncagatactccatcctcccccactcggatccggagcgttgcttctctatccagcccgaagaagggaccatccacacagcagcacccctggaccgcgaggctcgtgtctggcacgacct

SEQ ID NO: 29816 - DNA, 425 bp, Macaca Mulatta
ctgattcagaattatggaaaactttctgagggctggggaagtattggagggtcttttgctccatgtccagattcacttacatcaataaagtatttcttaatggagtattgctttcagttagcaaacatatgcttcacaggaaaaaaggacgtagatgaatctgttttatgtgctggtatttccagacaatttattccccttcataatttgtctcatttcattttatttcatccgcttggtagatgaagtcacgtgaaacagttgtggacattcttatatgttggttaactcttctgcaattttgtattcggtgttttccccgcaagtttagttcagctgacattggatcactgacaagattgtaataatctgtgatagtcttccttgcagctaaagaagaattgcagaaaccatgcaatatactt

SEQ ID NO: 29817 - DNA, 806 bp, Macaca Mulatta
acctcagtaagccccccacgccctgcgtggagaagaaaacctatgactgcagcgagtgtggcaaggcctttagccgaagctcgtccctgataaagcaccaaaggatccacacgggagaaaagccgtttgagtgcgacacctgtgggaagcacttcatcgagcgctcgtccctcaccatccaccagcgggtgcacacgggcgagaagccctatgcctgcggggactgcggcaaggccttcagccagcgcatgaacctcactgtgcaccagcgcacgcacacgggcgagaagccgtatgtgtgcgacgtgtgtgggaaggccttccggaagacgtcctctctcacccagcacgagcggatccacacgggggagaagccctacgcgtgcggggactgcggcaaggccttcagccagaacatgcacctcatcgtgcaccagcgcacgcacaccggggagaagccgtacgtgtgccccgagtgcgggcgagccttcagccagaacatgcacctgaccgagcaccagcgcacgcacaccggggagaagccgtacgcctgcaaggagtgcggcaaggccttcaacaagagctcctcgctcaccctgcaccagaggaaccacaccggcgagaagccctacgtgtgcggcgagtgcggcaaggccttcagccagagctcctacctcatccagcaccagcgcttccacatcggggtgaagccgttcgagtgcagcgagtgcggcaaggccttcagcaagaactcctcgctcacgcagcaccagcgcatccacaccggggagaagccctacgagtgc

SEQ ID NO: 29818 - DNA, 465 bp, Macaca Mulatta
ctttttaatacccatgtaaaaagcattagctcaaagacacttgcaaaattgttatcaggttgttttccttggtgtgtattaagtttgaagcaaaggggattttcagataccaagacaaagtagaagtcttccaccaagctgaaatcattacattgcaatttaatcatatgatacaaccaactttttgatgtgttatgccattcaccaaataccaacgatttttaggggaaactttacatcatcaatactgtacacttccagctatgccaccacctaacatggactttaaaaagaatacaaagtacagtatgccttctcagtgccttggtaggaattcagttacaattctgccaaactttaagaaatacaattctcaatcttacactgttcagagcacaagcacagcttattgtacacaagagatgtgcatctgttcccactcctcagggactgtatgaatttggc

SEQ ID NO: 29819 - DNA, 357 bp, Macaca Mulatta
tgcccgtccaccttgtgaggatcccagccagggctggctatgggagtctgagtgtgcacaagcagtgaaagaggatccagccctgagcatcacccaagtgcctgatgcctcaggtgacagaaggcaggacgttccatgccaaggctgccccctcacccaggagtctgagtccagcctctggaggggccaagaaccagggggccatcaaaagcatcgggatttggcattggttccagatgagcttttaaagcaaacatagcagttgtttgccatttcttgcactcagacctgtgtaatatatactcctggaaaccatcgttatgtcttttgtttgcttgttttccttcggtcaaccca

SEQ ID NO: 29820 - DNA, 970 bp, Macaca Mulatta
  misc_feature (1)...(970): n = A,T,C or G
gggattccagcggcggacagcacccgggccgagatgtctcgctcagtggccttagccgtgctggcgctactctctctttctggcctggaggctatccagcgtactccaaagattcaggtttactcacgccatccaccagagaatggaaagccaaatttcctgaattgctatgtgtctggatttcatccatctgatattgaagttgacttactgaagaatggagagaaaatgggaaaagtggagcattcagacttgtctttcagcaaagactggtctttctatctcttgtactacactgaattcacccccaatgaaaaagatgagtatgcctgccgtgtgaaccatgtgactttgtcagggcccaggacagttaagtggggattgagaaaatgtaagcagcatcatgggaggtttgaagaatgccgcattttgggattggatggaattcccaaattttgccttcccttgcctttttaataattggatatggcttttaaagagttttatgcgcaaaaaatggcagaaggttataaataatggggttaacaacaggggcgtggatcccttcttcttataaaaattcctcactttttgagagtgttcatcctccccccccgtttttgaaggagaatcctggggggcacgcctagccctttttagaggaggggctggtgggaactttctttaaggcgtggggggagaccaaaaaaaattctctctatatatttctcaaaatttcaaacatttttttgggtgtgtaaatattatgggagaggtctcttctaatatctcctttggcccttcccaaaacccttgggataaagaaataatgtttgtgccgtaattaaaaaagtgtttaaccttttcccaaatttttcactaaccggggggcctttaaaaattgggaggaaaaatttagaaatatattgatgggttattgaattgtaaatgcctnnncnnnnnnggngcc

SEQ ID NO: 29821 - DNA, 713 bp, Macaca Mulatta
  misc_feature (1)...(713): n = A,T,C or G
ggcctgcgtcgctatgggttcccccgccgccccggagggagcgctgggctacgtccgcgagttcactcgccactcctccgacgtgctgggcaacctcaacgagctgcgcctgcgcgggatcctcactgatgtcacagagctggttggcgggcaacccctcagggcacacaannnnnnnnnnnnnnnnnnnnnnnnnnnnnnnnnnnnnnnnnnnnnnnnnnnnnnnnnnnnnnnnnnnnnnnnnnnnnnnnnnnnnnnnnnnnnnnnnnnnnnnnnnnnnnnnnnnnnnnnnnnnnnnnnnnnnnnnnnnnnnnnnnnnnnnnnnnnnnnnnnnnnnnnnnnnnnnnnnnnnnnnnnnnnnnnnnnnnnnnnnnnnnnnnnnnnnnnnnnnnnnnnnnnnnnnnnnnnnnnnnnnnnnnnnnnnnnnnnnnnnnnnnnnnnnnnnnnnnnnnnnnnnnnnnnnnnnnnnnnnnnnnnnnnnnnnnnnnnnnnnnnggcgctccgaaggacacccagacccacctactgactttcgaagctgcagtcaaggcccccccagtccagccagccccgaccccaaggcctgcaactggaaaaagtacaactacatcgtgctaaactctcagacctcccaagcagggagcctagtcggggagaggagttctggtcaaccttgcccccaagccaggctccccagtggagatgaggcctcc

SEQ ID NO: 29822 - DNA, 124 bp, Macaca Mulatta
tgtccttctctgttgccaattctggaaccagaatatgccgcggaaaaaatagtagaagctattctacaagaaaaaatgtacttctatatgccaaagtttttatacttcatgatgtttcttaaaa

SEQ ID NO: 29823 - DNA, 380 bp, Macaca Mulatta
tggttcagaaccgagatcacctctataatttcctgctcctcaagatcaacctcttcaaccactgggtatcagggctggcccaggaggcccgggggtcctgtaactggcaggcccacctacccctgggagctgcagcctgcccgctgggccgggctctccgggctgggctggctctgatccaggtccccgtgtggctcgtgctacagggacccaggctgatgtgggctggcatgtggggcggcaccagggccctaggcctggccttgctcagtgcctgggagcagctgggcctgtctgtggccatctggacagacctatttttgtcatgtctgcacggcctgatgttggtggccttgctcctggtgatagtgacctggagg

SEQ ID NO: 29824 - DNA, 913 bp, Macaca Mulatta
  misc_feature (1)...(913): n = A,T,C or G
cactttatttattaattctcctccaatattagcataattaaagccnnnnnnnnnnnnnnnnnnnaggtgaaagatgagctcgaggaccgaaataggggtagctcccctgctgggaaaaagggccagaggccaaaggatgggacgggggtgaggctggggctaaggagcacgtggggggcccggggtacttctccctctgacactctcctctgtagaagctcttggtgacgggcgagctcaggccctgatgggtgacttcgcaggcatagactttgtgactctggtactctgtgctgctcagcgtcagggtgctgctcaggctgtaggtgttgtccttgctgtcctgctctgtgacactctcctgggagttacccgttttgagggcaccatccaccttccactttacgctggcctctctgggatagaagttattcagcaggcacacaacagagacagttccagatgtcacctgatcttcagatggcgggaagatgaagacagatggtggagccacagcccgtttgatctccactttggtccctcggccgaaagtgagcgggtaactattatactgttgacagtaataagttgcaaaatcttcaggctgcaggctgctgatggtgagagtgaaatctgtcccagatccactgccgctgaaccttgatgggaccccactttccaaactggatgcaccatagatcaggagcttaggggctttccctggtttctgctgataccaatctaaataattgctaatgccctgacttgcccggcaagtgatggtgactctgtctcctacagatgcagacagggaggatggagactgggtcatctggatgtcacatctggcacctgggagccagagcagcaggagccccaggagctgagctgaggaccctcgtgtccatctggg

SEQ ID NO: 29825 - DNA, 204 bp, Macaca Mulatta
aaatacagatctttattgagttccactgtgagtacaaagtattttagtggaaattcaagatggaatctgatgctgcatcccccactcctggagttccagatttctgtgctctgttcagactctccttatcagaaaccttaactgccctcagaagaataaaaatattccttagccagttttggcaaaagcaatttttaaaattca

SEQ ID NO: 29826 - DNA, 224 bp, Macaca Mulatta
aggtacaccacccaatgctgcagcactagaggcagcccaagacctgatccagtgtgccatggtcaaggggtacctgactcccaactacctgctggtgggccacagtgatgtggcccaaaccttgtctcctgggcaggctttgtacaatatcatcagcacctggtctcatttcaaacactgagagaagccccaggtttttctgagactgctctccctctcctgtc

SEQ ID NO: 29827 - DNA, 643 bp, Macaca Mulatta
cggtgcctcagccatggccgggacccttctcctcctcggcctccttgctcactgcacaggctctgcggtctcctatgagctgactcagccacgctcagtgtccgtgtccccaggacagacggccaggatcacctgtgggggagacaacattggaagtaaaagtgtgtagtggtaccagcagaggccaccgcaggcccctgttctggtcatctatgctgatagcgaacggccctcagggatccctgagcgattctctggctccaaatcagggaacaccgccaccctgaccatcagcggggtcgaggccggggatgaggctgactattactgtcaggtgtgggacattagtagtgatcatcccacagtgacacaggcagagtggggaagtgagaccaaaacaccctcccagcgtctgtcacattcttgctgcagccccgggaggcctgtggataaagccatgagtgaatctggtccaggttcacctggatctgagcctttcaggctgaccttccctccaggcccctccaggagtctctacagagcgtacatcaggcagagacatggcctggaaggaccagaatcatctggtgactatgtggatgttgtgtgagttagagaatgaaggcctgggtagaaacacaga

SEQ ID NO: 29828 - DNA, 648 bp, Macaca Mulatta
  misc_feature (1)...(648): n = A,T,C or G
taggaggtgagtccctgaggagacgctgtgacctaagggttcttgaccaaaaagacctcgtgcttcatctatcacaagtggtacccaggccagtggtaacaacaggaccatgctcaggcttctgagacttgctttggcccttttttcggaggacggctgaccccgcagagcggcagggcccacagcagcaggggctcccaaaaggnnnnnnnnnnnnnnnnnnnntgcagggagttgtgacaaggttctgcagtgattatgacttaactgatgatttgatctacttcagtagtgatgctgtgactggaaatgtacttctgaaagttggtcaaaaagttactgcagttgtggaagaagataannnnnnnnnnnnnnnnnnnnnnnnnnnnnnnnnnnnnnnnnnnnnnnnnnnnnnnnnnnnnnnnnnnnnnnnnnnnnnnnnnnnnnnnnnnnnnnnnnnnnnnnnnnnnnnnnnnnnnnnnnnnnnnnnnnnnnnnnnnnnnnnnnnnnnnnnnnnnnnnnnnnnnnnnnngattttgtgccttataagggtgacttgttagaagttgaatattccactgagccaggcatctcaaacatcaaggcaacttctgtgaagcccacccgttgtattcatgcggaagaggt

SEQ ID NO: 29829 - DNA, 600 bp, Macaca Mulatta
  misc_feature (1)...(600): n = A,T,C or G
ctaccatctcctgtttcccaagcaccatgaaactcctgctgttggctcttcctatccttgtgctcctaccccaagtgatcccagcctatggtggtgaaaaaaaatgctggaacagatcagggcactgcaggaaacaatgcaaagatggagaagcagtgaaagaaacatgcaaaaatcatcgagcctgctgcgttccatctaatgaagaccacaggcgacttcctacgacatctcccacacccttgagtgactcaacaccaggaattattgataatattttaacaataaggttcactacagactactttgaaataagcagcaagaaagacatggttgaagagtctgaggcgggacagggaactcagacctctcccccaaatgttcaccatacctcatgacttcttctcgaatgtcactcacccctgtcctcagagtgataaactaagtcacatacatatagataaaacaccacagtgacctcccacttcccaccaatatgtaattctattaatagaaacagctgtgtaaagaagtctaaaattttcactatttccaatgataaactcttcagtgctcttnnnnnnnnnnnnnnnnnnnnnn

SEQ ID NO: 29830 - DNA, 574 bp, Macaca Mulatta
gtagaaataagttttttaaaaatagtatgtttttgcagacttttgtgcttttgttgtcttctcttttgaatacctgaattcctcaagcaattccccttctcttctgtagctatccatgggaacttcttgcttacgggtgcctatgataacacagccaagatctggacgcacccaggctggtccccgctgaagactctggccggccatgaaggcaaagtgatgggcctagatatttcttccgatgggcagctcatagccacttgctcatatgataggaccttcaagctctggatggctgaatagatgacagtggagaaaggacttgaacctcaagctctttctaaggagctgttttcctcaaaagagaagaattgaagtgtttagttctatcatgttttctgccaattaccatgcgtagaccctcactagaattggatttccatgtcagcccccactccaggcaggcggcccaatccctaggtaatggtgaacccatctcatggttgaaaatttattacctttttatgccctgccatgaactgtgtagacattgtttttattaatcttttgtttg

SEQ ID NO: 29831 - DNA, 584 bp, Macaca Mulatta
cagcaggtgaaagaagataaaaaagctgaaaaagttgattttcgtcgcctaggagaagaattctgtcattggttctttggactccttaattctcagaatccttttctgggaccacctcaacatgaatgggggccacagcacttctggcatgatgtgaagcttaggttttattacaacacatcagaacaaaatgttacggactactatggagcagaaatcgtgagccttcgtttgctgtcactagtaaaagaagaatttctttttctcagccccaacctagattcacatggactgaaatgtgcatcttctcctcatggactggttatggttggagttgctgggactgtccatcgaggaaacacttgtttgggcatttttgaacaaatttttggactcatccgctgcccttttgtggagaatacttggaaaatcaaatttatcaacctgaaaattaggggagagagttcccttgctcctggaacattaccgaaaccagctgttaaatttgaacaaagtgatctagaggccttttataatgtaatcactttgtgtggtaccagcgaagtacgacataatgtaaagca

SEQ ID NO: 29832 - DNA, 537 bp, Macaca Mulatta
  misc_feature (1)...(537): n = A,T,C or G
gaaaagaacatggagacagatatagtcataaatcttcgatgcaagctcaaagaggctgaagaagagcgactaaaagctgcacagtatggtttacaacttgtggagagtcaaaatgaattacagaatcaattggataaatgtcgtannnnnnnnnnnnnnnnnnnnagagttatgaacaagaaaaatatacccttcaaagagaagttgaactcaagagccgaatgttagaaagtntgagctgtgaatgtgaagctattaaacaacaacaaaaaatgcacctggagaaattggaagaacaactaagcagaagccatggacaggaagtgaatgaactaaannnnagatagaaaaactgaaagtggaattagatgaagctaggcttagtgaaaagcagctgaagcaccaggtagatcatcagaaggaactcctctcttgtaaatcggaggaactacgtgtaatgtctgaacgtgtgcaggaaagcatgtcttcagagatgctggctcttcaaattgagctgacagaaatggagagcatgaa

SEQ ID NO: 29833 - DNA, 574 bp, Macaca Mulatta
  misc_feature (1)...(574): n = A,T,C or G
acctggggcacagaggaggggcccccggtcaggttcaacatggaagtgggtgaccctaatgccaggagctttggggttaggctgtgcctggggtgtcatgaactgggtggctcacaccccgaggtctcagttcccccaagcctgccctgcccctcctggccacagcagaggcctgcatgctgtctgacaggtgaacaccaggaggtgtttctttgaggcgcagctccacggtttataggacacgtaagcctcaggcactgtagggtccaggttgtgcccattttccagccaggactggtagcccatgtggcggccctgggtgagtcaccaggatccgcacatggagannnnnngtcccagcccacccttagttgtcacgtgggacagagtcgctgtctcaatcctctcggccctgctgctctgccctgcacacaggcccccatgacgaccttgagcctccaggcatccaccgccacnnnnnnnnnnnnnnnnnnagctgggcctcaccccactccctcagcttggatcctcacctggccttgagccagccttaaactcctgtatgtccttcaag

SEQ ID NO: 29834 - DNA, 6554 bp, Macaca Mulatta
  misc_feature (1)...(6554): n = A,T,C or G
gttttacctcacaaaaactactacaagcaccaagctccctgatggaaagnnnnnnnnnnnnnnnnnnnnnnnnnnnnnnnnnnnnnnnnnnnnnnnnnnnnnnnnnnnnnnnnnnnnnnnnnnnnnnnnnnnnnnnnnnnnnnnnnnnnnnnnnnnnnnnnnnnnnnnnnnnnnnnnnnnnnnnnnnnnnnnnnnnnnnnnnnnnnnnnnnnnnnnnnnnnnnnnnnnnnnnnnnnnnnnnnnnnnnnnnnnnnnnnnnnnnnnnnnnnnnnnnnnnnnnnnnnnnnnnnnnnnnnnnnnnnnnnnnnnnnnnnnnnnnnnnnnnnnnnnnnnnnnnnnnnnnnnnnnnnnnnnnnnnnnnnnnnnnnnnnnnnnnnnnnnnnnnnnnnnnnnnnnnnnnnnnnnnnnnnnnnnagttttccaaagaaattagaccattttcttcgtgaaaagaaatcgaccagctgttttcatagggtnnnnnnnnnnnnnnnnnnnnnnnnnnnnnnnnnnnnnnnnnnnnnnnnnnnnnnnnnnnnnnnnnnnnnnnnnnnnnnnnnnnnnnnnnnnnnnnnnnnnnnnnnnnntacctgtgaacagtacgcagtgaatgtatccagagctgctgttggcggattgtacccacggggagatgattcctcatgaagagcctggatcccctacagaaatcaaatgtgactttccgtttatcagactaaaatcagagccagccagacagtgaaacagtcaccgtggaggggggacggcgaaaaatgaaatccaaccaagagcggagcaacgaatgcctgcctcccaagaagcgcgagatccccgccaccagccggccctccgaggagaaggnnnnnnnnnnnnnnnnnnnnnnnnnnnnnnnnnnnnnnnnnnnnnnnnnnnnnnnnnnnnnnnnnnnnnnnnnnnnnnnnnnnnnnnnnnnnnnnnnnnnnnnnnnnnnnnnnnnnnnnnnnnnnnnnnnnnnnnnnnnnnnnnnnnnnnnnnnnnnnnnnnnnnnnnnnnnnnnnnnnnnnnnnnnnnnnnnnnnnnnnnnnnnnnnnnnnnnnnnnnnnnnnnnnnnnnnnnnnnnnnnnnnnnnnnnnnnnnnnnnnnnnnnnnnnnnnnnnnnnnnnnnnnnnnnnnnnnnnnnnnnnnnnnnnnnnnnnnnnnnnnnnnnnnnnnnnnnnnnnnnnnnnnnnnnnnnnnnnnnnnnnnnnnnnnnnnnnnnnnnnnnnnnnnnnnnnnnnnnnnnnnnnnnnnnnnnnnnnnnnnnnnnnnnnnnnnnnnnnnnnnnnnnnnnnnnnnnnnnnnnnnnnnnnnnnnnnnnnnnnnnnnnnnnnnnnnnnnnnnnnnnnnnnnnnnnnnnnnnnnnnnnnnnnnnnnnnnnnnnnnnnnnnnnnnnnnnnnnnnnnnnnnnnnnnnnnnnnnnnnnnnnnnnnnnnnnnnnnnnnnnnnnnnnnnnnnnnnnnnnnnnnnnnnnnnnnnnngcccagcagatccagtaggtgcacatttccagttctccgaagagcaccggttgcaccgctactcctccggccatccccgtnccacctccacccccatcagacgatgatcccacacacgctcaccctggggcccccctcccaggtcgtcatgcaatacgccgactccggcagccactttgtccctcgggaggccaccaagaaagctgagagcagccggctgcagcaggccatccaggccaaggaggtcctgaacggtgagatggagaagagccggcggtacggggccccgtcctcggccgacctgggcttgggcaaggcaggtggcaagtcggttcctcacccgtacgagtccaggcacgtggtggttcacccgagcccgtcagactacagcagtcgtgatccttcaggggtccgggcctctgtgatggtcctgcccaacagcaacacacccgcggccgacctggaggtgcaacaggccactcatcgcgaggcctccccctccaccctcaacgacaaaagcggcctgcatttagggaagcctggccaccggtcctatgcgctctcaccccacacggtcattcagaccacacacagtgcttcagagccactcccggtgggactgccagccacagccttctacgcagggactcaaccccctgtcatcggctacctgagcggccagcagcaagcaatcacctacgccggcagcctgccccagcacctggtgatacccggcacacagcccctgctcatcccggtgggcagcactgacatggaagcgtcgggggcagccccggcaatagtcacgtcatccccccagtttgctgcagtgcctcacacgttcgtcaccaccgcccttcccaagagcgagaacttcaaccccgaggccctggtcacccagtccgcctacccagccatggtgcaggcccagatccacctgcccgtggtgcagtccgtggcctccccggcggcggctccccctactctgcctccctacttcatgaaaggctccatcatccagttggccaacggggagctaaagaaggtggaagacttaaaaacagaagatttcatccagagcgcagagataagcaacgacctgaagatcgactctagcaccgtggagaggatcgaagacagccatagcccgggcgtggccgtgatacagttcgccgtcggggagcaccgagcccaggtnnnnnnnnnnnnnnnnnnnnnnnnnnnnnnnnnnnnnnnnnnnnnnnnnnnnnnnnnnnnnnnnnnnnnnnnnnnnnnnnnnnnnnnnnnnnnnnnnnnnnnnnnnnnnnnnnnnnnnnnnnnnnnnnnnnnnnnnnnnnnnnnnnnnnnnnnnnnnnnnnnnnnnnnnnnnnnnnnnnnnnnnnnnnnnnnnnnnnnnnnnnnnnnnnnnnnnnnnnnnnnnnnnnnnnnnnnnnnnnnnnnnnnnnnnnnnnnnnnnnnnnnnnnnnnnnnnnnnnnnnnnnnnnnnnnnnnnnnnnnnnnnnnnnnnnnnnnnnnnnnnnnnnnnnnnnnnnnnnnnnnnnnnnnnnnnnnnnnnnnnnnnnnnnnnnnnnnnnnnnnnnnnnnnnnnnnnnnnnnnnnnnnnnnnnnnnnnnnnnnnnnnnnnnnnnnnnnnnnnnnnnnnnnnnnnnnnnnnnnnnnnnnnnnnnnnnnnnnnnnnnnnnnnnnnnnnnnnnnnnnnnnnnnnnnnnnnnnnnnnnnnnnnnnnnnnnnnnnnnnnnnnnnnnnnnnnnnnnnnnnnnnnnnnnnnnnnnnnnnnnnnnnnnnnnnnnnnnnnnnnnnnnnnnnnnnnnnnnnnnnnnnnnnnnnnnnnnnnnnnnnnnnnnnnnnnnnnnnnnnnnnnnnnnnnnnnnnnnnnnnnnnnnnnnnnnnnnnnnnnnnnnnnnnnnnnnnnnnnnnnnnnnnnnnnnnnnnnnnnnnnnnnnnnnnnnnnnnnnnnnnnnnnnnnnnnnnnnnnnnnnnnnnnnnnnnnnnnnnnnnnnnnnnnnnnnnnnnnnnnnnnnnnnnnnnnnnnnnnnnnnnnnnnnnnnnnnnnnnnnnnnnnnnnnnnnnnnnnnnnnnnnnnnnnnnnnnnnnnnnnnnnnnnnnnnnnnnnnnnnnnnnnnnnnnnnnnnnnnnnnnnnnnnnnnnnnnnnnnnnnnnnnnnnnnnnnnnnnnnnnnnnnnnnnnnnnnnnnnnnnnnnnnnnnnnnnnnnnnnnnnnnnnnnnnnnnnnnnnnnnnnnnnnnnnnnnnnnnnnnnnnnnnnnnnnnnnnnnnnnnnnnnnnnnnnnnnnnnnnnnnnnnnnnnnnnnnnnnnnnnnnnnnnnnnnnnnnnnnnnnnnnnnnnnnnnnnnnnnnnnnnnnnnnnnnnnnnnnnnnnnnnnnnnnnnnnnnnnnnnnnnnnnnnnnnnnnnnnnnnnnnnnnnnnnnnnnnnnnnnnnnnnnnnnnnnnnnnnnnnnnnnnnnnnnnnnnnnnnnnnnnnnnnnnnnnnnnnnnnnnnnnnnnnnnnnnnnnnnnnnnnnnnnnnnnnnnnnnnnnnnnnnnnnnnnnnnnnnnnnnnnnnnnnnnnnnnnnnnnnnnnnnnnnnnnnnnnnnnnnnnnnnnnnnnnnnnnnnnnnnnnnnnnnnnnnnnnnnnnnnnnnnnnnnnnnnnnnnnnnnnnnnnnnnnnnnnnnnnnnnnnnnnnnnnnnnnnnnnnnnnnnnnnnnnnnnnnnnnnnnnnnnnnnnnnnnnnnnnnnnnnnnnnnnnnnnnnnnnnnnnnnnnnnnnnnnnnnnnnnnnnnnnnnnnnnnnnnnnnnnnnnnnnnnnnnnnnnnnnnnnnnnnnnnnnnnnnnnnnnnnnnnnnnnnnnnnnnnnnnnnnnnnnnnnnnnnnnnnnnnnnnnnnnnnnnnnnnnnnnnnnnnnnnnnnnnnnnnnnnnnnnnnnnnnnnnnnnnnnnnnnnnnnnnnnnnnnnnnnnnnnnnnnnnnnnnnnnnnnnnnnnnnnnnnnnnnnnnnnnnnnnnnnnnnnnnnnnnnnnnnnnnnnnnnnnnnnnnnnnnnnnnnnnnnnnnnnnnnnnnnnnnnnnnnnnnnnnnnnnnnnnnnnnnnnnnnnnnnnnnnnnnnnnnnnnnnnnnnnnnnnnnnnnnnnnnnnnnnnnnnnnnnnnnnnnnnnnnnnnnnnnnnnnnnnnnnnnnnnnnnnnnnnnnnnnnnnnnnnnnnnnnnnnnnnnnnnnnnnnnnnnnnnnnnnnnnnnnnnnnnnnnnnnnnnnnnnnnnnnnnnnnnnnnnnnnnnnnnnnnnnnnnnnnnnnnnnnnnnnnnnnnnnnnnnnnnnnnnnnnnnnnnnnnnnnnnnnnnnnnnnnnnnnnnnnnnnnnnnnnnnnnnnnnnnnnnnnnnnnnnnnnnnnnnnnnnnnnnnnnnnnnnnnnnnnnnnnnnnnnnnnnnnnnnnnnnnnnnnnnnnnnnnnnnnnnnnnnnnnnnnnnnnnnnnnnnnnnnnnnnnnnnnnnnnnnnnnnnnnnnnnnnnnnnnnnnnnnnnnnnnnnnnnnnnnnnnnnnnnnnnnnnnnnnnnnnnnnnnnnnnnnnnnnnnnnnnnnnnnnnnnnnnnnnnnnnnnnnnnnnnnnnnnnnnnnnnnnnnnnnnnnnnnnnnnnnnnnnnnnnnnnnnnnnnnnnnnnnnnnnnnnnnnnnnnnnnnnnnnnnnnnnnnnnnnnnnnnnnnnnnnnnnnnnnnnnnnnnnnnnnnnnnnnnnnnnnnnnnnnnnnnnnnnnnnnnnnnnnnnnnnnnnnnnnnnnnnnnnnnnnnnnnnnnnnnnnnnnnnnnnnnnnnnnnnnnnnnnnnnnnnnnnnnnnnnnnnnnnnnnnnnnnnnnnnnnnnnnnnnnnnnnnnnnnnnnnnnnnnnnnnnnnnnnnnnnnnnnnnnnnnnnnnnnnnnnnnnnnnnnnnnnnnnnnnnnnnnnnnnnnnnnnnnnnnnnnnnnnnnnnnnnnnnnnnnnnnnnnnnnnnnnnnnnnnnnnnnnnnnnnnnnnnnnnnnnnnnnnnnnnnnnnnnnnnnnnnnnnnnnnnnnnnnnnnnnnnnnnnnnnnnnnnnnnnnnnnnnnnnnnnnnnnnnnnnnnnnnnnnnnnnnnnnnnnnnnnnnnnnnnnnnnnnnnnnnnnnnnnnnnnnnnnnnnnnnnnnnnnnnnnnnnnnnnnnnnnnnnnnnnnnnnnnnnnnnnnnnnnnnnnnnnnnnnnnnnncctttgatggtaagaggaatacgggctgccacatagactttgttctcattagtatcactatttacaactcatgtggactcagaaaaacacacaccaccttttggcttacttcgagtattgaactgactggatccactaaaccaacactaagatgggaaaacacacgtggtttggagcaataggaacatcatcataatttttgtggttctatttcaggtataggaattataaaataattggttctttctaaacacttgtcccatttcattctcttgcttttttagcatgtgcaatactttctgtgccaatagagtctgaccagtgtgctatatagttaaagctcattcctttttggctttttccttatttggttggtctttcccattctggccagagcagggctggagggaaggagccaggagggagagagcttcccacctttccccggctgcggatgctgagtgctggggcggggagccttcaggagccccgcgtctgccgccacgttgcagaaagagccagccaaggagacctgggggaggagccgcagtgtcccctgtcaccacacggaatagtgaacgtggagtgtggagaggaaggaggcagattcatttctaagacgcactctggagccatgtagcctggagttaacccattttccacggtcttttctgcgagtgggcaggcccctccttggggtctgtgtccttgagacttggagcccccgcctctgagcctggacgggaagtgtggcctgttgtgtgtgtgcgttctgagcgtgctggccagtggctgtggaggggaccacctgccacccacggtcaccactcccttgtggcagcttt

SEQ ID NO: 29835 - DNA, 651 bp, Macaca Mulatta
tttgcattcaatcttccaggtatttctgatgcttccactccccttctgtggccccaacacgctggatgccttctactgtgatgtgccccaggtggtaaaactggcctgcactgacacctttgctttggagcttctcatgatctctaacaatggactggtgaccctgctctcattcctgctgctcctgggctcctacacggtcattctggtgatgctgagatcccactctgggaaggggcggaacaaggccctctccacgtgcacttcccacatcctggtggtgactcttcacttcgtgccttgcgtttacatctactgccggcccttcatgacactgcccatggacacaaccgtatccattaataacacgatcattacccccatgctgaaccccttaatctattccctgagtaatcaagagatgaagtcagccatgcagaggctgcagaggagacttgggccttccgagagcagaaaatgggggtgagcagtcagatggagagtggaagtccatctgatctagttttctcaaaatgctaacctaagagtaacaggtagctagctcttcttccaccacttcattgtatatcttcatagccactcgattctattagcgagagtatacaaacaaaaagaagaaatgagattaaa

SEQ ID NO: 29836 - DNA, 2223 bp, Macaca Mulatta
  misc_feature (1)...(2223): n = A,T,C or G
ataggaaggaagttcgcttgctttgcacagaggctgagccacaggagaaagcaaagccaatgtgatttattgaatgaaagcactggacaattaccaacaacttgttcctctgctgcctcgaacagcataaactggngaattgttgtgtgaaaatgacccaacaaatgcaaaatttacatctctgtcagtcaaaaaagcatagtgctccctcatctcccaacgcagccaaacgcctgtacaggaacctctctgagaaactgaaagggagccactcttccttcgatgaggcctattttaggacaagaactgatcggctgagtctcaggaagacctcnnnnnnnnnnnnnnnnnnnnnnnnnnnnnnnnnnnnnnnnnnnnnnnnnnnnnnnnnnnnnnnnnnnnnnnnnnnnnnnnnnnnnnnnnnnnnnnnnnnnnnnnnnnnnnnnnnnnnnnnnnnnnnnnnnnnnnnnnnnnnnnnnnnnnnnnnnnnnnnnnnnnnnnnnnnnnnnnnnnnnnnnnnnnnnnnnnnnnnnnnnnnnnnnnnnnnnnnnnnnnnnnnnnnnnnnnnnnnnnnnnnnnnnnnnnnnnnnnnnnnnnnnnnnnnnnnnnnnnnnnnnnnnnnnnnnnnnnnnnnnnnnnnnnnnnnnnnnnnnnnnnnnnnnnnnnnnnnnnnnnnnnnnnnnnnnnnnnnnnnnnnnnnnnnnnnnnnnnnnnnnnnnnnnnnnnnnnnnnnnnnnnnnnnnnnnnnnnnnnnnnnnnnnnnnnnnnnnnnnnnnnnnnnnnnnnnnnnnnnnnnnnnnnnnnnnnnnnnnnnnnnnnnnnnnnnnnnnnnnnnnnnnnnnnnnnnnnnnnnnnnnnnnnnnnnnnnnnnnnnnnnnnnnnnnnnnnnnnnnnnnnnnnnnnnnnnnnnnnnnnnnnnnnnnnnnnnnnnnnnnnnnnnnnnnnnnnnnnnnnnggccaacagtattattaccaagtctcggcttacaatatgaaaggatggggacctgctcagaccacgacaccggcatgtgcctctccttctannnnnnnnnnnnnnnnnnnnnnnnnnnnnnnnnnnnnnnnnnnnnnnnnnnnnnnnnnnnnnnnnnnnnnnnnnnnnnnnnnnnnnnnnnnnnnnnnnnnnnnnnnnnnnnnnnnnnnnnnnnnnnnnnnnnnnnnnnnnnnnnnnnnnnnnnnnnnnnnnnnnnnnnnnnnnnnnnnnnnnnnnnnnnnnnnnnnnnnnnnnnnnnnnnnnnnnnnnnnnnnnnnnnnnnnnnnnnnnnnnnnnnnnnnnnnnnnnnnnnnnnnnnnnnnnnnnnnnnnnnnnnnnnnnnnnnnnnnnnnnnnnnnnnnnnnnnnnnnnnnnnnnnnnnnnnnnnnnnnnnnnnnnnnnnnnnnnnnnnnnnnnnnnnnnnnnnnnnnnnnnnnnnnnnnnnnnnnnnnnnnnnnnnnnnnnnnnnnnnnnnnnnnnnnnnnnnnnnnnnnnnnnnnnnnnnnnnnnnnnnnnnnnnnnnnnnnnnnnnnnnnnnnnnnnnnnnnnnnnnnnnnnnnnnnnnnnnnnnnnnnnnnnnnnnnnnnnnnnnnnnnnnnnnnnnnnnnnnnnnnnnnnnnnnnnnnnnnnnnnnnnnnnnnnnnnnnnnnnnnnnnnnnnnnnnnnnnnnnnnnnnnnnnnnnnnnnnnnnnnnnnnnnnnnnnnnnnnnnnnnnnnnnnnnnnnnnnnnnnnnnnnnnnnnnnnnnnnnnnnnnnnnnnnnnnnnnnnnnnnnnnnnnnnnnnnnnnnnnnnnnnnnnnnnnnnnnnnnnnnnnnnnnnnnnnnnnnnnnnnnnnnnnnnnnnnnnnnnnnnnnnnnnnnnnnnnnnnnnnnnnnnnnnnnnnnnnnnnnnnnnnnnnnnnnnnnnnnnnnnnnnnnnnnnnnnnnnnnnnnnnnnnnnnnnnnnnnnnnnnnnnnnnnnnnnnnnnnnnnnnnnnnnnnnnnnnnnnnnnnnnnnnnnnnnnnnnnnnnnnnnnnnnnnnnnnnnnnnnnnnnnnnnnnaggcaaggaacttccgcctctacacacaggaggtgttggaaatgggtcacaatgtgtcctttcttctcctgctccctgcctcagacgacgtctgtacagccccaggacagaataatccttacaccccacactcagggtttcttaacctccctcttcagatgtttgaacttggtatagtagcttgtttc

SEQ ID NO: 29837 - DNA, 765 bp, Macaca Mulatta
gggagttgcttcagcgtcttggtgctgctgtgccgtggaacgtttgcagccttttagccaagatgcctgaggaaacgcagacccaggaccaaccgatggaggaggaggaggttgagacgttcgcctttcaggcagaaattgcccagttgatgtcattgattatcaatactttttattcgaacaaagagatctttctaagagagctaatttcaaattcgtcagatgcattggacaaaatccgctatgagagcttgacggatcccagtaaattagactctgggaaagagctgcatattaacctgataccaaataaacaaggtcgaaccctcagtattgtggatactggaattgggatgaccaaggctgacttgatcgatagccttggtactatcgccgagtctgggaccgaagcgttcatggaagctttgcaggggggtgcagatatctccatgatgggccaattcggagtgggggttgaggctgcttgtgtggggggtgacaagggactggggtcgccaaaggtgaccagtgaggagccgacgcccggggagggcgctcgggcaggggagggatgttacaagggaagaagaaacacgggagggaaccggggggcaggggggaaagaagaaggcagcgtagggccgggaagggaggagccgaagggggaacctggcgggggagccgacgaggaggccggagagccggcgcgagaaagcggggccgcgggggggaccggggaaagcgccgaagaccaggaaaagaaat

SEQ ID NO: 29838 - DNA, 740 bp, Macaca Mulatta
  misc_feature (1)...(740): n = A,T,C or G
ggggctgccctcgttctgcccagtgtcacgcttagtccccgctggccaccgccacccccctgcgaccatgttcgttccctgcggggagtcggcccccgaccttgccggcttcaccctcctcatgccagcagtatctgttggaaatgttggccagcttgcaatggatctgattatttctacactgaatatgtctaagattggttacttctataccgattgtcttgtgcctatggttggaaacaatccatatgcgactgcggaaggaaattcaacagaacttagtataaatgctgaagtatattcattgccttcaagaaagctggtggctcttcagttaagatccatttttattaagtataaatcaaagccattctgtgaaaaactgctttcctgggtgaaaagcagcggctgtgccagagtcattgttctttcgagcagccattcatatcagcgcaatgacctgcagcttctcagtactcccttccggtacctactcacaccttccatgcaaagaagtgttcaagataaaataaagagccttaactggcaagaaatggaaaaatggatgtgtattcctgaaatagatgattccgagttttgtatccgcattccggggggaggcatcacaaaaacactctatgatgaaagctgttctaaagaaatccaaatggcagttctgctgannnnnnnnnnnnnnnnnnnnnnnnnnnnnnnnnnnnnnnnnnnnnnnnnnnnnncat

SEQ ID NO: 29839 - DNA, 565 bp, Macaca Mulatta
cttttgtacacaggatttgtttccataagagctttttttaccctaaaaatgccaagcctggtggccctcctgctgcttgattgcaggaagttttccccattgtcactccggacttagtccagagcagaagacaagctggtgggaccagggaggaggctgggactgggacacagaaggaccaagactgtatttgtagaaaaacctttaatgttccccaggctgagggagccctgggagccagctaaaaacccccactgtgaagtccctgccatgtcccagcagtttggagtggcatggggctgcatcctgcctgtcagaggctgaagccactaccatcttgcatgcgactcccccagccagaactggcctgctcctggtcatccagggagggcagagagctgcgggtaccaggacgtcggcagctagggtgcaggtcccagcatgggggcccctgagacagcccattggaactgggaggctggcggttctcaatgaccaggtcactgctgtcatcatcactatcaggctcagcaggcccaggccctgcagagggaggacctgtcaa

SEQ ID NO: 29840 - DNA, 271 bp, Macaca Mulatta
gttgtgtttttccccttggcagaaagtgtatctgtgtaatcaagatgaaaatcacaagcatgcccaagactacgtcctgacctacaactatgaaggaagaggatcggtggctgggtctgtagggtgttgcagtgaacgacaagaagaagatgggcttgaatttttggataatttggagcccaaatttaggacactagcagaagcatgcatgaagagatgagtgtgtcctaataagtctatgaaagccagtggctttgtgactttttaaaaa

SEQ ID NO: 29841 - DNA, 816 bp, Macaca Mulatta
  misc_feature (1)...(816): n = A,T,C or G
tgcatgacagcagaaaatgtctgcttctcactctctgttgaactgtgtttccaacccccaacgtcccctgaaatagaacttgaaactctgagggtcctttctgctgtatgcctccttctctgctcccctgctgggaggcacagctattactgagaaacacgaacaccgttatcatagcttctggtgcatgggttcgcaaagacgctgttcggaatccccttctgacttctggctattgtaatctgactagacaaagagaactttgattttatttcatatttatttcactaacattagaaggaggttggaaactgctatataacaggtctgcccggaaatagaatttcaacacacatccggtgatgttctctagattccactgctaacttctgcactagctttatatccttcttccccactttacagggccagtttatgcagaaatgatcaacaacctcctgggccctctggttgaagccaaggactgcactttaatccgacacaacgtgttccacgccctgcccaacactgccaacaccctgatcggccgagccgctcacatcgctgtgctggattcagagcttttcctggagaagtttttcttggtggcaggactcaactacttcaagtagtggctttgagggagcgggtctttgttaatgcttaagattggtggagagctttagctgagacctgcttttacagacctcaccatttcagaatgaaactccaagggaacagcgctgggggatggaangctgggtggaactgatatgagaggtgcttttgntttggaganttgagaagctgagcaat

SEQ ID NO: 29842 - DNA, 582 bp, Macaca Mulatta
gcactgacagccatcgtgggtgctggctcgaccacattcttacccatgggattcggttcagcctgcagggagcgctgcagctcagacaagactttggagtggtcagggagttgctggaagaggagcagtggagcctgacccctgatctccggcagacgctgcttatgctcagcatcttccagcagctggatggagccctgctgtgtctgttgcagcagcccttgcccaagtctcaagtccacaggaggcccccctgttgctgtgcttgtcaggaggtccagaccacggaattgcccagcagctgcctcaatagcctggagagcttggagccccctctccagcctggaacatctccagcccagacagctcagctgcaaaacacactagagggagggggacctagcccagagggctacctagtgggaaatcagcaggcctggcttgccctcaggcaacaccagcgaccccgttggcacctgccatttttttcctgcctgcgaacttagtcctgaatcctaaggagcctgggaccaggagccagaaagttaagagctccccatctctagctgggaaaaatccaga

SEQ ID NO: 29843 - DNA, 743 bp, Macaca Mulatta
  misc_feature (1)...(743): n = A,T,C or G
gggctctctggtctcggctgcagaagcgagatgacgaagggaacgtcatcgtttggaaagcgtcgcaataagacgcacacattgtgccgccgctgtggctctaaggcctaccaccttcagaagtcgacctgtggcaaatgtggctaccctgccaagcgcaagagaaagtataactggagtgccaaggctaaaagacgaaataccaccggaactggtcgaatgaggcacctaaaaattgtataccgcagattcaggcatggattccgtgaaggaacaacacctaaacccaagagggcagctgttgcagcatctagttcatcttaagaatgtcaacgattagtcatgcaataaatgttctggttttaaaaaannnnnnnnnnnnnnnnnnnnnnnnnnnnnnnnnnnnnnnnnnnnnnnnnnnnnnnnnnnngggccccctcggcccccgagaaaatttttaaacaatttttttggggcgcgggcccccaagggaaatgaaaatgggcttagctgtttcccagaagatatcgggcatgagaatagcgtgggtttnnnnnnnnnnnnnnnnnnnnnggggaacacaagagtttttataaaaatcccgaggagggttctgagacgtttacaggggtctctaaacagggggtccaaggcaagctcctataaaaaaattattgccccgccctggagaataaaaaaaaagaaggggtgtgtaatattttttaagccttcctcccccacag

SEQ ID NO: 29844 - DNA, 831 bp, Macaca Mulatta
gaccgtcctgagatgcagctccgcctctttgtggtgttcctggtcatttatctcatcaccctcgtgggaaactttggcatgatcctgatcatcagagcagactcacagctccacacccccatgtactacttcctcagtcacctggcattcattgatctttgttactcatcttccattgggcccaagatgctgcaaaatttattagtgaagaaaaaaaccatctccttttcaggctgttttgctcagcggtacttctccagtgctttcaccactacagaatgcttcctcttggccacgatggcctacgaccgctacatggccatctgcaaccccctgatttatacagctattatgacgcagcaggtctgcagggagttggtgataggggtctatacctatggcttcctaaactctgtgctacagacagctctgacgttccagctgtctttctgcgactccaatgtcatccaccacttctactgtcctgatccccctcttctggccctctcctgctctgacacccacagcaaagaaaagcagctcgtgatcttctctgcagtaaatctcactgggtccctcctgaccatcttcatctcctacatttgcatcctcttttccattataaaaatccagtcttccaagggcaagtgcaaagcattttccacccgtgcctcccacctcactgtggtcaccatcttttatggaacactgtttttcatgtacctgcagcaaccaaaagcggggaattcatggaaacaaaacaaagtagtctctgtgttttatagtcttgtaattcccatgcttaaccctcttatctacagcctgagaaac

SEQ ID NO: 29845 - DNA, 1644 bp, Macaca Mulatta
  misc_feature (1)...(1644): n = A,T,C or G
cggttactggggagcaacacagccgccttgggtttcaggcactcctgtccgagtcgcagtgggacgccatggagcgctccctgcaccgcgtctccctcgggagccggcgtgcccacccggacttgtccttctacctcaccacctttggnnnnnnnnnnnnnnnnnnnnnnnnnnnnnnnnnnnnnnnnnnnnnnnnnnnnnnnnnnnnnnnnnnnnnnnnnnnnnnnnnnnnnnnnnnnnnnnnnnnnnnnnnaagatttctttgatccctgaagataacagactacaccatcagaagacgcagactgttccagactgcagagacccagctttccacgagcacttcttctnnnnnnnnnnnnnnnnnnnnnnnnnnnnnnnnnnnnnnnnnnnnnnnnnnnnnnnnnnnnnnnnnnnnnnnnnnnnnnnnnnnnnnnnnnnnnnnnnnnnnnnnnnnnnnnnnnnnnnnnnnnnnnnnnnnnnnnnnnnnnnnnnnnnnnnnnnnnnnnnnnnnnnnnnnnnnnnnnnnnnnnnnnnnnnnnnnnnnnnnnnnnnnnnnnnnnnnnnnnnnnnnnnnnnnnnnnnnnnnnnnnnnnnnnnnnnnnnnnnnnnnnnnnnnnnnnnnnnnnnnnnnnnnnnnnnnnnnnnnnnnnnnnnnnnnnnnnnnnnnnnnnnnnnnnnnnnnnnnnnnnnnnnnnnnnnnnnnnngggggtccggcagaacgggcagggctgcagcagctggacacagtgctgcagctgaacgagaggcctgtggagcactggaaatgtgtggagctggcccacgagatccgngagctgccctagtgagatcatcctactcgtgtggcgcatggtcccccaggtcaagccaggaccagatggtggggtcctgcggcgggcctcctgcaagtcaacacatgacctccagtcaccccccaacaaaagggagaagaactgtacccatggggcccaggcacggccagagcagcgccacagctgccacctggtatgtgacagctctgatgggctgctgcttggcggctgggagcgctataccgaggtggccaagcgtggaggccagcacaccctgcctgcactgtcccgtgccactgcccccaccgaccccaactacatcatcctggccccgctgaatcctgggagccagnnnnnnnnnnnnnnnnnnnnnnnnnnnnnnnnnnnnnnnnnnnnnnnnnnnnnnnnnnnnnnnnnnnnnnnnnnnnnnnnnnnnnnnnnnnnnnnnnnnnnnnnnnnnnnnnnnnnnnnnnnnnnnnnnnnnnnnnnnnnnnnnnnnnnnnnnnnnnnnnnnnnnnnnnnnnnnnnnnnnnnnnnnnnnnnnnnnnnnnnnnnnnnnnnnnnnnnnnnnnnnnnnnnnnnnnnnnnnnnnnnnnnnnnnnnnnnnnnnnnnnnnnnnnnnnnnnnnnnnnnnnnnnnnnnnnnnnnnnnnnnnnnnnnnnnnnnnnnnnnaggtgacattgtttgcctattcggacctgctgctcttcaccaaggaggacgagcctggccgctgcgacgtcctgaggaaccccctctacctccagagnnnnnnnnnnnnnaaggttcttcagaagacctgaaattctgcgtgctctatctagcaga

SEQ ID NO: 29846 - DNA, 597 bp, Macaca Mulatta
  misc_feature (1)...(597): n = A,T,C or G
gtgcccggctgcctggggaatcagctagaagccaagctggacaagccagatnnnnnnnnnnnnnnnnnnnnnnnnnnnnnnnnnnnnnnnnnnnnnnnnnnnnnnnnnnnnnnnnnnnnnnnnnnnnnnnnnnnnnnnnnnnnnnnnnnnnnnnnnnnnnnnnnnnnnnnnnnnnnnnnnnnnnnnnnnnnnnnnnnnnnnnnnnnnnnnnnnnnnnnnnnnnnnnnnnnnnnnnnnnnnnnnnnnnnnnnnnnnnnnnnnnnnnnnnnnnnnnnnnnnnnnnnnnnnnnnnnnnnnnnnnnnnnnnnnnnnnnnnnnnnnnnnnnnnnnnnnnnnnnnnnnnnnnnnnnnnnnnnnnnnnnnnnnnnnnnnnnnnnnnnnnnnnnnnnnnnnnnnnnnnnnnnnnnnnnnnnagatgcacgctgcctatgggaagcctgtcttcctcattggccacattcttgcctgtctacacttgctctatttcctgctgcgccagccccaggcctggaaggaccgcttcatcgatggcttcatctctcttggggctccctggggcggctccatcaagcccatgctggtcttggcctcaggtga

SEQ ID NO: 29847 - DNA, 678 bp, Macaca Mulatta
gccaaaggctgccaggcaagagagaccttcctgagtcctggatctttcttccttctggaaatctttgactgtgggtattgatttatttctgaataagagcgtccacacatcatggacctcgcgggactgctgaagtctcagttcctgtgccacctggtcttctgctacgtcttcattgcctcggggctaatcatcaacaccgttcagctcttcactctccttctctggccaattaacaagcagcttttccggaagatcaactgcagactgtcctattgcatctcaagccagctggtgatgctgctggagtggtggtcgggcacggaatgcaccatcttcacggacccgcgcgcctaccccaagtatgggaaggaaaatgccatcgtggttctcaaccacaagtttgaaattgactttctctgtggctggagcctgtccgaacgctttgggctcttagggggctccaaggtcctggccaagaaagagctggcctacgttccaattatcggctggatgtggtacttcaccgagatggtcttctgttcgcgcaagtgggagcaggatcgcaagacggttgccaccagtttgcagcacctccgggactacccggagaaatattttttcctgatccactgtgagggcacgcggttcacggagaagaacatgagatcagcatgc

SEQ ID NO: 29848 - DNA, 109 bp, Macaca Mulatta
gtctcagttcactctttccttgtttgttaaatatcaacttaaactgcctagtgggctgaggttcatttttcctttcctcgagattagggtagactatctaggaacttat

SEQ ID NO: 29849 - DNA, 552 bp, Macaca Mulatta
ataaagaattcacatcctcaaatgacattcccccaggtgtgtccttgaacccccttcaactccccctgggccttctctcttggggtagggagatgtcaggagggaaagggggcttgaccgggcctccccttccctaggaggtggccagtcagcccctgcctccctggagagtgggcccagcctcccaggaacccagaaagctgaagaggaagggtctgaggcaactccaggtgggggagtgcatggggcagggggtggaggctgctgctgctgctttctgtggggctgaggggcagagggcttgggggagtggggtgagtgtgtgtaggtagcagttggaccatagaggtgaggtgaaaagggtgagctgggatagggattggggactggagctgggtggcaggggtggggcaaaggggcaactttatgggccaagccaataggaattgggtatgtgggtggaggttgaagttgggggtaaggaaaggattagaattttggagtcgagctcaggggttttggaaagcactggtttaagagtaatggggtgtg

SEQ ID NO: 29850 - DNA, 110 bp, Macaca Mulatta
ggttccattcttaccatttttgccagcgttcagcatcctggtgaacatttacttgatggtccagttgagtgcagacacttggatcagattcagcatttggatggcaattg

SEQ ID NO: 29851 - DNA, 681 bp, Macaca Mulatta
tgttggtatagattctctggtctgtgtgccttggtggtggcaggcccagccttcacctggtcttacccttgtccatcaatcactgaaacatctttctaatgtaactctttttctttctctccctgcagactcccctgcaatccctgctccacgcctgcctcctgtacttcctgtccaagctgtggccctgtcaccggtgggtctgcctctggccatggagccagcatggggagatgattctgaaggcccgaagttcctgtgcaggaggttgaggctggttgcactggggtcaggagtgccttcaccttgctcagtcttccttccagaaagaccagactcactgaggcattttccctaaatcaacgggtagcggacgcttccaaggagtgtctccctgcctatgcctctaagctgtattttttgttgttgctgaaatgttataattatcttccacgaaagtgattgtttttcccagtgtctcttcttggttcttttggttctattccagtgtttcagaatctcctaaaatgtcactgggttccctgcattaaatggtcaataaacctctttcctgcaccaagtgctgtccccctggtgttggttgtgtgtgaagtgtcagagagtcctggtcgtcaggtcctgtgtcctcactggccctgacagctagttccaggagctccc

SEQ ID NO: 29852 - DNA, 1011 bp, Macaca Mulatta
atggattatcctactttacttttggctcttcttcatgtttacagggctctatgtgaagaggtgctttggcatacatcagttccctttgctgagaatatgtctctagaatgtgtatatccatcagtgggcatcttgacacaggtggagtggttcaagatcgggaccgagaaggattccatagccatttttagccctactcatggcatggtcataaggaagccctatgctgagagggtttactttttgaattcaacgatggcttccaacaacatgactcttttctttcggaatgcctctgaagatgatgttggctactattcctgctctctttacacttacccacagggaacttggcagaaggtgatacaggtggtgcagtcagatggttttgaggcagctgtgccaccaaatagccacattgtctcggaacctggaaagaatatcacactcacctgtcagcctcagatgacgtggcctgtgcaggaagtgaggtgggaaaagatccagccccatcagatcgacctcttaacttactgtgacttggtccacggcagaaatttcacctccaagttcccacgacaaatagtgagcaactgcagccacggaagctggagcttcatcgtcgtccccgacgtcacggcctcagactcggggctttaccgctgccacttgcaggccagtgcaggagaaaacgaaaccttcgtgatgagattgaccgtagccgagggtcaaaccgataaccaatatacccgctttgtgactggagggacagttttattgttattgtttgttatctcaattaccaccatcattgtcattttccttaacagaaggagaaggagagaaagaagcgatctatatacagagtcctgggatacacagaaggcacccaagaactatagaagtcccatctctgccagtcaacctaccaatcaatccatggatgatacaagagaggatatttatgtcaactatccaaccttctctcgcagaccaaagactagagtttaa

SEQ ID NO: 29853 - DNA, 504 bp, Macaca Mulatta
atctatttcatatctatactgaatgtgggacatccttttgcttctgctcagaatctactcattcttagaaggcctgtattaacatggatgcagaataattttagaaaccccttataaataattaacatctctataaaccctagaatttaatgctgaattatatcctttattaagcatcatctccatttcaccatatcctaactgaaatcagatatatttgtgtgtttttttctatttgtaaaatactgtaattgtattacaatgactaaattataattaaatacatataattccctttggatggtatctgatgtttattttttaaatgattgccattatcatcattacatagtgttagagaactcaaatggtgggaatagtttatgattacaattaaaagatgcaaccattctcttatcatgtatcccttttagaacaacagatactttattttagaacaaaaccttttgaatatagtaaaggtatgaagaacttcagagcata

SEQ ID NO: 29854 - DNA, 807 bp, Macaca Mulatta
ggggactgcggcggcatccgggacggcgggcgggctggccacccgggacaggaaggcacagagcatggagaatgatgaatttccgtcagcggatgggatggattggagtgggattgtatctgttagcaagtgcagcagcattttactatgtttttgaaatcaatgagacttacaataggctggccttggaacacattcaacagcaccctgaggagccccttgaaggaaccacatggacacactccttgaaagctcgatcactctccttgcctttttggttgtggacaattatttttctggtaccttacttacagatgtttttgttcctatactcttgtacaagagctgatcccaaaacagtgggctactgtatcatccctatatgcttggcagttatttgcaatcgccaccaggcatttgtcaaggcttctaatcagatcagcagactacaactgattgacacataaaatcagtcaccgttttttccctacgattacaaaactgccagtcctatatggagtctgatcacaagactgcagtttcttcacagatctcaagaaattgtggtggggcagaggcttttttaaaacctgtgatcaggggggctatcctttatctgaaaaataatgaaatttttaagtaaaaaccctgagatagagtactaccaaatccttgtttgaatgacttccagattttgggaaattaaacccgggtcctggtaatttgcatttccttagaaaccttggactgaagtaccctgaaatttcaaatttcccatttctacgggggccaaaataatggatgaat

SEQ ID NO: 29855 - DNA, 299 bp, Macaca Mulatta
ctcttgcttgaattcggactatgtctcttgcttgaattcggactacttcttgtagcattaaaggtgcgttatccagaacgcattacaatattgagaggaaatcacgaaagccgacaaattacccaagtatatggcttttatgatgaatgtctgcgaaagtatgggaatgccaacgtttggaaatattttacagatctttttgattatcttccacttacagctttagtagatggacagatattctgcctccatggtggcctctctccatccatagacacactggatcatataagagccct

SEQ ID NO: 29856 - DNA, 325 bp, Macaca Mulatta
ctggcagcaacgaaaatggcgagtctcgtagccttccgggcctgatggccgcattccgggagtcgccaggtgggagtccgccttccgcgtccccaaacgcccagagcgcgggacaagggccggcggccgggtgaccaagccggttccccgcataggcttgcgccagaatccatattcagcttgcaaggccccctccggccgtctctccgcagagcgccctgccccacactgccggccctcttagcttgaaaaccaaattttgcctttgatcctgagagattgataccccacaggtgaaaccgtggagacggagctgcggtgggtt

SEQ ID NO: 29857 - DNA, 1490 bp, Macaca Mulatta
  misc_feature (1)...(1490): n = A,T,C or G
ttattggagaagtgagtcacaaagaaataaaaatgagtaaaagcaaagatgatgctcctcacgaactggagagccagtttatcttacgtctgcctccagaatatgcctctactgtgagaagagcagtacagtctggtcatgtcaacctcaaggacagactgacaattgagttacatcctgatgggcgtcatggaatcgtcagagtggaccgtgttccattggcctcaaaattggtagacctgccctgtgttatggaaagcttgaaaaccattgataagaaaaccttttacaagacagctgatatctgtcagatgcttgtatccacagttgatggtgatctctatccacctgtggaggagccagttgctagcactgatcctaaagcaagcaagaaaaaggataaggacaaagagaaaaagtttatctggaaccacggaattactctgcctctgaagaatgtcaggaagagaaggttccggaagacagcaaagaagaaatatattgaatctccagatgtggaaaaagaagtgaaacgattgctgagtacagatgctgaagctgttagtactcggtgggaaataattgctgaagatgaaacaaaggaggcagaaaatcaaggcctggatatctcttctccaggaatgtctggtcacaggcagggccatgactcattagaacatgatgagcttcgggagatattcaatgacctcagcagcagcagtgaggatgaagatgagacccagcatcaagatgaagaagatataaacatcattgacactgaggaagatctggagagacaactacaggacaagctaaatgaatcagatgaacagcaccaggaaaatgagggaaccaatcagctggttatgggaattcagaagcagattgacaacatgaaaggcaagctccaagagacccaggacagggcaaaacgacaagaggatctcatcatgaaagtggaaaatctggctctcaagaacagatttcaggctgtactggatgagctcaaacaaaaggaagaccgagaaaaggagcaactcagctctttgcaagaagagctagaatcactcctagagaagtaaaaagaactgattcttaatttcagtgttcagactgatcagcattagaaaattcttggctttattacttgtactggatattaacaccttgcacttcctagtccctctaatgctgtgtgttctgttaagttctttcatttgtttgtagttttgtttttcagcaaatttacattgttttgctaggtgttcatcctataagaaagcaggattgtataggcagaaaaatgatagtaggaaagttgcaggattagtggaatgtatggttcaaccttaattatagctccactgcangactttgctgtttctccattttctagaagctgctgttgctgccttatgatgacctgagatcaataagaagaacctagtctagagacagtgatgctagttttgcataagttttccccatgt

SEQ ID NO: 29858 - DNA, 636 bp, Macaca Mulatta
  misc_feature (1)...(636): n = A,T,C or G
atgtaatgaaaaataattggaagtgttaaatgtgaacttgagctgtttggtcacatttttgtactgttattgtacatgtatctggggcttctacgtttgttaataatttttctgtatttgttgctgtatttttggcataactttattataaaaagcatctcagattnnnnnnnnnnnnnnnnnnnnnnnnnnnnnnnnnnnnnnnnnnnnnnnnnnnnnnnnnnnnnnnnnnnnnnnnnnnnnnnnnnnnnnnnnnnnnnnnnnnnnnnnnnnnnnnnnnnnnnnnnnnnnnnnnnnnnnnnnnnnnnnnnnnnnnnnnnnnnnnnnnnnnnnnnnnnnnnnnnnnnnnnnnnnnnnnnnnnnnnnnnnnnnnnnnnnnnnnnnnnnnnnnnnnnnnnnnnnnnnnnnnnnnnnnnnnnnnnnnnnnnnnnnnnnnnnnnnnnnnnnnnnnnnnnnnnnnnnnnnnnnnnnnnnnnnnnnnnnnnnnnnnnnnnnnnnnnnnnnnnnnnnnnnnnnnnnnnnnnnnnnnnnnnnnnnnnnnnnnnnnnnnnnnnnnnnnnnnnnnnnnnnnnnnnnnnnnnnnnnnnnnnnnnnnnnnnnnnnnnnnnnnnnnnnnnnnnnnnnnnnnnnnnnnnn

SEQ ID NO: 29859 - DNA, 1242 bp, Macaca Mulatta
  misc_feature (1)...(1242): n = A,T,C or G
tcattttatgccacctgaaaaagtacataaagaactctttaaagactggaatattccatttaagcagccatcacatccatcagtgaaacggtataatcggaatcggacactaacacaaaagctacggatggaggagcgatttaaaaagaaagaaagattactcaggaagaaattagccaaaaaaggaattgattatgattttccttcnnnnnnnnnnnnnnnnnnnnnnnnnnnnnnnnnnnnnnnnnnnnnnnnnnnnnnnnnnnnnnnnnnnnnnnnnnnnnnnnnnnnnnnnnnnnnnnnnnnnnnnnnnnnnnnnnnnnnnnnnnnnnnnnnnnnnnnnnnnnnnnnnnnnnnnnnnnnnnnnnnnnnnnnnnnnnnnnnnnnnnnnnnnnnnnnnnnnnnnnnnnnnnnnnnnnnnnnnnnnnnnnnnnnnnnnnnnnnnnnnnnnnnnnnnnnnnnnnnnnnnnnnnnnnnnnnnnnnnnnnnnnnnnnnnnnnnnnnnnnnnnnnnnnnnnnnnnnnnnnnnnnnnnnnnnnnnnnnnnnnnnnnnnnnnnnnnnnnnnnnnnnnnnnnnnnnnnnnnnnnnnnnnnnnnnnnnnnnnnnnnnnnnnnnnnnnnnnnnnnnnnnnnnnnnnnnnnnnnnnnnnnnnnnnnnnnnnnnnnnnnnnnnnnnnnnnnggattgcctgcccttgtctgacatacagaggtgcataccagcttgcattgggttggctgacactgcctctttgtcctggcctctaattttcttttgatgtttcatagctatccttagtttactctgcttggatagaaagttgaccactaactgcaggtttaagtactaaactgcagccttttctgtcactggcatttaaagaccaccaatcgttgtttgtccacctacatggtttgtcagggacatttaactcatggggatgctttagatttcaacatgaaatggttaaagctggaagtttaattatatgtagagtgagaaggcagttccagtgttaacacagatttgtttttgtgttcacattttaatcgagattcaaaaatgactcatttttaccgataatgttaacgttagttttggttgtgctagcatggattaataaccactattttataccagtgtcatcagtgaggaattgtatttcaagattcaaacaataaccagcaattaaactttttttctacgatttatttgtttgcgagtaggacttgggagtcattg

SEQ ID NO: 29860 - DNA, 727 bp, Macaca Mulatta
cataggggagatctattgctaggaaggctcagacgttagggccctctcctgagctgagtgcagccccacaggctggctggacaagagacaggccccacgtgtgaacatggcccctcgaagggctggtgtccaggaaccacagaagcctggttttgagagttgtgcagagaggcatccctttccatttgacttcagtcttctttcctttccccatttccatgtccattgcttttcatcctgcaccaggccagcagctgataactctatttgcctctgtcccttccctgtgtctgtctgcccggctttgccatctgcttgaggctgtcattccctccatgatctgaccccacattggcaagaccagccggggtctgggttgggctggcctctaggacctgccccttgtctctcagctcggaatcttaaatgtgtcctcttgccacctgctactaccaccctctggcccctggaagactccttgggctagaagggactttaaggggttagtgtttctggctctctggctttgtgccgggagactcatccatggtctcaagtgtccaggcatatgacaacaggagagaggcaggggctcagaaggtgggggctgcggtggggtgggatctcagacgtagtacagagcctaccattatggaaaggctgctctcgtggctgatttggggaggcctcctagcaccaccacctatcctctatcagctgttctcag

SEQ ID NO: 29861 - DNA, 104 bp, Macaca Mulatta
gaaatcagagtcagtgctgtccttacccagaaccctcacagtctgttctgtgtctcaacagctcaggaggcagaaagggtcaccctaattcagatgacacattt

SEQ ID NO: 29862 - DNA, 2014 bp, Macaca Mulatta
  misc_feature (1)...(2014): n = A,T,C or G
aggtttcacaggtgaagatgaggatatggccttccctgggcacttgtatgatgaggcagaaagaacgtaccccctgtctggagccggggaccnnnnnnnnnnnnnnnnnnnnnnnnnnnnnnnnnnnnnnnnnnnnnnnnnnnnnnnnnnnnnnnnnnnnnnnnnnnnnnnnnnnnnnnnnnnnnnnnnnnnnnnnnnnnnnnnnnnnnnnnnnnnnnnnnnnnnnnnnnnnnnnnnnnnnnnnnnnnnnnnnnnnnnnnnnnnnnnnnnnnnnnnnnnnnnnnnnnnnnnnnnnnnnnnnnnnnnnnnnnnnnnnnnnnnnnnnnnnnnnnnnnnnnnnnnnnnnnnnnnnnnnnnnnnnnnnnnnnnnnnnnnnnnnnnnnnnnnnnnnnnnnnnnnnnnnnnnnnnnnnnnnnnnnnnnnnnnnnnnnnnnnnnnnnnnnnnnnnnnnnnnnnnnnnnnnnnnnnnnnnnnnnnnnnnnnnnnnnnnnnnnnnnnnnnnnnnnnnnnnnnnnnnnnnnnnnnnnnnnnnnnnnnnnnnnnnnnnnnnnnnnnnnnnnnnnnnnnnnnnnnnnnnnnnnnnnnnnnnnnnnnnnnnnnnnnnnnnnnnnnnnnnnnnnnnnnnnnnnnnnnnnnnnnnnnnnnnnnnnnnnnnnnnnnnnnnnnnnnnnnnnnnnnnnnnnnnnnnnnnnnnnnnnnnnnnnnnnnnnnnnnnnnnnnnnnnnnnnnnnnnnnnnnnnnnnnnnnnnnnnnnnnnnnnnnnnnnnnnnnnnnnnnnnnnnnnnnnnnnnnnnnnnnnnnnnnnnnnnnnnnnnnnnnnnnnnnnnnnnnnnnnnnnnnnnnnnnnnnnnnnnnnnnnnnnnnnnnnnnnnnnnnnnnnnnnnnnnnnnnnnnnnnnnnnnnnnnnnnnnnnnnnnnnnnnnnnnnnnnnnnnnnnnnnnnnnnnnnnnnnnnnnnnnnnnnnnnggagacaatcctctgtcgggggaagaggaaacgaggctgctgcccccagcttttccctcctccaggtggcagcattctccccaccatgggagggctgcagcttccagcccaacctgcctccagnnnnnnnnnnnnnnnnnnnnnnnnnnnnnnnnnnnnnnnnnnnnnnnnnnnnnnnnnnnnnnnnnnnnnnnnnnnnnnnnnnnnnnnnnnnnnnnnnnnnnnnnnnnnnnnnnnnnnnnnnnnnnnnnnnnnnnnnnnnnnnnnnnnnnnnnnnnnnnnnnnnnnnnnnnnnnnnnnnnnnnnnnnnnnnnnnnnnnnnnnnnnnnnnnnnnnnnnnnnnnnnnnnnnnnnnnnnnnnnnnnnnnnnnnnnnnnnnnnnnnnnnnnnnnnnnnnnnnnnnnnnnnnnnnnnnnnnnnnnnnnnnnnnnnnnnnnnnnnnnnnnnnnnnnnnnnnnnnnnnnnnnnnnnnnnnnnnnnnnnnnnnnnnnnnnnnnnnnnnnnnnnnnnnnnnnnnnnnnnnnnnnnnnnnnnnnnnnnnnnnnnnnnnnnnnnnnnnnnnnnnnnnnnnnnnnnnnnnnnnnnnnnnnnnnnnnnnnnnnnnnnnnnnnnnnnnnnnnnnnnnnnnnnnnnnnnnnnnnnnnnnnnnnnnnnnnnnnnnnnnnnnnnnnnnnnnnnnnnnnnnnnnnnnnnnnnnnnnnnnnnnnnnnnnnnnnnnnnnnnnnnnnnnnnnnnnnnnnnnnnnnnnnnnnnnnnnnnnnnnnnnnnnnnnnnnnnnnnnnnnnnnnnnnnnnnnnnnnnnnnnnnnnnnnnnnnnnnnnnnnnnnnnnnnnnnnnnnnnnnnnnnnnnnnnnnnnnnnnnnnnnnnnnnnnnnnnnnnnnnnnnnnnnnnnnnnnnnnnnnnnnnnnnnnnnnnnnnnnnnnnnnnnnnnnnnnnnnnnnnnnnnnnnnnnnnnnnnnngcatgtgggagctgggcattcctctggacgggactgtctgttttggacaacttctgggcatgtgtgaccacgtttctctggcactgg

SEQ ID NO: 29863 - DNA, 67 bp, Macaca Mulatta
ttcatgggaaagtactaccctgcactggcatacttaaagggttttcagggactgagggtactcctca

SEQ ID NO: 29864 - DNA, 5501 bp, Macaca Mulatta
  misc_feature (1)...(5501): n = A,T,C or G
gggtccttgactgtgtccacctgaggcnnnnnnnnnnnnnnnnnnnnnnnnnnnnnnnnnnnnnnnnnnnnnnnnnnnnnnnnnnnnnnnnnnnnnnnnnnnnnnnnnnnnnnnnnnnnnnnnnnnnnnnnnnnnnnnnnnnnnnnnnnnnnnnnnnnnnnnnnnnnnnnnnnnnnnnnnnnnnnnnnnnnnnnnnnnnnnnnnnnnnnnnnnnnnnnnnnnnnnnnnnnnnnnnnnnnnnnnnnnnnnnnnnnnnnnnnnnnnnnnnnnnnnnnnnnnnnnnnnnnnnnnnnnnnnnnnnnnnnnnnnnnnnnnnnnnnnnnnnnnnnnnnnnnnnnnnnnnnnnnnnnnnnnnnnnnnnnnnnnnnnnnnnnnnnnnnnnnnnnnnnnnnnnnnnnnnnnnnnnnnnnnnnnnnnnnnnnnnnnnnnnnnnnnnnnnnnnnnnnnnnnnnnnnnnnnnnnnnnnnnnnnnnnnnnnnnnnnnnnnnnnnnnnnnnnnnnnnnnnnnnnnnnnnnnnnnnnnnnnnnnnnnnnnnnnnnnnnnnnnnnnnnnnnnnnnnnnnnnnnnnnntggaagcggaggaggacccatcgccctgtgcctcttcgggatcggggcgtgcatgcacgctgaaccagactgagtgccgcgggcgctggccaggacccaatggaggcatcaccaactttgacaacttcttcttcgccatgctgacagtcttccagtgcgtcaccatggaaggctggaccgatgtgctgtactgnnnnnnnnnnnnnnnnnnnnnnnnnnnnnnnnnnnnnnnnnnnnnnnnnnnnnnnnnnnnnnnnnnnnnnnnnnnnnnnnnnnnnnnnnnnnnnnnnnnnnnnnnnnnnnnnnnnnnnnnnnnnnnnnnnnnnnnnnnnnnnnnnnnnnnnnnnnnnnnnnnnnnnnnnnnnnnnnnnnnnnnnnnnnnnnnnnnnnnnnnnnnnnnnnnnnnnnnnnnnnnnnnnnnnnnnnnnnnnnnnnnnnnnnnnnnnnnnnnnnnnnnnnnnnnnnnnnnnnnnnnnnnnnnnnnnnnnnnnnnnnnnnnnnnnnnnnnnnnnnnnnnnnnnnnnnnnnnnnnnnnnnnnnnnnnnnnnnnnnnnnnnnnnnnnnnnnnnnnnnnnnnnnnnnnnnnnnnnnnnnnnnnnnnnnnnnnnnnnnnnnnnnnnnnnnnnnnnnnnnnnnnnnnnnnnnnnnnnnnnnnnnnnnnnnnnnnnnnnnnnnnnnnnnnnnnnnnnnnnnnnnnnnnnnnnnnnnnnnnnnnnnnnnnnnnnnnnnnnnnnnnnnnnnnnnnnnnnnnnnnnnnnnnnnnnnnnnnnnnnnnnnnnnnnnnnnnnnnnnnnnnnnnnnnnnnnnnnnnnnnnnnnnnnnnnnnnnnnnnnnnnnnnnnnnnnnnnnnnnnnnnnnnnnnnnnnnnnnnnnnnnnnnnnnnnnnnnnnnnnnnnnnnnnnnnnnnnnnnnnnnnnnnnnnnnnnnnnnnnnnnnnnnnnnnnnnnnnnnnnnnnnnnnnnnnnnnnnnnnnnnnnnnnnnnnnnnnnnnnnnnnnnnnnnnnnnnnnnnnnnnnnnnnnnnnnnnnnnnnnnnnnnnnnnnnnnnnnnnnnnnnnnnnnnnnnnnnnnnnnnnnnnnnnnnnnnnnnnnnnnnnnnnnnnnnnnnnnnnnnnnnnnnnnnnnnnnnnnnnnnnnnnnnnnnnnnnnnnnnnnnnnnnnnnnnnnnnnnnnnnnnnnnnnnnnnnnnnnnnnnnnnnnnnnnnnnnnnnnnnnnnnnnnnnnnnnnnnnnnnnnnnnnnnnnnnnnnnnnnnnnnnnnnnnnnnnnnnnnnnnnnnnnnnnnnnnnnnnnnnnnnnnnnnnnnnnnnnnnnnnnnnnnnnnnnnnnnnnnnnnnnnnnnnnnnnnnnnnnnnnnnnnnnnnnnnnnnnnnnnnnnnnnnnnnnnnnnnnnnnnnnnnnnnnnnnnnnnnnnnnnnnnnnnnnnnnnnnnnnnnnnnnnnnnnnnnnnnnnnnnnnnnnnnnnnnnnnnnnnnnnnnnnnnnnnnnnnnnnnnnnnnnnnnnnnnnnnnnnnnnnnnnnnnnnnnnnnnnnnnnnnnnnnnnnnnnnnnnnnnnnnnnnnnnnnnnnnnnnnnnnnnnnnnnnnnnnnnnnnnnnnnnnnnnnnnnnnnnnnnnnnnnnnnnnnnnnnnnnnnnnnnnnnnnnnnnnnnnnnnnnnnnnnnnnnnnnnnnnnnnnnnnnnnnnnnnnnnnnnnnnnnnnnnnnnnnnnnnnnnnnnnnnnnnnnnnnnnnnnnnnnnnnnnnnnnnnnnnnnnnnnnnnnnnnnnnnnnnnnnnnnnnnnnnnnnnnnnnnnnnnnnnnnnnnnnnnnnnnnnnnnnnnnnnnnnnnnnnnnnnnnnnnnnnnnnnnnnnnnnnnnnnnnnnnnnnnnnnnnnnnnnnnnnnnnnnnnnnnnnnnnnnnnnnnnnnnnnnnnnnnnnnnnnnnnnnnnnnnnnnnnnnnnnnnnnnnnnnnnnnnnnnnnnnnnnnnnnnnnnnnnnnnnnnnnnnnnnnnnnnnnnnnnnnnnnnnnnnnnnnnnnnnnnnnnnnnnnnnnnnnnnnnnnnnnnnnnnnnnnnnnnnnnnnnnnnnnnnnnnnnnnnnnnnnnnnnnnnnnnnnnnnnnnnnnnnnnnnnnnnnnnnnnnnnnnnnnnnnnnnnnnnnnnnnnnnnnnnnnnnnnnnnnnnnnnnnnnnnnnnnnnnnnnnnnnnnnnnnnnnnnnnnnnnnnnnnnnnnnnnnnnnnnnnnnnnnnnnnnnnnnnnnnnnnnnnnnnnnnnnnnnnnnnnnnnnnnnnnnnnnnnnnnnnnnnnnnnnnnnnnnnnnnnnnnnnnnnnnnnnnnnnnnnnnnnnnnnnnnnnnnnnnnnnnnnnnnnnnnnnnnnnnnnnnnnnnnnnnnnnnnnnnnnnnnnnnnnnnnnnnnnnnnnnnnnnnnnnnnnnnnnnnnnnnnnnnnnnnnnnnnnnnnnnnnnnnnnnnnnnnnnnnnnnnnnnnnnnnnnnnctgctatacaaggccatcgatgcttatgcagaggaccacggccccatctataattaccgtgtggaaatctcagtgttcttcattgtctacatcatcatcattgcgnnnnnnnnnnnnnnnnnnnnnnnnnnnnnnnnnnnnnnnnnnnnnnnnnnnnnnnnnnnnnnnnnnnnnnnnnnnnnnnnnnnnnnnnnnnnnnnnnnnnnnnnnnnnnnnnnnnnnnnnnnnnnnnnnnnnnnnnnnnnnnnnnnnnnnnnnnnnnnnnnnnnnnnnnnnnnnnnnnnnnnnnnnnnnnnnnnnnnnnnnnnnnnnnnnnnnnnnnnnnnnnnnnnnnnnnnnnnnnnnnnnnnnnnnnntgcagcactatgagcagactgctcccttcaactacgccatggacatcctcaacatggtcttcactggtctcttcactattgagatggtgctcaaaatcatcgccttcaagcccaannnnnnnnnnnnnnnnnnnnnnnnnnnnnnnnnnnnnnnnnnnnnnnnnnnnnnnnnnnnnnnnnnnnnnnnnnnnnnnnnnnnnnnnnnnnnnnnnnnnnnnnnnnnnnnnnnnnnnnnnnnnnnnnnnnnnnnnnnnnnnnnnnnnnnnnnnnnnnnnnnnnnnnnnnnnnnnnnnnnnnnnnnnnnnnnnnnnnnnnnnnnnnnnnnnnnnnnnnnnnnnnnnnnnnnnnnnnnnnnnnnnnnnnnnnnnnnnnnnnnnnnnnnnnnnnnnnnnnnnnnnnnnnnnnnnnnnnnnnnnnnnnnnnnnnnnnnnnnnnnnnnnnnnnnnnnnnnnnnnnnnnnnnnnnnnnnnnnnnnnnnnnnnnnnnnnnnnnnnnnnnnnnnnnnnnnnnnnnnnnnnnnnnnnnnnnnnnnnnnnnnnnnnnnnnnnnnnnnnnnnnnnnnnnnnnnnnnnnnnnnnnnnnnnnnnnnnnnnnnnnnnnnnnnnnnnnnnnnnnnnnnnnnnnnnnnnnnnnnnnnnnnnnnnnnnnnnnnnnnnnnnnnnnnnnnnnnnnnnnnnnnnnnnnnnnnnnnnnnnnnnnnnnnnnnnnnnnnnnnnnnnnnnnnnnnnnnnnnnnnnnnnnnnnnnnnnnnnnnnnnnnnnnnnnnnnnnnnnnnnnnnnnnnnnnnnnnnnnnnnnnnnnnnnnnnnnnnnnnnnnnnnnnnnnnnnnnnnnnnnnnnnnnnnnnnnnnnnnnnnnnnnnnnnnnnnnnnnnnnnnnnnnnnnnnnnnnnnnnnnnnnnnnnnnnnnnnnnnnnnnnnnnnnnnnnnnnnnnnnnnnnnnnnnnnnnnnnnnnnnnnnnnnnnnnnnnnnnnnnnnnnnnnnnnnnnnnnnnnnnnnnnnnnnnnnnnnnnnnnnnnnnnnnnnnnnnnnnnnnnnnnnnnnnnnnnnnnnnnnnnnnnnnnnnnnnnnnnnnnnnnnnnnnnnnnnnnnnnnnnnnnnnnnnnnnnnnnnnnnnnnnnnnnnnnnnnnnnnnnnnnnnnnnnnnnnnnnnnnnnnnnnnnnnnnnnnnnnnnnnnnnnnnnnnnnnnnnnnnnnnnnnnnnnnnnnnnnnnnnnnnnnnnnnnnnnnnnnnnnnnnnnnnnnnnnnnnnnnnnnnnnnnnnnnnnnnnnnnnnnnnnnnnnnnnnnnnnnnnnnnnnnnnnnnnnnnnnnnnnnnnnnnnnnnnnnnnnnnnnnnnnnnnnnnnnnnnnnnnnnnnnnnnnnnnnnnnnnnnnnnnnnnnnnnnnnnnnnnnnnnnnnnnnnnnctcgccggggctccaggatttctgtgtctctgcctgtcggggacagacttccagattcactctcccttgggcccagtgatgatgatagggggactcccacctccagtcagcccagtgtgccccaggctggatccaacacccacagnnnnnnnnnnnnnnnnnnnnnnnnnnnnnnnnnnnnnnnnnnnnnnnnnnnnnnnnnnnnnnnnnnnnnnnnnnnnnnnnnnnnnnnnnnnnnnnnnnnnnnnnnnnnnnnnnnnnnnnnnnnnnnnnnnnnnnnnnnnnnnnnnnnnnnnnnnnnnnnnnnnnnnnnnnnnnnnnnnnnnnnnnnnnnnnnnnnnnnnnnnnnnnnnnnnnnnnnnnnnnnnnnnnnnnnnnnnnnnnnnnnnnnnnnnnnnnnnnnnnnnnnnnnnnnnnnnnnnnnnnnnnnnnnnnnnnnnnnnnnnnnnnnnnnnnnnnnnnnnnnnnnnnnnnnnnnnnnnnnnnggctcagggttcctgggcaacaccacctcagcggggtcggctcctgtatgctccgctgttgttggtggaagagggtgcagcgggggaggggtacctcggcagatccagtggcccactgcgcaccttcacctgtctgcacgtgcctggaacccactcggaccccagccatgggaagaggggcagtgccgacagcttggtggaggctgt

SEQ ID NO: 29865 - DNA, 95 bp, Macaca Mulatta
aggaaatccgaaaagttgtacagagtttagaacaaacagctcgagagattttaactctactgcaaggggtccatcagggtgctgggtttcaggac

SEQ ID NO: 29866 - DNA, 3979 bp, Macaca Mulatta
  misc_feature (1)...(3979): n = A,T,C or G
gatcttattggcctgccatgggtgtgctttatatatacaatcatgagtctagcatccctgctttttgttgttatgtttatacctgagacaaaggggtgctctttggaacaaatatcaatggagctagcaaaagtnnnnnnnnnnnnnnnnnnnnnnnnnnnnnnnnnnnnnnnnnnnnnnnnnnnnnnnnnnnnnnnnnnnnnnnnnnnnnnnnnnnnnnnnnnnnnnnnnnnnnnnnnnnnnnnnnnnnnnnnnnnnnnnnnnnnnnnnnnnnnnnnnnnnnnnnnnnnnnnnnnnnnnnnnnnnnnnnnnnnnnnnnnnnnnnnnnnnnnnnnnnnnnnnnnnnnnnnnnnnnnnnnnnnnnnnnnnnnnnnnnnnnnnnnnnnnnnnnnnnnnnnnnnnnnnnnnnnnnnnnnnnnnnnnnnnnnnnnnnnnnnnnnnnnnnnnnnnnnnnnnnnnnnnnnnnnnnnnnnnnnnnnnnnnnnnnnnnnnnnnnnnnnnnnnnnnnnnnnnnnnnnnnnnnnnnnnnnnnnnnnnnnnnnnnnnnnnnnnnnnnnnnnnnnnnnnnnnnnnnnnnnnnnnnnnnnnnnnnnnnnnnnnnnnnnnnnnnnnnnnnnnnnnnnnnnnnnnnnnnnnnnnnnnnnnnnnnnnnnnnnnnnnnnnnnnnnnnnnnnnnnnnnnnnnnnnnnnnnnnnnnnnnnnnnnnnnnnnnnnnnnnnnnnnnnnnnnnnnnnnnnnnnnnnnnnnnnnnnnnnnnnnnnnnnnnnnnnnnnnnnnnnnnnnnnnnnnnnnnnnnnnnnnnnnnnnnnnnnnnnnnnnnnnnnnnnnnnnnnnnnnnnnnnnnnnnnnnnnnnnnnnnnnnnnnnnnnnnnnnnnnnnnnnnnnnnnnnnnnnnnnnnnnnnnnnnnnnnnnnnnnnnnnnnnnnnnnnnnnnnnnnnnnnnnnnnnnnnnnnnnnnnnnnnnnnnnnnnnnnnnnnnnnnnnnnnnnnnnnnnnnnnnnnnnnnnnnnnnnnnnnnnnnnnnnnnnnnnnnnnnnnnnnnnnnnnnnnnnnnnnnnnnnnnnnnnnnnnnnnnnnnnnnnnnnnnnnnnnnnnnnnnnnnnnnnnnnnnnnnnnnnnnnnnnnnnnnnnnnnnnnnnnnnnnnnnnnnnnnnnnnnnnnnnnnnnnnnnnnnnnnnnnnnnnnnnnnnnnnnnnnnnnnnnnnnnnnnnnnnnnnnnnnnnnnnnnnnnnnnnnnnnnnnnnnnnnnnnnnnnnnnnnnnnnnnnnnnnnnnnnnnnnnnnnnnnnnnnnnnnnnnnnnnnnnnnnnnnnnnnnnnnnnnnnnnnnnnnnnnnnnnnnnnnnnnnnnnnnnnnnnnnnnnnnnnnnnnnnnnnnnnnnnnnnnnnnnnnnnnnnnnnnnnnnnnnnnnnnnnnnnnnnnnnnnnnnnnnnnnnnnnnnnnnnnnnnnnnnnnnnnnnnnnnnnnnnnnnnnnnnnnnnnnnnnnnnnnnnnnnnnnnnnnnnnnnnnnnnnnnnnnnnnnnnnnnnnnnnnnnnnnnnnnnnnnnnnnnnnnnnnnnnnnnnnnnnnnnnnnnnnnnnnnnnnnnnnnnnnnnnnnnnnnnnnnnnnnnnnnnnnnnnnnnnnnnnnnnnnnnnnnnnnnnnnnnnnnnnnnnnnnnnnnnnnnnnnnnnnnnnnnnnnnnnnnnnnnnnnnnnnnnnnnnnnnnnnnnnnnnnnnnnnnnnnnnnnnnnnnnnnnnnnnnnnnnnnnnnnnnnnnnnnnnnnnnnnnnnnnnnnnnnnnnnnnnnnnnnnnnnnnnnnnnnnnnnnnnnnnnnnnnnnnnnnnnnnnnnnnnnnnnnnnnnnnnnnnnnnnnnnnnnnnnnnnnnnnnnnnnnnnnnnnnnnnnnnnnnnnnnnnnnnnnnnnnnnnnnnnnnnnnnnnnnnnnnnnnnnnnnnnnnnnnnnnnnnnnnnnnnnnnnnnnnnnnnnnnnnnnnnnnnnnnnnnnnnnnnnnnnnnnnnnnnnnnnnnnnnnnnnnnnnnnnnnnnnnnnnnnnnnnnnnnnnnnnnnnnnnnnnnnnnnnnnnnnnnnnnnnnnnnnnnnnnnnnnnnnnnnnnnnnnnnnnnnnnnnnnnnnnnnnnnnnnnnnnnnnnnnnnnnnnnnnnnnnnnnnnnnnnnnnnnnnnnnnnnnnnnnnnnnnnnnnnnnnnnnnnnnnnnnnnnnnnnnnnnnnnnnnnnnnnnnnnnnnnnnnnnnnnnnnnnnnnnnnnnnnnnnnnnnnnnnnnnnnnnnnnnnnnnnnnnnnnnnnnnnnnnnnnnnnnnnnnnnnnnnnnnnnnnnnnnnnnnnnnnnnnnnnnnnnnnnnnnnnnnnnnnnnnnnnnnnnnnnnnnnnnnnnnnnnnnnnnnnnnnnnnnnnnnnnnnnnnnnnnnnnnnnnnnnnnnnnnnnnnnnnnnnnnnnnnnnnnnnnnnnnnnnnnnnnnnnnnnnnnnnnnnnnnnnnnnnnnnnnnnnnnnnnnnnnnnnnnnnnnnnnnnnnnnnnnnnnnnnnnnnnnnnnnnnnnnnnnnnnnnnnnnnnnnnnnnnnnnnnnnnnnnnnnnnnnnnnnnnnnnnnnnnnnnnnnnnnnnnnnnnnnnnnnnnnnnnnnnnnnnnnnnnnnnnnnnnnnnnnnnnnnnnnnnnnnnnnnnnnnnnnnnnnnnnnnnnnnnnnnnnnnnnnnnnnnnnnnnnnnnnnnnnnnnnnnnnnnnnnnnnnnnnnnnnnnnnnnnnnnnnnnnnnnnnnnnnnnnnnnnnnnnnnnnnnnnnnnnnnnnnnnnnnnnnnnnnnnnnnnnnnnnnnnnnnnnnnnnnnnnnnnnnnnnnnnnnnnnnnnnnnnnnnnnnnnnnnnnnnnnnnnnnnnnnnnnnnnnnnnnnnnnnnnnnnnnnnnnnnnnnnnnnnnnnnnnnnnnnnnnnnnnnnnnnnnnnnnnnnnnnnnnnnnnnnnnnnnnnnnnnnnnnnnnnnnnnnnnnnnnnnnnnnnnnnnnnnnnnnnnnnnnnnnnnnnnnnnnnnnnnnnnnnnnnnnnnnnnnnnnnnnnnnnnnnnnnnnnnnnnnnnnnnnnnnnnnnnnnnnnnnnnnnnnnnnnnnnnnnnnnnnnnnnnnnnnnnnnnnnnnnnnnnnnnnnnnnnnnnnnnnnnnnnnnnnnnnnnnnnnnnnnnnnnnnnnnnnnnnnnnnnnnnnnnnnnnnnnnnnnnnnnnnnnnnnnnnnnnnnnnnnnnnnnnnnnnnnnnnnnnnnnnnnnnnnnnnnnnnnnnnnnnnnnnnnnnnnnnnnnnnnnnnnnnnnnnncaagaggggctatttgataattacattgtggcacagaggcggcttgtgggcacttcttgttaaaacatctccatgttaccaacttctgacaagactcttagtataggcttgggcaccaacccaagattaaagtcaagaacctcaatcacttctctacaactacaggtgttgagtctttccagaaaaacaaagatccaaatgaggcaccattcatcacagcttctttctcatggccatctagtgggtaagaggtttctcttcttaaaactacaatttcttaacctttacaagttatttaacattttctatcatattaaattagcaacataaaacattatcctttatctataaacttctagtctggttctctagagtttatatacacgtttttatttctaatctgcaagaaaaaaaaattcctatttgttatttggtaacagagcattaaaagatactatacacatgtgnnnnnnnnnnnnnnnnnnnnnnnnnnnnnnnnnnnnnnnnnnnnnaaaatacacttcaaaaagaagccttcaagaattagccaaagtcttaagcttgcatagatttnnnnnnnnnnngtatgaatacaatttttgttaaaattgtaaaaggggaataaaagttacagaatggatatgaagagagatctattgcaaacttttatttgtg

SEQ ID NO: 29867 - DNA, 106 bp, Macaca Mulatta
gctctgcagaaagaactcgagcaatttgccaagctcctgaagcagaagaggatcaccctgggatatacacaggccgatgtggggctcaccctgggggttctatttg

SEQ ID NO: 29868 - DNA, 545 bp, Macaca Mulatta
  misc_feature (1)...(545): n = A,T,C or G
caggagtggccagaagcctcctctccaggcctcatgggggaaacactggtctcatgagagacctgggtcctgcgcatcaggaccaaagcggcatgtgcgagaaccctgcgggccaagagatgacagcgattacaaaccccagccccagccttgcagctgaccttgcaggagacaccctgcccggctgtcccggtgcagctgaacatcaggggcctctgctggacagaagctccgagtccacacnnnnnnnnnnnnnnnnnnnnnnnnnnnnnnnnacgagaggggatgctgccgtggctgcatcagtntcagccctttccctgccccgagacgtcccagagagcggctgggtgctcacagttcctgttaggccatcagaggaagatcaaagatcaaccctcccccatgggcctctgcctgccaggtgggctccctgcctgtctcccggcccccaagagctccacggactctgccaatagctgctttaaaggagggagggagttttctgatcctctggatatccctggggctggggctgtgggctg

SEQ ID NO: 29869 - DNA, 458 bp, Macaca Mulatta
  misc_feature (1)...(458): n = A,T,C or G
gttagctagccacccgagaaaacaccatgaaagacaccgatatcaaaagactactgtatacccatcttttatgcatattttcgattatcctaagtgtcttgattccatcactctttttggagaacttctcaatattggaaacacacttgacatggttgtgcatctgttctggttttgtaactgctgtcaatctagtactatatttagcggtgaaaccaaatacatcctctaaaagaagttcattatcacacaaggtannnnnnnnnnnnnnnnnnnnnnnnnnnnnnnnnnnnnnnnnnnnnnnnnnnnnnnnnnnnnnnnnnnnnnnnnnnnnnnnnnnnnnnnttggcattggaaacatttttatttgcagttattttgtctacttttactactgtgccttgcttgtgtttgttaggaccaaacctcaaagcatggctaagggttttcagtagaaa

SEQ ID NO: 29870 - DNA, 780 bp, Macaca Mulatta
tagttccagaataggccccataataggtattctgaagtccccacgagtctgttatatatcctgagcagagggcaaatcgcagtcatctgaaaaagccgctgcatggcccagggccaaggtggtgtcataaagttcttggatatcaccttgtacaattacatcatcgtccaaatagatgactttctcatgttggtggataagtagagggagataaaatcgaacaaagttcaggggctggagcaattcaggcctcgatgagtctggtctgatcttccctttgaggaccatcgggttgaattccacgattttaaagtttatttccctcagtttggaatgttcaatccattttcgtattcgagtcagagtattccggagtcccactacatagaacaagatgttggcgtcagtgttgctgtagatgctattaatggcagccatagtggcacccatcctccctgctgcagcacaaatcaccacaggaatctcttcttccagttcttcaggagtctcggattcatcatctgcatcattcttagacacagtccccttatgaactttcttgtacagaatcacacagagggtcacgatcagaaggaacagcagcacctgattaatttttcgtaacagagccatgtgtattcactcagataagaaccgtaacctggtgaatggtgagggtagggctttgggctcctcggtccagaagagctgcaaggcagagcgttcaaatcgtggctggccctgggctgccgccctcacgatgcttctgctgcttctccc

SEQ ID NO: 29871 - DNA, 650 bp, Macaca Mulatta
  misc_feature (1)...(650): n = A,T,C or G
tagatagtatactctcctgtttggagacaggtacaaccaagtcagtcagtctctgtgtttttcagctcaactgtgtctgaaccttctttaagtgatgtgtgtggggagaaacagaatggtgctcttacctttcttgannnnnnnnnnnnnnnnnnnnnnnnnnnnnnnnnnnttttgcaatcctttcctcagacctggctgcaggctaactggaaggcagcactcccttttttatatggtagaaaaatgaagtttattataagtttttatattttctacttgttcatttggtgcaaactcaagattttgattttcttttaataggtgcagtctttgagataatttgtttttacctgtattgccctttatcttttttagataattctttgtactcctgctacctctccacaccccagcacccccccattttttcaaaccttggtatctgttgggtgaacagtataatcttttcatctgcttttagaatgtgggatatttccagtaccnnnnnnnnnnnnnnnnnnnnnnntgaatccaaagatatataaacaaaatatatatattttataaagattagaatgatataaaggagatacatgtttcnnnnnnnnnnnnnnnnnnggaagttacattgttcatgttcgtattat

SEQ ID NO: 29872 - DNA, 223 bp, Macaca Mulatta
ttcactgctggccagtgcctgcgttttccaccacctctaatttcagcttcagcaagttgcttggaactttggttctggcagcagcagcaacatcattaccgctagcggcagttttgtgccgaggcacctacacacctccagtcgtctgtgccagatcgcgggcctgtctgtgtctgctcctacacgccggtcggcaggaccatgtctctggtaagccagaatt

SEQ ID NO: 29873 - DNA, 684 bp, Macaca Mulatta
agccgggaactcccccacactctgaggcagaatgtggtggcgggtcctggttaggtgggtaggacccctctgtcacctgtcttctgcctgcagggatgatctggatgggcagatccgccacatgctcttctcctgggctgagcgccaggctgggcagccaggggctgtgggactcctggtgcaggccctggagcagagtgaccggcaggacgtggcagaagaggtgcgtgcagtcttggagctcggctgccgcaagtaccaggacggcatccgacgcacgggtttagcccccaaggaccccgctctgcctggctcgtcagctccacagcccccagagcctgcccaggcctaggccccacagactttgggctggcccggacattccccagcggatgggcagagcccccaccttcaagcctttccagtgtgtggggacaggggtccccgtgggcaacaaacccgcactgtttctttcgccatctcagagctcgatttatttgttggatggagaagccgttggagggtgggggtggcgtggtaatcagaggcctggaccctacggggagggagccctttgtgcacagatgccccacagcctggtcctgttctctcccactgtgcctggggcctcctgtgggtcctcatcttcctgggggtgaggagctgtgctacaaagtaacccat

SEQ ID NO: 29874 - DNA, 77 bp, Macaca Mulatta
acagaaaaatctaagctgttgtctgatataagtgctcgtctatggtttacatacagaaggaaattttcaccaattgg

SEQ ID NO: 29875 - DNA, 647 bp, Macaca Mulatta
  misc_feature (1)...(647): n = A,T,C or G
ggggaaaattgagaaagaatacatataaaagatagagaggcataacatcaatgcagagttggaagttgactcccaagggctgacatggtgtgtgtgagtgtgggtgtgtgataagcttctcatccctgcatagatgcagtattcttagccttagtagaaaaacttggtttagtggtttaagccttgtgtgacggatagatcttaaagggcaaagcagtatattggtagttgtcaatatagcagtgctagctctgtctatataaatagagaaatggggttagccatagaggttaaaactacctggttatcccatatattaacacaaactgggtcttggatacacagttgtatttaatgttttacgatctagcctttccagtacaggcactttctgagaaacctttgtcctcatttggggcattttgttgtcgggtttttagtgtttgtttttgtgagtatctgcctcattccacccctgagctttcaggtagacagatgtggttcanaactctgttctaaggtgtttattgtagtggagtaatgggttgcagtgatagtcatacttntccacgaangggagggcttgggagatccctgagacagctacagtaagtgttggagaatcnctgatgnaaatttaccttgtn

SEQ ID NO: 29876 - DNA, 103 bp, Macaca Mulatta
aggaaaaagaattctagttttaaatggaggctacagaggaaatgaaggtacccttgaatccatcaatgagaagactttttcagctactatcgtcattgaaact

SEQ ID NO: 29877 - DNA, 279 bp, Macaca Mulatta
  misc_feature (1)...(279): n = A,T,C or G
gggcaactacagcaacaacctcacctgtcactggctgcttgaggctcctgagggccagcggctacacttgcacttgagaaaggttccctggcagaggatgatgacaggncaggctcatcattcgcaatggggacaacgtggaggccccaccggtgtatgattcctatgaggtggaatacctgcccattgagggcctgctcagctctggcaaacacttctttgtcgagctcagtactgacagcagcggggcggctgcaggcatggccctgcgctatgagg

SEQ ID NO: 29878 - DNA, 1064 bp, Macaca Mulatta
  misc_feature (1)...(1064): n = A,T,C or G
acagcactattccaggcatacagaaaatttggatacgaacatggggttgttctcataataattcagatggagaatatatggctggacagctagctgcttgtgactataaaattacannnnnnnnnnnnnnnnnnnnnnnnnnnnnnnnnnnnnnnnnnnnnnnnnnnnnnnnnnnnnnnnnnnnnnnnnnnnnnnnnnnnnnnnnnnnnnnnnnnnnnnnnnnnnnnnnnnnnnnnnnnnnnnnnnnnnnnnnnnnnnnnnnnnnnnnnnnnnnnnnnnnnnnnnnnnnnnnnnnnnnnnnnnnnnnnnnnnnnnnnnnnnnnnnnnnnnnnnnnnnnnnnnnnnnnnnnnnnnnnnnnnnnnnnnnnnnnnnnnnnnnnnnnnnnnnnnnnnnnnnnnnnnnnnnnnnnnnnnnnnnnnnnnnnnnnnnnnnnnnnnnnnnnnnnnnnnnnnnnnnnnnnnnnnnnnnnnnnnnnnnnnnnnnnnnnnnnnnnnnnnnnnnnnnnnnnnnnnnnnnnnnnnnnnnnnnnnnnnnnnnnnnnnnnnnnnnnnnnnnnnnnnnnnnnnnnnnnnnnnnnnnnnnnnnnnnnnnnnnnnnnnnnnnnnnnnnnnnnnnnnnnnnnnnnnnnnnnnnnnnnnnnnnnnnnnnnnnnnnnnnnnnnnnnnnnnnnnnnnnnnnnnnnnnnnnnnnnnnnnnnnnnnnnnnnnnnnnnnnnnnnnnnnnnnnnnnnnnnnnnaggaaatggcaaaaatccttaatcaccccagagtctacgcttttctgcacataccagtccagtctgcctccgacagcgtactcatggaaatgaaaagagaatactgtgtggctgacttcaaaagagtannnnnnnnnnnnnnnnnnngttcctggaataactattgctacagatattatctgtggttttcctggagaaacagatcaggattttcaagaaacagtgaaacttgttgaagagtacaaattcccaagcctctttattaatcagttttacccaagaccaggaactcctgctgcanaaatggaacaagttccagcacaagtg

SEQ ID NO: 29879 - DNA, 498 bp, Macaca Mulatta
  misc_feature (1)...(498): n = A,T,C or G
cagggaggctcccagctgggccactgcatctcggagaacgaggggggtgcccatggctatgtcaacacnctggctgtggcctcccataattgagggtgaagggcatgggtccttggttttgggttgagagtccccaacccccttgtcttctaccttctgtcgcccagatttgatcaggctgtatttggaagaggtaacccttttcagggctaagggccagggtgtccttctgcacccctggggtgaggacagcttggagggaaaccagcagttaatggtgagggaggtaggtgcagttactctctcctcctgtcctaccccaatcctgacctccaagggctggtacctctgcttcttgctttgcccacctccactctaattcccatccattaggaggagaggggtgctgggccttggaccttctcccttgcttagaagtgccagcctcttttaggctgtggttagtggccattgtcagataccttgaaattgacccag

SEQ ID NO: 29880 - DNA, 487 bp, Macaca Mulatta
  misc_feature (1)...(487): n = A,T,C or G
tagaaaagacttgtagccaaatggctggggtggttcagcttgtaaaggctgcagcacacccaggcctggcggaaccagcagacggggctatgcccagctccttgctagagcaggggagtatgatcttggcactgtcggacacggagcagagactanaagcccaagtcaacaggaacaccatctacagcaccctggtcacctgtgtgacatttgtggccacactacctgtgctctacatgctattcagagccagctaacccctggcccctcctccagagggtctgaggcaatatctgtaaatgtggatttagttagagacttgtagcaatgaagtgagcctttgggggtgtgtataacctcaatctgaaggagcagcatctgtgtcactcaccagcaggcacacttcactttgcagacaaggttcatttacattaattatcaaaactttgtgctaatgtccaattaaaatatcctgagctttactatt

SEQ ID NO: 29881 - DNA, 357 bp, Macaca Mulatta
ttaaataataatctttaagagttaatgataagcatatgttatgtgctttattaataaaatagtggccacttatgtaatacccacttttagtttgtgtgtgggtactctggttactgagataaataaagtgctggacatcctcacgtggagttcacaggctcatgagtgaattctgtacctcgtttcaaccttgtttattttagtttaatggaatatacattcttaatattgcctgattatttaaatgtgttagggggggtgcatatgctatattggcctgtaaaaatagctaatttggtaagatttggtctcgcaccttccacctctgctatcacattaaagatgagtttgttaaaa

SEQ ID NO: 29882 - DNA, 529 bp, Macaca Mulatta
tatttctaattccttgggctacaaaggtgtttatttttcagatgtatcagtggtatatgtgaccttcaccttgccagtgggggctgtgagaagacaccttagggagtgtgtgaggtggtgatgaggatgggcctaatgaccctgcggggcctaatcaagggtgggtcatctgtcatctgagattttcttctgcttaactttcatcatgacccaaagaagaccgagggaaacggatgttatgggaggatcttgctgctaaggaggtgaaatccagaggggtacggtgaagttgtgtttttgtatcaacactggaagcgagagaaccagagaatagcttcattccagcttattccttttcgtgattgactcccagtgtgttctctgtgaattggtttccttgttgagcggttagcttaattctcatccgagctggtggcactccattttatcccaaatactgtgatgggcaacttctcatattttaggatctaatttttcaaaccttcactatgttgaaaatataaccaag

SEQ ID NO: 29883 - DNA, 92 bp, Macaca Mulatta
tcttctgagttgactaccagctcagcctctttgttatagatctaatcaagttttctatttcctttttccttaatagatatgtctagaaatct

SEQ ID NO: 29884 - DNA, 845 bp, Macaca Mulatta
  misc_feature (1)...(845): n = A,T,C or G
caggcaacatgtcggaaggaaacgccgccggcgagcccagcactccgggagggccccgacccctcctnnnnnnnnnnnnnnnnnnnnnnnnnnnnnnnnnnnnnnnnnnnnnnnnnnnnnnnnnnnnnnnnnnnnnnnnnnnnnnnnnnnnnnnnnnnnnnnnnnnnnnnnnnnnnnnnnnnnnnnnnnnnnnnnnnnnnnnnnnnnnnnnnnnnnnnnnnnnnnnnnnnnnnnnnnnnnnnnnnnnnnnnnnnnnnnnnnnnnnnnnnnnnnnnnnnnnnnnnnnnnnnnnnnnnnnnnnnnnnnnnnnnnnnnnnnnnnnnnnnnnnnnnnnnnnnnnnnnnnnnnnnnnnnnnnnnnnnnnnnnnnnnnnnnnnnnnnnnnnnnnnnnnnnnnnnnnnnnnnnnnnnnnnnnnnnnnnnnnnnnnnnnnnnnnnnnnnnnnnnnnnnnnnnnnnnnnnnnnnnnnnnnnnnnnnnnnnnnnnnnnnnnnnnnnactctttttggcagttcctcgatgaccccgggctgaggaacgacactcgaaatatgcctgtgcagctgccgctggctcactcggggtggctttttaaggaagaaaatgacgaaccagatgttaaaccttggctgactggccccaaggaagaagacatggaggtggacgtacctgctgtgaaagnagtgaaagaggagccacgagatgaggaagaggccaagatgaaggctccccccaaagcagccaggaagaccccaggcctcccaaaggatgtatccgtggcagagctgctcagggagctgagcctcaccaaggaggaggaactgctgtttctgcagctgccagacac

SEQ ID NO: 29885 - DNA, 349 bp, Macaca Mulatta
cagagtggaagctcaaaatgaaatggggcagcacattcattgttatgttgcagctcttgctgctcatacaacttttctggaacaacccaagagctttcgtccttcccagtggataaaagaacatagtgaaagacagtctcttaacagaaatagccttcgtcgccaaaatcttaccagggattgccactctcggcaagtcaagcacaatggctgggttgttcatcagccctgtccgcgtcagtacaattactaagaattttaagttttattggttggtttctcttggatggtgcatatgtgtatggatgtgtgtatatgtacaatgaaagtgtgtctctttacaaccaat

SEQ ID NO: 29886 - DNA, 499 bp, Macaca Mulatta
  misc_feature (1)...(499): n = A,T,C or G
atgaatcaggaactgctctctgtgggcagcaaaagacgacgaactggaggctctctgagaggtaacccttcctcaagccaggtagatgaagaacagatgaatcgtgtggtagaggaggaacagcaacagcaacttagacaacaagaggaggagcacactgcaaggaatggtgaagttgttggagtagaacctagacctggaggccaaaatgattcccagcaaggacaattggaagaaaacaataatagatttatttcagtagatgaggactcctcaggaaaccaagaagaacaagaggaagatgaagaacatgctggtgaacaagannnnnnnnnnnnnnnnnnnnnnnnnnnnnnnnnnnnnnnnnnattttgatcagtcagatgatagtagcagagaagatgaacatacacatagtaacagtgtcacaaactccagtagtattgtggacctgcccgttcaccagctctcctccccattctatacaaaaaccacaaaa

SEQ ID NO: 29887 - DNA, 483 bp, Macaca Mulatta
ggtcatgctcacagagggcctggtctggaatattccacatctgctctcactctgccatgggcttctggactctctgctgtgtgtccttttgtatcctggtagcgaagcacacagatgctggagttatccagttaccccggcatgaggtgacagagatgggaaaagaagtgactctgagatgcgaaccaatttcaggccacagctcccttttctggtacagacagaccatgatgcggggactggagttcctgatttactttaacaacaagtctccgatagatgattcagggatgcccaaggatcgattctcagctacgatgcctgacgcatcattctccactctgaagatccagccctcagaacccagggactcggctgtgtacttctgtgccagcacccctggacagggtacacaatgagcagttctttgggcaaggcacacgactcaccatcctagaggacctgaaaaaagtgttcccaccc

SEQ ID NO: 29888 - DNA, 1417 bp, Macaca Mulatta
gcaggagggcgggcggggggcagggtctccgggggaccggtcgggccatggcggaggacggcgaggaggcggagttccacttctcggcgctctatataagcgggcagtggcccggctgcgggcagacactgaccttcagcgtctcggctccatcgccatggcgccttccaggaagttcttcgttggggggaactggaagatgaacgggcggaagcagaatctgggggagctcatcggcactctgaacgcggccaaggtgccggcagacaccgaagtggtttgtgctccccccactgcctatatcgacttcgcccggcagaagctagatcccaagattgctgtggctgcacagaactgctacaaagtgactaatggggcctttactggggagatcagccctggcatgatcaaagactgcggagccacgtgggtggtcctggggcactcagagagaagacatgtctttggggagtcagatgagctgattgggcagaaagtggcccatgctctggctgagggactcggagtaatcgcctgtattggggagaagctagatgaaagggaagctggcatcactgagaaggttgttttcgagcagacaaaggtcatcgcagataatgtgaaagactggagcaaggttgtcctggcctatgagcctgtgtgggccattggtactggcaagactgcaacgccccaacaggcccaggaagtacatgagaagctcccgaggatggcttaagtccaacgtctctgaagcagtggctcagagcacccgtatcatttatggaaggctctgttaactggggcaacctgcaaggagctgggccagccagcctgacgttggatgggcttccttgggggggggtgcttccctcaagcccgaattcgtggacatcatcaatgccaaacaatgagccccatccaccttccctacccttcctgccaagccagggactaagcagcccagaagcccagtcactgccccttccccgcacatgcttctgatggtgtcgcctgctccttcctgtggcctcatccaaactgtaccttcctttactatcttcagcctgtaatggttgggaccaggccaatcccttctccacttactataatggttggaactaaatgtcaccaaggtggcttctcctcggctgagagatggaaggggtgggatttgctcctgggttccctaggccctagtgagggcaggagagaagccatcctctcccttcttacacagtgaggccgagatcctcccctccgaaggcaggagtgccgccctctcccatggtgcccatgcctgtgtgctgtgtacgtgaaccacccacatgtgagggaataaacacctagcactaggtcttgtggtctgtctgccttcactggacttgcccagataatcttcctttttgaggcagct

SEQ ID NO: 29889 - DNA, 212 bp, Macaca Mulatta
aggtttttcatagtctcctcaaggctcatgcaatggaagctcgagcgatcgtcagacaggcgatggccattctgaccccggcggtgccggccaggatggaggacgggcaccagatgctgacccactggacccggaagatcatcgtagaggaggggcacaccgtcccacagctggtccacattctgcacctgatagtgcaacacttcaaggtg

SEQ ID NO: 29890 - DNA, 158 bp, Macaca Mulatta
agggtggatctattttattaataacaggtcctcctggatgtggaaagacaacgaccataaaagtactatcaaaggagcatggtattcaagtacaagagtggattaatccagttttaccagatttccaaaaagatgatttcagggagatatttaatact

SEQ ID NO: 29891 - DNA, 159 bp, Macaca Mulatta
tcaggaagtggaaacagagcaatacttcactctctttctgccagcattgaaggagcgtggatatgatggatttttttctccaaagtcacgtgccaaaatcatgtctgagcaggagagaaagcatgtagatggttgtgcaatattcttcaaaacagaaaa

SEQ ID NO: 29892 - DNA, 641 bp, Macaca Mulatta
  misc_feature (1)...(641): n = A,T,C or G
atgattacaaatatcctagntgtctgtccagaaagcctttctaggggaagaatagtagaattttccaaaggtccagttttagcttttataactgaaatctggccctgttacgttctttttagtttgaaccataaggtatcttccctcccctcaggaataacttattggaaaactgaaaagaatcactgaatggaatgttcattttatggcagttattttaagttttaaaatacacagaggaaaacattgtggaaggacctctttgttgctttcccttctaagttttcttcttcttctttggtccttatgtgaaataaagactctcaaactaatttgtatattatcagccagagatgcggatggcagtcgagccaagtcacgtggctttcagatcaggtattctccacattcattccaaggtcatagatttgtaaaaggacctggattgatggtaaatgatgagccatcagaaaactaaatttggaaaacatgtatgtagccagtgtggatattgtggcctctctcaagacacattgacactgtagacttcattcagtgcagtgtgagtattttggagtaggttggatgtagatttagctaatattgttgatttgtaccgacagaaatagactttcatcatg

SEQ ID NO: 29893 - DNA, 1296 bp, Macaca Mulatta
  misc_feature (1)...(1296): n = A,T,C or G
atggcggacacccagtacatcctgcccaatgacatcggcgtgtctagcctggactgccgtgaggccttccgcctgctgtcacccacagagcgcctctatgcccaccacctgtcccgtgctgcctggtatggaggcctggctgtgctgcttcagacctcccccgaggccccttacatctatgctctgctcagccgcctcttccgcgcacaggaccccgaccagctgcgccaacatgccctggctgagggccttaccgaggaggagtatcagnnnnnnnnnnnnnnnnnnnnnnnnnnnnnnnnnnnnnnnnnnnnnnnnnnnnnnnnnnnnnnnnnnnnnnnnnnnnnnnnnnnnnnnnnnnnnnnnnnnnnnnnnnnnnnnnnnnnnnnnnnnnnnnnnnnnnnnnnnnnnnnnnnnnnnnnnnnnnnnnnnnnnnnnnnnnnnnnnnnnnnnnnnnnnnnnnnnnnnnnnnnnnnnnnnnnnnnnnnnnnnnnnnnnnnnnnnnnnnnnnnnnnnnnnnnnnnnnnnnnnnnnnnnnnnnnnnnnnnnnnnnnnnnnnnnnnnnnnnnnnnnnnnnnnnnnnnnnnnnnnnnnnnnnnnnnnnnnnnnnnnnnnnnnnnnnnnnnnnnnnnnnnnnnnnnnnnnnnnnnnnnnnnnnnnnnnnnnnnnnnnnnnnnnnnnnnnnnnnnnnnnnnnnnnnnnnnnnnnnnnnnnnnnnnnnnnnnnnnnnnnnnnnnnnnnnnnnnnnnnnnnnnnnnnnnnnnnnnnnnnnnnnnnnnnnnnnnnnnnnnnnnnnnnnnnnnnnnnnnnnnnnnnnnnnnnnnnnnnnnnnnnnnnnnnnnnnnnnnnnnnnnnnnnnnnnnnnnnnnnnnnnnnnnnnnnnnnnnnnnnnnnnnnnnnnnnnnnnnnnnnnnnnnnnnnnnnnnnnnnnnnnnnnnnnnnnnnnnnnnnnnnnnnnnnnnnnnnnnnnnnnnnnnnnnnnnnnnnnnnnnnnnnnnnnnnnnnnnnnnnnnnnnnnnnnnnnnnnnnnnnnnnnnnnnnnnnnnnnnnnnnnnnnnnnnnnnnnnnnnnnnnnnnnnnnnnnnnnnnnnnnnnnnnnnnnnnnnnnnnnnnnnnnnnnnnnnnnnnnnnnnnnnnnnnnnnnnnnnnnnnnnnnnnnnnnnnnnnnnnnnnnnnnnnnnnnacgatgacctgaggcagacggaaggctttaagaacgtgtcactggggaatgtgctggctgtggcctacgccacgcagcgggagaagctcacctttctggaggaggatgacaag

SEQ ID NO: 29894 - DNA, 635 bp, Macaca Mulatta
  misc_feature (1)...(635): n = A,T,C or G
gggagactgtgggaggccgaggcaggtggatcactcaaggtcacannnnnnnnnnnnntnnnnnnnnnnnnnnnnnnnnnnnnnnngtagaatacaaaaattagccgggtgtgtgacggnnnnnnnnnnnnnnnnnnnnnnnnnnnnnnnnnnnnnnnnnnnnnnnnnnnnnnnnnnnnnnnnnnnnntnnnnnnnnnnnnnngnnnnnnnnnnnnntatcctgggtgacagcaagactctgtctcaaaaatcataacaataataataataaagacctaaccaatattattgattaccagacttttatgaaagccaaagactgcttgctagtaggaaaaaaattctaataatagccaaagctgaaaaatggtctgtcataaattatttccccggtaatttttgaaaggaaaaaatttataacgagtactatttgcatatccgcatttaaaaaaacaattcttagaatatttcctttacattattctcctagtttagacaatttgtaaaagagaacaaattgtccagtggcctcctgtcagatcaacaattattatactccttacattccatgcaaatngtaatgaatgctagaaattttnaatctgtagcctgggcgtacgttcactcaagctcc

SEQ ID NO: 29895 - DNA, 1025 bp, Macaca Mulatta
  misc_feature (1)...(1025): n = A,T,C or G
gggcctttcccttcggcgcgccactgaagatcctggtgtcgccatgggccgccgccccgcccgttgttaccggtattgtaagaacaagccgtacccaaagtctcgcttctgccgaggtgtccctgatgccaagattcgcatctttgacctggggcggaagaaggcaaaagtggatgagtttccgctctgtggccacttggtgtcagatgaatatgaaccccagtcctctgtaagccctggaggctgcccgaatttgtgccaataattacatggaagaaagtcgtgactaagatgggcttccatatccgggtggctgctcaacacaatattacgtcagtacgccataaacaaaatgtttgtccaggtgcaggggcccaaacagtaacataattgggctagtaaaggtcgtttcatgacaaatcccccatgggcccaggtgtgcacataggtatcattattggcacaaatttgtcactggatgagtcacttaacgcgatattgcaggaaaagaggatgcgtagctgaagtgaaaagcatcgttttcgatgggaacgggattctagtgatttattccaagacgctaccaaaaagaagatctctcatttttgccttnnnnnnnnnnaggcacacaaaagtgaaataaatagggcccgcaagtaaaggaatgtcgagaatagaaacgtgcctctagcgctagaaataagagagggcgctataaaatggaaatgggatgctatgtaacctttacagagggttgatgtttacgctgtataagtgatgttttcacaaaccgtagaaaaatatcagatggtggttttctaattcgaatgtaaaagtgaatgaagagtgtagactttgttcgcggcttctctacccacaccggggtacgcaacgcagtctatacactcacaggcgatattatacgactgtggtgtaatagcgagtgccagctgtactttcgtacgaagacctctatctaactaagcgatactggggtgacctgataaagtaggacattgtattgt

SEQ ID NO: 29896 - DNA, 333 bp, Macaca Mulatta
ggggaagctcaaaagaaacatgatgccctgggctttacagaagaaacgagaaatccacatggccaaggcccatcggagacgagctgcgaggtctgctctccccatgagactcaccagctgcatcttcccgaggccggtgacaaggatcaggtcttatcctgacaaccaggtcagacgcagaaaaggggaggagcacctggagaagccacagcaactctgcgcctaccggagaatgcaggccctgcagccctgcagcagccaaggcgaaggttcaagtccactgcaattggagaacgtcttaagtatcctcgcaccggggatggccggtgaatc

SEQ ID NO: 29897 - DNA, 735 bp, Macaca Mulatta
aaatgagaaatttgatgcatctataagacagaaatgtctggaactgcacttcaattccgctcagagatttcacgtgtctaaatcacagatctgaagaaataagagattttctgtagttgaatgaaacgagggcagttatgaattgatttgggcactcaaatgaatttatgaaggagaataatatgcttttaatatgttgattcttttcaatgtcattaatcagattccaattttgttcctttgattctgaggttccaaattctctaaggctaaagttcattgttaactttttgtaacaaaggaacagtgtaaccacaggctcttcctgcctttttctacactagaactaataagaaagaagggatttattttacttagtctcccatatattatgatttagaattaagttcccctccctagtcccatggtccaagaaatgctgttttcataatgagactgtatttcttaactctgccccaatttccctttgctgaaaatttgacccaggacactgtgttccactgctgtctaccgagtttcaagttgttctctgagtcatagctcatcttcctgcagtgcctctatttggataacatagttcatgtccccgatcgtgtagttcagattttggaaatgttttttctatatcatgcctaatgtctaagtctcccaaaggcaaacacctacaatagtctctgtagggttctttcctgggaactggagctttgttctgaa

SEQ ID NO: 29898 - DNA, 116 bp, Macaca Mulatta
aagccattccactcattcccctgccacctggtcctccacccagactagaccagtgaaaatttgctttgtcttgtagaatggccttacagtggattaggatagagtagaaattctcc

SEQ ID NO: 29899 - DNA, 110 bp, Macaca Mulatta
  misc_feature (1)...(110): n = A,T,C or G
ngtgagccgcactgacaggaccaacaagttctacgagggtcccgagaacccggggctggggctgctgaacgacatccttctcacctactgcatgtaccacttcgacctcg

SEQ ID NO: 29900 - DNA, 172 bp, Macaca Mulatta
aggagctgcgtgagaccaagcgccgtcatgagacacggctggtggagattgacaatgggaagcagcgtgagtttgagagccggctggcagacgccctgcaggaactgcgggcccagcatgaggaccaggtggagcagtacaagaaggagctggagaagacttattccgccaa

SEQ ID NO: 29901 - DNA, 941 bp, Macaca Mulatta
  misc_feature (1)...(941): n = A,T,C or G
aggatataatacctcagccgctgctagatcagtacgtgtccatgactgacccagctcgagcccagactgttgatactgacatagccaaacactgtgcctacagcctcccaggggtggcgctgaccctgggcaggcaaaattggcactgcctgaaagatacatacgaaacactggcttctgacgtacagnnnnnnnnnnnnnnnnnnnnnnnnnnnnnnnnnnnnnnnnnnnnnnnnnnnnnnnnnnnnnnnnnnnnnnnnnnnnnnnnnnnnnnnnnnnnnnnnnnnnnnnnnnnnnnnnnnnnnnnnnnnnnnnnnnnnnnnnnnnnnnnnnnnnnnnnnnnnnnnnagttgcttcatgaagacaagaggagagactatctttatcagcttcaagaatatgtagtgactgatannnnnnnnnnnnnnnnnnnnnnnnnnnnnnnnnnnncagctgatactgattctagaactctatagtcccagtgatgtttatgattacctaatgcacattgccttaaagttgtgtgcagatcaagtttctgaagttcggtggatctccttcaaactagtnnnnnnnnnnnnnnnnnnnnnnnnnnnnnnnnnnnnnnnnnnnnnnnnnnnnnnnnnnnnnnnnnnnnnnnnnnnnnnnnnnnnnnnnnnnnnnnnnnnnnnnnnnnnnnnnnnnnnnnnnnnnnnnnnnnnnnnnnnnnnnnnnnnnnnnnnngattaaagaagtgtatgtttctggaagactgctggaaaacatcacttctttggctgtgactttattggggcaggcagtggtgagcaaggagtgtgtcnccgtggaccagttcgtggagcacctgcttcccagcctcctgagcctcgcgtcagatcctgtgcccaatgtgagggttctgctagccaaggccctaaggcagatgctgttggcaaagg

SEQ ID NO: 29902 - DNA, 111 bp, Macaca Mulatta
ctgggcagccagctgcagggcctgagcgtggctggcaggggcagctgctgtggccaactggccttgatcaatgctcatatgtaaggcgttgagaggaccctgcaggcagtc

SEQ ID NO: 29903 - DNA, 715 bp, Macaca Mulatta
ttatcgccaccgcgcgcccaagctcggcgagacggcagtgccccagatttgccttttacaagtctacctctcagagaagaaatgatggcaaataacttttcctgggagagtcataacatatcactgactgaacattctagtatgccagtagaaaaaaatatcactttagagaggccttctaatgtaaatctcacatgccagttcacgacatctggggatttgaatgcagtaaatgtgacttggaaaaaagacagtgaacaacttgagaataattatcttgtcagtgcaacaggaagcaccttgtatacccaatacaggttcaccatcattaatagcaaacaaatgggaagttattcttgtttctttcgagaggaaaaggaacaaaggggaacatttaatttcaaagtccctgaacttcatgggaaaaacaagccattgatctcttacgtaggggattctactgtcttgacatgtaaatgtcaaaattgttttcctttaaattggacctggtacagtactaatgggagtgtaaaggttcctgttggtgttcaaatgaataaatatgtgatcaatggaacatatgctaatgaaacaaagctgaagataacacaacttttggaggaagatgggggatcttactggtgccatgaaatattccaagtaggcgagaagtgaagaacacattgagcttgtggtgctgagctatatggtgccc

SEQ ID NO: 29904 - DNA, 966 bp, Macaca Mulatta
  misc_feature (1)...(966): n = A,T,C or G
cagctgcagttaacttggtcccgggcgacccccgatggattggagcctggtggctaggcctgcttatttcttcagtcttcttggttctcacgtctttccccttttttttcttccctcgagtaatgcccataggagcaaaggtaaggnggggaccccagcccctgtggtattgtatgtggtaaggggcagtaggagcagatggcctgtaactggcccatcccctaggtgtgcctgcagcccaggggttctgccagnnnnnnnnnnnnggtctgttcacagagtttccccgcatctttctgaggctcctgatgaacccactcttcgtgctggtggtcctggcccagtgcaccttctcctccgtcattgctggcctctccaccttcctcaataagttcctggagaagcagtatggcacctcagcggcctacgccaacttcctcattggtgnggtgctgtgaacctacctgctgcagccttggggatgctgtttggaggaatcctcatgaagcgctttgttttctctctgcaaaccattccccgcgtagctaccaccatcatcaccatctccatgatcctttgtgttcctctgttcttcatgggatgctccaccccaactgtggccgaagtctacccccctagnagcacatcaagttctatacatccgcagcctcctgcctgccgcagggactgctcgtgcccagattctatcttccacccggtctgtggggacaatggaattgagtacctctccccttgccacgctggctgcagaaacatcaacatgagctctgcaacctccaagcaattggtaagggcagccagggtccagaggcaagaggagccccacaggatctcggagctcagtgcatgccctcaaagactgtttctcggctccaggataggcggggctccacacacacactcattaccagcatcctggcctcctctgagccacatccagcctct

SEQ ID NO: 29905 - DNA, 155 bp, Macaca Mulatta
agaccaggaagctaaaaattgctctggccttatctgatcttgtcatttatactaaagctgagaagttcaaaagctttcaacattcaagattatatcagcaatttaatgaaaataattctattggggagacacaagcccgaaaactttcaaaattg

SEQ ID NO: 29906 - DNA, 263 bp, Macaca Mulatta
  misc_feature (1)...(263): n = A,T,C or G
atctttcagacagaggtttagttggtttgttactcagaagtagccggacccaggaaagctcggaatcactctgggagctctgcatccagtggctgagaccagacattcacacgaaagaacagattttagagcttttggtatttgagcagttcctgaccattttgcctggggagatcaggatttgggtaaagtcacaacatcctgagagtagtgaggaggtggtgnncccaatagaagacttgacccagatgcttgaagaaaaa

SEQ ID NO: 29907 - DNA, 548 bp, Macaca Mulatta
tgcttttgagggcctccctcagctctcttgtgggtaggggttacactcacattccttattctgagaatttggcctagctgtttgcctttgactccctgacctccagagtcaaggttgtgccttattgtcccatctgtgggcctcattctgccaaagctggaccagggctcacctttctaagctccctaaaacttgggccagaaaccaaagctgagctgacttttaactttttccctctatgacacaaatgaattgagggtaggagggtgcacataacccttatcctacttctgccaaaaagtgggggctgtactggggactgctcggatgatctttctttgtgctacttctttcagctgtccctgtagccacaggtctaagatctgactgccgcctcctttctctggcctcttcccctttcctcttcagctaggctagctggtttggagtagaatggcgactaattctaatttttatttattaaatatttggggtttcggttttaaagccagaattacagctagcacctagcatttcagcagagggac

SEQ ID NO: 29908 - DNA, 144 bp, Macaca Mulatta
gcccggtaggcagtgccctgagcacgaagttcgggcccaggcccgtagtgatgaccggaggcatcttggctgcgctggggatgctgctcgcctctttcgctacttcgttgacccacctatacctgagtattgggttgctgtcag

SEQ ID NO: 29909 - DNA, 580 bp, Macaca Mulatta
gagtgactttgccaatggactaggctggcggattgcaggaggaatcttggtccttatcatctgttccatcaatatgtactttgtagtggtttatgtccaggaactagggcatgtggcattgtatgtggtggctgctgtggtcagcgtggcttatctgggctttgtgttctacttgggtcggcaatgtttgattgcactgggcatgtccttcctggactgtgggcatacgtgccatctgggattgacagctcagcctgaactctatcttctgaacgccatggatgctgactcacttgtgtctagatgactgacagcctgagagactctatgagaacacgtttttctaagccctttttgtgccaggtgtcctgttaacatctctgttagttcagaggtgagttttgttcagacgttttgaacaaaaggcaaagatttcctcatgggaagggtgttcaaaactgacagctataaatgtaggtcagagaccacccacctcacaacagtcttacactcccagagttaaacaattggcctctgagagccacacacccctatgggcttgtgtcttggactctgggat

SEQ ID NO: 29910 - DNA, 148 bp, Macaca Mulatta
acccaaatagtaaaaatttcaattaactgaaatacaccagttctaattaagtgtataaatccaatgtctatgtgctcaaaataatagatgccacttctgacaagtcaagataactcattacagtatctttttaatagagaagtatata

SEQ ID NO: 29911 - DNA, 1349 bp, Macaca Mulatta
  misc_feature (1)...(1349): n = A,T,C or G
agctgagcagagtaaagacagagcaaatgggacaaaggaaagctgggtgaataatgtcaacaaagatgctttacttcctccagagctggctggcgttgtagaagagccagaagaagatgcagcaccagcaagcccnnnnnnnnnnnnnnnnnnnnnnnnnnnnnnnnnnnnnnnnnnnnnnnnnnnnnnnnnnnnnnnnnnnnnnnnnnnnnnnnnnnnnnnnnnnnnnnnnnnnnnnnnnnnnnnnnnnnnnnnnnnnnnnnnnnnnnnnnnnnnnnnnnnnnnnnnnnnnnnnnnnnnnnnnnnnnnnnnnnnnnnnnnnnnnnnnnnnnnnnnnnnnnnnnnnnnnnnnnnnnnnnnnnnnnnnnnnnnnnnnnnnnnnnnnnnnnnnnnnnnnnnnnnnnnnnnnnnnnnnnnnnnnnnnnnnnnnnnnnnnnnnnnnnnnnnnnnnnnnnnnnnnnnnnnnnnnnnnnnnnnnnnnnnnnnnnnnnnnnnnnnnnnnnnnnnnnnnnnnnnnnnnnnnnnnnnnnnnnnnnnnnnnnnnnnnnnnnnnnnnnnnnnnnnnnnnnnnnnnnnnnnnnnnnnnnnnnnnnnnnnnnnnnnnnnnnnnnnnnnnnnnnnnnnnnnnnnnnnnnnnnnnnnnnnnnnnnnnnnnnnnnnnnnnnnnnnnnnnnnnnnnnnnnnnnnnnnnnnnnnnnnnnnnnnnnnnnnnnnnnnnnnnnnnnnnnnnnnnnnnnnnnnnnnnnnnnnnnnnnnnnnnnnnnnnnnnnnnnnnnnnnnnnnnnnnnnnnnnnnnnnnnnnnnnnnnnnnnnnnnnnnnnnnnnnnnnnnnnnnnnnnnnnnnnnnnnnnnnnnnnnnnnnnnnnnnnnnnnnnnnnnnnnnnnnnnnnnnnnnnnnnnnnnnnnnnnnnnnnnnnnnnnnnnnnnnnnnnnnnnnnnnnnnnnnnnnnnnnnnnnnnnnnnnnnnnnnnnnnnnnnnnnnnnnnnnnnnnnnnnnnnnnnnnnnnnnnnnnnnnnnnnnnnnnnnnnnnnnnnnnnnnnnnnnnnnnnnnnnnnnnnnnnnnnnnnnnnnnnnnnnnnnnnnnnnnnnnnnnnnnnnnnnnnnnnnnnnnnnnnnnnnnnnnnnnnnnnnnnnngatgaactgtctcattgtgttgagcctgagccgtctcaggtgccaggtggcagttctagagaccatcagcaaggnnnnnnnnnnnnnnnnnnnnnnnnnnnnnnnnnnnnnnnnnnnnnnnnnnnnnnnnnnnnnnnnnnnnnnnnnnnnnnnnnnnnnnnnnnnnnnnnnnnnatcaagcaaaagtagataatcagccagaagaattagtgc

SEQ ID NO: 29912 - DNA, 798 bp, Macaca Mulatta
  misc_feature (1)...(798): n = A,T,C or G
gaaatattcatcataatttgtctccaggaattccaatatcagtacaaacagaagaaagctggctccaagatttgttgggtaaagtgcaatcnnnnnnnnnnnnnnnnnnnnnnnnnnnnnnnnnnnnnnnnnnnnnnnnnnnnnnnnnnnnnnnnnnnnnnnnnnnnnnnnnnnnnnnnnnnnnnnnnnnnnnnnnnnnnnnnngtttaaggaagacttcataacactattcgagccttctctaagaacgttacccagcattggaccaccaaccattctggcatacaaagaagagagctccaatttagacattaacttcaaggnnnnnnnnnnnnnnnnnnnnnnnnnnnnnnnnnnnnnnnnnnnnnnnnnnnnnnnnnnnnnnnnnnnnnnnnnnnnnnnnnnnnnnnnnnnnnnnnnnnnnnnnnnnnnnnnnnnnnnnnnnnnnnnnnnnnnnnnnnnnnnnnnnnnnnnnnnnnnnnnnnnnnnnnnnnnnnnnnnnnnnnnnnnnnnnnnnnnnnnnnnnnnnnnnnnnnnnnnnnnnnnnnnnnnnnnnnnnnnnnnnnnnnnnnnnnnnnnnnnnnnnnnnnnnnnnnnnnnnnnnnnnnnnnnnnnnnnnnnnnnnnnnnnnnnnnnnnnnnnnnnnnnngattcaaagcgcttaaaaacaatttcttatcaactttctgtggatattccagaaaaacagacaattgatgacattgtatttgattttcaactgagaaacagtaacatgtccatcatttgttgtgattctcggatagcatgtggaaaggt

SEQ ID NO: 29913 - DNA, 352 bp, Macaca Mulatta
gcgcccccattcctggaggaccccagccagctgccccctaaggacggcaccccagccccaggctatcccagctatcagcagtaccactgaggaagccactgccaccatgggagctgcttctcggttccctccccgatgatctacctcgaagggagggctggctcccagttagccctgggaccctccagagagggcttctactctgctccctagtcccagggtgggggtggggcaccccagctgccctgaaagatgggtcccctttttctctctcagggcaccccagccccacactcacatgtacgaagttctcaccccagctcctttgtgagcgccctgatgagtatttaaa

SEQ ID NO: 29914 - DNA, 189 bp, Macaca Mulatta
  misc_feature (1)...(189): n = A,T,C or G
gttctcccaaagaatatttggaaactttcatctttcctgttctgcttcccggaatggctagcctgcttcaccaagcgaagaaagaaaaatgttttgannnnnntttcagcccacggccgccaatcccactctccctcctgctgacagaagaggaagcggccctctacattcaatccttctggagagcct

SEQ ID NO: 29915 - DNA, 6473 bp, Macaca Mulatta
  misc_feature (1)...(6473): n = A,T,C or G
nggcttcattgggaaagtaacccttcagattcccttttatcgcccccatgtggacccttgggtgatctccatctccagccttcacttaattggagccccggaaaaaatacaggatttcaatgatgaaaaggagaagctgttggaaagggaacgcaagaaagcactacttcaagccctggaggagaagtggaangaatgaacgccagcagaaaggggagtcctattggtattcagttaccgcctccgtagttacgaggattgtggagaatattgaanttaaaaattcaagatgtccatttacgctttgaagatggtgtcaccaatccctcccatccttttgcgtttggcatctgcattaagaatgtgtccatgcaaaatgctgtgaatgagcctgtnnnnnnnnnnnnnnnnnnnnnnnnnnnnnnnnnnnnnnnnnnnnnnnnnnnnnnnnnnnnnnnnnnnnnnnnnnnnnnnnnnnnnnnnnnnnnnnnnnnnnnnnnnnnnnnnnnnnnnnnnnnnnnnnnnnnnnnnnnnnnnnnnnnnnnnnnnnnnnnnnnnnnnnnnnnnnnnnnnnnnnnnnnnnnnnnnnnnnnnnnnnnnnnnnnnnnnnnnnnnnnnnnnnnnnnnnnnnnnnnnnnnnnnnnnnnnnnnnnnnnnnnnnnnnnnnnnnnnnnnnnnnnnnnnnnnnnnnnnnnnnnnnnnnnnnnnnnnnnnnnnnnnnnnnnnnnnnnnnnnnnnnnnnnnnnnnnnnnnnnnnnnnnnnnnnnnnnnnnnnnnnnnnnnnnnnnnnnnnnnnnnnnnnnnnnnnnnnnnnnnnnnnnnnnnnnnnnnnnnnnnnnnnnnnnnnnnnnnnnnnnnnnnnnnnnnnnnnnnnnnnnnnnnnnnnnnnnnnnnnnnnnnnnnnnnnnnnnnnnnnnnnnnnnnnnnnnnnnnnnnnnnnnnnnnnnnnnnnnnnnnnnnnnnnnnnnnnnnnnnnnnnnnnnnnnnnnnnnnnnnnnnnnnnnnnnnnnnnnnnnnnnnnnnnnnnnnnnnnnnnnnnagagtctgcgggagcctcagtttgattctccaggagcctctccgggagacccagaacctggtggaggcagtgggatgctgcagtatcttcagtcctggtttcctggatggggtggctggtacgggcagcaaaccccagaagggaatgtggttgagggactgtcagcagagcagcaggagcagtggattcccgaagagatcctggnnnnnnnnnnnnnnnnnnnnnnnnnnnnnnnnnnnnnnnnnnnnnnnnnnnnnnnnnnnnnnnnnnnnnnnnnnnnnnnnnnnnnnnnnnnnnnnnnnnnnnnnnnnnnnnnnnnnnnnnnnnnnnnnnnnnnnnnnnnnnnnnnnnnnnnnnnnnnnnnnnnnnnnnnnnnnnnnnnnnnnnnnnnnnnnnnnnnnnnnnnnnnnnnnnnnnnnnnnnnnnnnnnnnnnnnnnnnnnnnnnnnnnnnnnnnnnnnnnnnnnnnnnnnnnnnnnnnnnnnnnnnnnnnnnnnnnnnnnnnnnnnnnnnnnnnnnnnnnnnnnnnnnnnnnnnnnnnnnnnnnnnnnnnnnnnnnnnnnnnnnnnnnnnnnnnnnnnnnnnnnnnnnnnnnnnnnnnnnnnnnnnnnnnnnnnnnnnnnnnnnnnnnnnnnnnnnnnnnnnnnnnnnnnnnnnnnnnnnnnnnnnnnnnnnnnnnnnnnnnnnnnnnnnnnnnnnnnnnnnnnnnnnnnnnnnnnnnnnnnnnnnnnnnnnnnnnnnnnnnnnnnnnnnnnnnnnnnnnnnnnnnnnnnnnnnnnnnnnnnnnnnnnnnnnnnnnnnnnnnnnnnnnnnnnnnnnnnnnnnnnnnnnnnnnnnnnnnnnnnnnnnnnnnnnnnnnnnnnnnnnnnnnnnnnnnnnnnnnnnnnnnnnnnnnnnnnnnnnnnnnnnnnnnnnnnnnnnnnnnnnnnnnnnnnnnnnnnnnnnnnnnnnnnnnnnnnnnnnnnnnnnnnnnnnnnnnnnnnnnnnnnnnnnnnnnnnnnnnnnnnnnnnnnnnnnnnnnnnngataactccaggaggaaaagtagggatgggtctgcatctgaagagacccagtttagtgatgatgaatataagacccccctggccacacctcctaacaccccacctcccgagtcaaacagcagcaatggagagaaaacgcctcccttttctggagtggaattcagtgaagaacagcttcaagcacatttaatgagcacaaagatgtatgagaggtactcgctgtcatttatggacctccagatcatggttggacgagtgaaagacaattggaagcatgtccaggatattgatgtgggaccaacccatgtggtagagaannnnnnnnnnnnnnnnnnnnnnnnnnnnnnnnnnnnnnnnnnnnnnnnnnnnnnnnnnnnnnnnnnnnnnnnnnnnnnnnnnnnnnnnnnnnnnnnnnnnnnnnnnnnnnnnnnnnnnnnnnnnnnnnnnnnnnnnnnnnnnnnnnnnnnnnnnnnnnnnnnnnnnnnnnnnnnnnnnnnnnnnnnnnnnnnnnnnnnnnnnnnnnnnnnnnnnnnnnnnnnnnnnnnnnnnnnnnnnnnnnnnnnnnnnnnnnnnnnnnnnnnnnnnnnnnnnnnnnnnnnnnnnnnnnnnnnnnnnnnnnnnnnnnnnnnnnnnnnnnnnnnnnnnnnnnnnnnnnnnnnnnnnnnnnnnnnnnnnnnnnnnnnnnnnnnnnnnnnnnnnnnnnnnnnnnnnnnnnnnnnnnnnnnnnnnnnnnnnnnnnnnnnnnnnnnnnnnnnnnnnnnnnnnnnnnnnnnnnnnnnnnnnnnnnnnnnnnnnnnnnnnnnnnnnnnnnnnnnnnnnnnnnnnnnnnnnnnnnnnnnnnnnnnnnnnnnnnnnnnnnnnnnnnnnnnnnnnnnnnnnnnnnnnnnnnnnnnnnnnnnnnnnnnnnnnnnnnnnnnnnnnnnnnnnnnnnnnnnnnnnnnnnnnnnnnnnnnnnnnnnnnnnnnnnnnnnnnnnnnnnnnnnnnnnnnnnnnnnnnnnnnnnnnnnnnnnnnnnnnnnnnnnnnnnnnnnnnnnnnnnnnnnnnnnnnnnnnnnnnnnnnnnnnnnnnnnnnnnnnnnnnnnnnnnnnnnnnnnnnnnnnnnnnnnnnnnnnnnnnnnnnnnnnnnnnnnnnnnnnnnnnnnnnnnnnnnnnnnnnnnnnnnnnnnnnnnnnnnnnnnnnnnnnnnnnnnnnnnnnnnnnnnnnnnnnnnnnnnnnnnnnnnnnnnnnnnnnnnnnnnnnnnnnnnnnnnnnnnnnnnnnnnnnnnnnnnnnnnnnnnnnnnnnnnnnnnnnnnnnnnnnnnnnnnnnnnnnnnnnnnnnnnnnnnnnnnnnnnnnnnaattgcaactgttaccataagtggcaccaaagttaatgtctcaatgggtagcacgtttgacatgattggttctctcggctgtttacagcttatggatttgacacaagataatgtcaaaaaccagtatgttgtgagcattgggaattctgtaggctatgaaaatatcatcagtgatattggctactttgaatctgtgtttgtcagaatggaagatgcagccctcactgaagctttgagtttcacgtttgttgagaaatctaaacaggagtgttttctcaacctgaagatggcgtctttacattataaccactctgctaagtttttgaaggagttgacgttatccatggatgaactggaagaaaattttcgaagtatgctgaaaagtgcagccagcaaagtcaccacagtactagctaccaagactgctgagtatagcgagatggtatcactctttgaaactccaaggaagactcgggaaccctttatcttagaggaaaatgaaatatatgggtttgacctagcttcgtctccttcggacactgtaaagctaatcttgaacataaacattgaatcaccagttgtttctatccctcggaagccagggagtcctgagttgttggtgggacacttgggacagatattcatccagaattttgtggcgggagatgatgaatccagaagtgaccgtctgcaggtggaaatcaaggacattaaactgtattctttgaattgcactcagttnnnnnnnnnnnnnnnnnnnnnnnnnnnnnnnnnnnnnnnnnnnnnnnnnnnnnnnnnnnnnnnnnnnnnnnnnnnnnnnnnnnnnnnnnnnnnnnnnnnnnnnnnnnnnnnnnnnnnnnnnnnnnnnnnnnnnnnnnnnnnnnnnnnnnnnnnnnnnnnnnnnnnnnnnnnnnnnnnnnnnnnnnnnnnnnnnnnnnnnnnnnnnnnnnnnnnnnnnnnnnnnnnnnnnnnnnnnnnnnnnnnnnnnnnnnnnnnnnnnnnnnnnnnnnnnnnnnnnnnnnnnnnnnnnnnnnnnnnnnnnnnnnnnnnnnnnnnnnnnnnnnnnnnnnnnnnnnnnnnnnnnnnnnnnnnnnnnnnnnnnnnnnnnnnnnnnnnnnnnnnnnnnnnnnnnnnnnnnnnnnnnnnnnnnnnnnnnnnnnnnnnnnnnnnnnnnnnnnnnnnnnnnnnnnnnnnnnnnnnnnnnnnnnnnnnnnnnnnnnnnnnnnnnnnnnnnnnnnnnnnnnnnnnnnnnnnnnnnnnnnnnnnnnnnnnnnnnnnnnnnnnnnnnnnnnnnnnnnnnnnnnnnnnnnnnnnnnnnnnnnnnnnnnnnnnnnnnnnnnnnnnnnnnnnnnnnnnnnnnnnnnnnnnnnnnnnnnnnnnnnnnnnnnnnnnnnnnnnnnnnnnnnnnnnnnnnnnnnnnnnnnnnnnnnnnnnnnnnnnnnnnnnnnnnnnnnnnnnnnnnnnnnnnnnnnnnnnnnnnnnnnnnnnnnnnnnnnnnnnnnnnnnnnnnnnnnnnnnnnnnnnnnnnnnnnnnnnnnnnnnnnnnnnnnnnnnnnnnnnnnnnnnnnnnnnnnnnnnnnnnnnnnnnnnnnnnnnnnnnnnnnnnnnnnnnnnnnnnnnnnnnnnnnnnnnnnnnnnnnnnnnnnnnnnnnnnnnnnnnnnnnnnnnnnnnnnnnnnnnnnnnnnnnnnnnnnnnnnnnnnnnnnnnnnnnnnnnnnnnnnnnnnnnnnnnnnnnnnnnnnnnnnnnnnnnnnnnnnnnnnnnnnnnnnnnnnnnnnnnnnnnnnnnnnnnnnnnnnnnnnnnnnnnnnnnnnnnnnnnnnnnnnnnnnnnnnnnnnnnnnnnnnnnnnnnnnnnnnnnnnnnnnnnnnnnnnnnnnnnnnnnnnnnnnnnnnnnnnnnnnnnnnnnnnnnnnnnnnnnnnnnnnnnnnnnnnnnnnnnnnnnnnnnnnnnnnnnnnnnnnnnnnnnnnnnnnnnnnnnnnnnnnnnnnnnnnnnnnnnnnnnnnnnnnnnnnnnnnnnnnnnnnnnnnnnnnnnnnnnnnnnnnnnnnnnnnnnnggttcattcactttctctagtgctgaataagaccacaagtgagcttgccaaagcaaatgtgtccaaattagtagcacacctggaaatgattgnnnnnnnnnnnnnnnnnnnnnnnnnnnnnnnnnnnnnnnnnnnnnnnnnnnnnnnnnnnnnnnnnnnnnnnnnnnnnnnnnnnnnnnnnnnnnnnnnnnnnnnnnnnnnnnnnnnnnnnnnnnnnnnnacgggcggcctgaccctctgctccggagagaacacgacattcgcgtgagcctccggatggcctctgtgcagtacgtgcatactcagcgtttccaggcggaggtggtggccttcattcagcatttcactcagctgcaagatgtcttagggcgccagcgagctgctattgaggggcagacggtnnnnnnnnnnnnnnnnnnnnnnnnnnnnnnnnnnnnnnnnnnnnnnnnnnnnnnnnnnnnnnnnnnnnnnnnnnnnnnnnnnnnnnnnnnnnnnnnnnnnnnnnnnnnnnnnnnnnnnnnnnnnnnnnnnnnnnnnnnnnnnnnnnnnnnnnnnnnnnnnnnnnnnnnnnnnnnnnnnnnnnnnnnnnnnnnnnnnnnnnnnnnnnnnnnnnnnnnnnnnnnnnnnnnnnnnnnnnnnnnnnnnnnnnnnnnnnnnnnnnnnnnnnnnnnnnnnnnnnnnnnnnnnnnnnnnnnnnnnnnnnnnnnnnnnnnnnnnnnnnnnnnnnnnnnnnnnnnnnnnnnnnnnnnnnnnnnnnnnnnnnnnnnnnnnnnnnnnnnnnnnnnnnnnnnnnnnnnnnnnnngaagaccatgtctgcctgctggattgcattgtcgtggatctccaggacatggacatctttgctgcagagagacatccaagagagtactccaaggcaccagaggacagtagtggagatctgatcttcccttcctattctgtgcgacagacaggaggaagcctcttaaccgagccttgtaggctgaaattgcaggtggaaaggaatttggacaa

SEQ ID NO: 29916 - DNA, 790 bp, Macaca Mulatta
ggatattttatattaaaatatgaaggtttggagcaggccattggctactgactgtatttccctcactcagtacatttttgtttcccttttaccattttatcttgctttggaggaccttaaatgctactgaaacttacctgagaaccataggactgtggcaaacaaaaccaattcaggaagtgaattaatgatgaggatctgaaaacttggctagggctatatatactggaagctgaaggttaaaggaaaagcacaagaaacttgggaagcactttttctgcatacttagatgatcttcatgggcccacaggtaccaggataaagccgaactggtaccatctactcttttgaagtgttttagtctagtattggatcagtgaaaaacattaataaaacaagctttgtctgagaacctctagtatacatttataaatctgcttatttttcaacttggatcattaggcttacatactacttgtttcaaatgtgtcaaatacaaaaatggtaactaggttgacagatattttgtatttttcttttaagtccagacctgggatgtaagggacaatgcttatggagagccagttaaaatactgatccgtctggaaatctgcctttgccttttacaagcattaaattcctttcctgttgtgaagaaagcctctgttgaaacaggtcctttgccataaacttgatgaagtgctaccagaaagccccgaaggattgaattcacgtttcaccaatacctgctgaaaagtaccggtcccccagaaagaatccaccgggatgg

SEQ ID NO: 29917 - DNA, 119 bp, Macaca Mulatta
gcttcggaaggagtatggggccaatgtacttcctgcattccccccaaagaagcttttctctctgactcctgctgaggtagaacagaggagagagcagttagagaagtacatgcaagctg

SEQ ID NO: 29918 - DNA, 772 bp, Macaca Mulatta
gggttgagacgctggcttcagaatcataccagcttgtcagtaaagctgatgcctaggagcttttaaagggatcctttcaaaaggatcacttagcaaacacatgttgacttttactgatgtatgaatattattactctaaaaatagaaagaccagtaatatataagtcactttacagtgctacttcacacttaaaagtgcatggtatttttcatggtattttgcatgcagccagttaactctcgtagatagagaagtcaggtgatagattattttaaaaatgagcaaacaaaagtgggtaatgatagaagagtgggctttaactggcaggcctgtatgtttacagactaccatactgtaaatatgagctttatggtgtcattctcagaaacttatacatttcttctctcctttctcctaagtttcatgcagatgaatatgaggtaatactgttataaattcatttgtgatatccacaataatatgactggcaagaattggtggaaatctgtattaaattagttgttaaacctatgtcttgtgttgccactctgtcatatagggtgtgatgtggagtacttttaatcttaaaaaatagagtgagacaaaaacccaccaactttttaaactttctcttttaggtagatccttaacttctaagaaatacaaaggcatttttaatcagttatggtgaaataggaaagattatatcctattatgggcaattttattttaaagggtaaagggaaatgaaggtacagccgggaccttttt

SEQ ID NO: 29919 - DNA, 610 bp, Macaca Mulatta
  misc_feature (1)...(610): n = A,T,C or G
caggcctgggccagctgctggtgtgggagtggcagagtgagtcctacgtgctcaagcagcagggccactttaacagcatggtgaccctggcctactcgcccgatggacagtacatcgtgnnnnnnnnnnnnnnnnnnnnnnnnnnnnnnnnnnnnnnnnnnnnnnnnnnnnnnnnnnnnnnnnnnnnnnnnnnnnnnnnnnnnnnnnnnnnnnnnnnnnnnnnnnnnnnnnnnnnnnnnnnnnnnnnnnnnnnnnnnnnnnnnnnnnnnnnnnnnnnnnnnnnnnnnnnnnnnnnnnnnnnnnnnnnnnnnnnnnnnnnnnnnnnnnnnnnnnnnnnnnnnnnnnnnnnnnnnnnnnnnnnnnnnnnnnnnnnnnnnnnnnnnnnnnnnnnnnnnnnnnnnnnnnnnnnnnnnnnnnnnnnnnnnnnnnnnnnnnnnnnnnnnnnnnnnnnnnnnnnnnnnnnnnnnnnnnnnnnnnnnnnnnnnnnnnnnnnnnnnnnnnnnnnnnnnnnnnnnnnnnnnnnnnnnnnnnnnnnnnnnnnnnnnnnnnnnnnnnnnnnnnnnnnnnnnnnnnnnnnnnnnnnnnnctctggctgtgacttttcgccctg

SEQ ID NO: 29920 - DNA, 435 bp, Macaca Mulatta
  misc_feature (1)...(435): n = A,T,C or G
aggttgatggcttcacacacctctacactctaattttaagaccagatctttcttacgacgtgaaaattgatggtcagtcaattgaatccggcagcatagagtacgactggaacttaacatcactgaagaaagaaacatccccggcaaaatccaaagattgggannnnnnnnnnnnnnnnnnnnnnnaggaatgggagaagcattttctggacgccagtgccagcaagcagagcgactcgaatggtgaactggatggggactggccggcgttgatgctccagaagcccccgtaccaggncaggaaggcctgaaaccagaaggtattgataaagacatttggctccaccataaaatgaagaataccaactatttgacacagtatgacctctcggaatttgagaacattggtgccattggcctggagctttggcaggt

SEQ ID NO: 29921 - DNA, 1203 bp, Macaca Mulatta
ggtgaggggagccgcccgccgcggggacacagaggggaggtggcgagggtctgggaggcaagagctcgcgccaggaggagatgaagcgagtgggttcgcgctgaaggagcaggaagcagaaggaatgtctccctgtggcacccatggctgggaatgcgggagggtcgggccggcgtggagctgcgcaggcacggctgacgcagttactctggccctccccctcagaaaatcgcgctgcaactcaaagccacgctggagaacatcaccaacctccggcccgtgggcgaggacttccggtggtacctgaagatgaaatgtggcaactgtggtgagatttcggacaagtggcagtacatccggctgatggacagtgtggcactgaaggggggccgtggcagtgcttccatggtccagaagtgcaagctgtgtgcaagagaaaattccatcgagatattaagcagcaccatcaagccttacaatgctgaagacaatgagaacttcaagacaatagtggagtttgagtgcaggggccttgaaccagttgatttccagccccaggctgggtttgctgctgaaggtgtggagtcagggacagtcttcagtgacattgatttacaggagaaggactggactgactatgatgaaaaggcccaggagtctgtgggaatctacgaggtcacccaccagtttgtgaagtgctgatccctcttcctgcacagttgcccttacaaactgagaaaggacaatgtactccaagcatcagagcccacagaggctggttccttttgccccttgtctcctgggggctataccaaaaccttcacagtctgcgatgctggacttttttacagttcccccaagccccatcaaataaaacccctggttcatgctgcaactggtggcatggaagtgaaagtaaaggaagcaagcttactcccctccgacaaataaaaatatccgagacaccagcaaattcactcccttaaggaaatattaagcaatcgttctttaaaggaaaaatggtaatcctccccctttacctaagggccaaattttttacctgaaaaaagaataacattttagatacccaaccacaataagcgtccaaataggagacctcaacaacaaccctacatgagcggcgaacgtctcaccgctttttacccccgcgaaaacattttaatagtgaaaacccttagacct

SEQ ID NO: 29922 - DNA, 223 bp, Macaca Mulatta
catctggtgggatgaagtagcggcttctatagtgatcaatcaaaaactctttgaaaaggagattctcgaaagggacgtcgcacacaaagtgtttgccacggattcaataaagagcttcttccgccagctaaacttgtatggcttccgaaaacggcgtcaatgctctttcaggaccctcacccacgttttccccgcacaaaggccggtctccatcttgaataag

SEQ ID NO: 29923 - DNA, 167 bp, Macaca Mulatta
taggacttgctgaaaccaaacgactacttcacactccttcagacgtttgtccaccttcagtcaattgaaaatgtgattttcacagagtcagctcttctctccttacattttacattcatgccacattcaatattttgattcttgcacaataaagccaactgattgca

SEQ ID NO: 29924 - DNA, 443 bp, Macaca Mulatta
gagtcggggggatctagccctggttccttgggaccccctccctgcaccgtggaactggccagtgctctggggcatgggccgccccacctgctggcgctgacgctgcctccccacacttgatttctccctctcggtgtctctcctcatctctctgatcttttttccagagcagagcctctagcctcccctggagctccggcctgcccagcacgacagaggccagagccagcctgctggcctcagctccgggtcgggctgagatggctgtgccccaactctcattcaccccccacggacccaataataaacctggctccaccccacctgctgctgcgtgtctctggggtgggagggtcaggaggtggcggggtgcgctcctctctgctgtccctcctcacagcctcatgaaccccaggtctgtgggagcctcctccatggggcca

SEQ ID NO: 29925 - DNA, 816 bp, Macaca Mulatta
gggtttcacaagctgtttgtactcaaatatattttctcagtttcagatcctctgctattttattgagtggaaagtcttgagctgaaagggttcaagaagaataatgttgcatttccttatgtctcaggaaacactttttatggtaacttgtcagattgtctatgaacaaacccacttttttagacattgataaagtcttcttttcttcacgtgatattttatacaagaacacttcagatgcattagatgtgactgattttaacaaatcctgttagatttgtatcagctagttccatgttctgctcatagtcttttgtgaatcattgcctttttgtttaaaaagatggcctattttgagcctttgtataggtacattcctgtttttgtgaacaaaacaaaaactttaaaatttgtcccaaacagaaaaataatgggcttatcaaaagtaaggttttgtttttaatgggaagttaccccgttcccggaattttgtttaatgggaaaaaggggggaaattttaacccgtttagtgggaagtttttcaaataaaaaaagtaaattaaaaatttttgtttaagtttcccgaaatttttcaggtaccctctccccccaaaaggggtaaaaagttccccccctccttgaaaaagtgttttaaaggcgaaactccgcttttgttccaaatataaacccggcttttccccaacccctctttggtttcaaaaaaaggggggtttcccgcccccttttatccaaaaaacaccgagacttccacattaaaaacgccggtgaaaaaaaataatttatattccccccccg

SEQ ID NO: 29926 - DNA, 206 bp, Macaca Mulatta
attcacatcttctccaggcgaaaaggtcttccaggtgaaagtctcagcaccagaggagcaattcactagagtaggagtccaggttttagaccgaaaagatgggtccttcatagtaagatacagaatgtatgcaagctacaaaaatctgaaggtggaagttaaattccaaggtcagcatgtggccaaatccccgtatattttaaaag

SEQ ID NO: 29927 - DNA, 108 bp, Macaca Mulatta
agttccatggaccaaagacagaggagaatcctgggccagcccctttccatccctacttcccagcccaagcagaaaaggacatcactgatatctttcttttccaaggtc

SEQ ID NO: 29928 - DNA, 2772 bp, Macaca Mulatta
  misc_feature (1)...(2772): n = A,T,C or G
aggtacctggaactggaaagtagtggccatcggaatgaagtcagactgcattaccgctcaggcagtcaccgccctcacacagaagtgtttccttacattttggctgatgacaagtggcacaagctctccttagccatcagtgcttcccatttgattttacatattgactgcaataanaatttatgaaagggtggtagaaaagccctccacagacttgcctctaggcacaacactttggctaggacagagaaataatgcacatggatatttcaaggnnnnnnnnnnnnnnnnnnnnnnnnnnnnnnnnnnnnnnnnnnnnnnnnnnnnnnnnnnnnnnnnnnnnnnnnnnnnnnnnnnnnnnnnnnnnnnnnnnnnnnnnnnnnnnnnnnnnnnnnnnnnnnnnnnnnnnnnnnnnnnnnnnnnnnnnnnnnnnnnnnnnnnnnnnnnnnnnnnnnnnnnnnnnnnnnnnnnnnnnnnnnnnnnnnnnnnnnnnnnnnnnnnnnnnnnnnnnnnnnnnnnnnnnnnnnnnnnnnnnnnnnnnnnnnnnnnnnnnnnnnnnnnnnnnnnnnnnnnnnnnnnnnnnnnnnnnnnnnnnnnnnnnnnnnnnnnnnnnnnnnnnnnnnnnnnnnnnnnnnnnnnnnnnnnnnnnnnnnnnnnnnnnnnnnnnnnnnnnnnnnnnnnnnnnnnnnnnnnnnnnnnnnnnnnnnnnnnnnnnnnnnnnnnnnnnnnnnnnnnnnnnnnnnnnnnnnnnnnnnnnnnnnnnnnnnnnnnnnnnnnnnnnnnnnnnnnnnnnnnnnnnnnnnnnnnnnnnnnnnnnnnnnnnnnnnnnnnnnnnnnnnnnnnnnnnnnnnnnnnnnnnnnnnnnnnnnnnnnnnnnnnnnnnnnnnnnnnnnnnnnnnnnnnnnnnnnnnnnnnnnnnnnnnnnnnnnnnnnnnnnnnnnnnnnnnnnnnnnnnnnnnnnnnnnnnnnnnnnnnnnnnnnnnnnnnnnnnnnnnnnnnnnnnnnnnnnnnnnnnnnnnnnnnnnnnnnnnnnnnnnnnnnnnnnnnnnnnnnnnnnnnnnnnnnnnnnnnnnnnnnnnnnnnnnnnnnnnnnnnnnnnnnnnnnnnnnnnnnnnnnnnnnnnnnnnnnnnnnnnnnnnnnnnnnnnnnnnnnnnnnnnnnnnnnnnnnnnnnnnnnnnnnnnnnnnnnnnnnnnnnnnnnnnnnnnnnnnnnnnnnnnnnnnnnnnnnnnnnnnnnnnnnnnnnnnnnnnnnnnnnnnnnnnnnnnnnnnnnnnnnnnnnnnnnnnnnnnnnnnnnnnnnnnnnnnnnnnnnnnnnnnnnnnnnnnnnnnnnnnnnnnnnnnnnnnnnnnnnnnnnnnnnnnnnnnnnnnnnnnnnnnnnnnnnnnnnnnnnnnnnnnnnnnnnnnnnnnnnnnnnnnnnnnnnnnnnnnnnnnnnnnnnnnnnnnnnnnnnnnnnnnnnnnnnnnnnnnnnnnnnnnnnnnnnnnnnnnnnnnnnnnnnnnnnnnnnnnnnnnnnnnnnnnnnnnnnnnnnnnnnnnnnnnnnnnnnnnnnnnnnnnnnnnnnnnnnnnnnnnnnnnnnnnnnnnnnnnnnnnnnnnnnnnnnnnnnnnnnnnnnnnnnnnnnnnnnnnnnnnnnnnnnnnnnnnnnnnnnnnnnnnnnnnnnnnnnnnnnnnnnnnnnnnnnnnnnnnnnnnnnnnnnnnnnnnnnnnnnnnnnnnnnnnnnnnnnnnnnnnnnnnnnnnnnnnnnnnnnnnnnnnnnnnnnnnnnnnnnnnnnnnnnnnnnnnnnnnnnnnnnnnnnnnnnnnnnnnnnnnnnnnnnnnnnnnnnnnnnnnnnnnnnncaaggggaagttgattgttggcccctgccttgcccagatgtggaatgtgaattcagtattctcccagagaatgagtgctgcccgcgctgtgtcacagacccttgccaggccgacaccatccgcaatgacatcaccaagacttgcctggacgagatgaatgtggttcgcttcaccgggtcctcttggatcaaacatggcactgagtgtactctctgccagtgcaagnnnnnnnnnnnnnnnnnnnnnnnnnnnnnnnnnnnnnnnnnnnnnnnnnnnnnnnnnnnnnnnnnnnnnnnnnnnnnnnnnnnnnnnnnnnnnnnnnnnnnnnnnnnnnnnnnnnnnnnnnnnnnnnnnnnnnnnnnnnnnnnnnnnnnnnnnnnnnnnnnnnnnnnnnnnnnnnnnnnnnnnnnnnnnnnnnnnnnnnnnnnnnnnnnnnnnnnnnnnnnnnnnnnnnnnnnnnnnnnnnnnnnnnnnnnnnnnnnnnnnnnnnnnnnnnnnnnnnnnnnnnnnnnnnnnnnnnnnnnnnnnnnnnnnnnnnnnnnnnnnnnnnnnnnnnnnnnnnnnnnnnnnnnnnnnnnnngaaagtctctagcttcactgggtgcagaaaattttcctctagatcagaatcttcacgaatcagttaggttcctcactgcaagaaataaaatgtcaggcagtgaatgaattatattttcagaagtaaagcaaagaagctataacatgttatgtacagtacacactctgaaaagaaatctgaaacaagttattgtaatgataaaaataatgcacaggcatggttacttaatattttctaacaggaaaagtcatccctatttccttgttttactgcacttaatattatttggttgaatttgttcagtataagctcgttcttgtgcaaaattaaataaatatttctcttacctt

SEQ ID NO: 29929 - DNA, 288 bp, Macaca Mulatta
  misc_feature (1)...(288): n = A,T,C or G
gcagggagtcagtggaggggtccggcaggtcaggggtctccccgttcctgcctttttcctggttcacagacagcggcaagggctcagcatcctcgggtagcaccacctcccctgcctgctcccctaaacacgagggcttcagccctaagaagtcagcttcccagnnnaggaatccaccctgagtgatgactccacgccccccagcagcagccccaagattcccagtgggccccggcaggaggtcaaatgttcttacccctaccacacgctgtctcagtcttcagatga

SEQ ID NO: 29930 - DNA, 1864 bp, Macaca Mulatta
  misc_feature (1)...(1864): n = A,T,C or G
gaattccatggcggcgcggcgacgacggagcacccgcggaggcagagcgagannnnnnnnnnnnnnnnnnnnnnnnnnnnnnnnnnnnnnnnnnnnnnnnnnnnnnnnnnnnnnnnnnnnnnnnnnnnnnnnnnnnnnnnnnnnnnnnnnnnnnnnnnnnnnnnnnnnnnnnnnnnnnnnnnnnnnnnnnnnnnnnnnnnnnnnnnnnnnnnnnnnnnnnnnnnnnnnnnnnnnnnnnnnnnnnnnnnnnnnnnnnnnnnnnnnnnnnnnnnnnnnnnnnnnnnnnnnnnnnnnnnnnnnnnnnnnnnnnnnnnnnnnnnnnnnnnnnnnnnnnnnnnnnnnnnnnnnnnnnnnnnnnnnnnnnnnnnnnnnnnnnnnnnnnnnnnnnnnnnnnnnnnnnnnnnnnnnnnnnnnnnnnnnnnnnnnnnnnnnnnnnnnnnnnnnnnnnnnnnnnnnnnnnnnnnnnnnnnnnnnnnnnnnnnnnnnnnnnnnnnnnnnnnnnnnnnnnnnnnnnnnnnnnnnnnnnnnnnnnnnnnnnnnnnnnnnnnnnnnnnnnnnnnnnnnnnnnnnnnnnnnnnnnnnnnnnnnnnnnnnnnnnnnnnnnnnnnnnnnnnnnnnnnnnnnnnnnnnnnnnnnnnnnnnnnnnnnnnnnnnnnnnnnnnnnnnnnnnnnnnnnnnnnnnnnnnnnnnnnnnnnnnnnnnnnnnnnnnnnnnnnnnnnnnnnnnnnnnnnnnnnnnnnnnnnnnnnnnnnnnnnnnnnnnnnnnnnnnnnnnnnnnnnnnnnnnnnnnnnnnnnnnnnnnnnnnnnnnnnnnnnnnnnnnnnnnnnnnnnnnnnnnnnnnnnnnnnnnnnnnnnnnnnnnnnnnnnnnnnnnnnnnnnnnnnnnnnnnnnnnnnnnnnnnnnnnnnnnnnnnnnnnnnnnnnnnnnnnnnnnnnnnnnnnnnnnnnnnnnnnnnnnnnnnnnnnnnnnnnnnnnnnnnnnnnnnnnnnnnnnnnnnnnnnnnnnnnnggctttgggagacattgaaattgctattaagctggtgaaaacagagctacaaagcccagaacacccattggaccaacactatagaaacctacattgtgccttgcgccctcttgaccatgaaagttatgagttcaaagtnnnnnnnnnnnnnnnnnnnnnnnnnnnnnnnnnnnnnnnnnnnnnnnnnnnnnnnnnnnnnnnnnnnnnnnnnnnnnnnnnnnnnnnnnnnnnnnnnnnnnnnnnnnnnnnnnnnnnnnnnnnnnnnnnnnnnnnnnnnnnnnnnnnnnnnnnnnnnnnnnnnnnnnnnnnnnnnnnnnnnnnnnnnnnnnnnnnnnnnnnnnnnnnnnnnnnnnnnnnnnnnnnnnnnnnnnnnnnnnnnnnnnnnnnnnnnnnnnnnnnnnnnnnnnnnnnnnnnnnnnnnnnnnnnnnnnnnnnnnnnnnnnnnnnnnnnnnnnnnnnnnnnnnnnnnnnnnnnnnnnnnnnnnnnnnnnnnnnnnnnnnnnnnnnnnnnnnnnnnnnnnnnnnnnnnnnnnnnnnnnnnnnnnnnnnnnnnnnnnnnnnnnnnnnnnnnnnnnnnnnnnnnnnnnngaatgggagtacagtgccattaggaccagcaagtgacacaggaattctgaatccagatggttataccctcaactacaatgaatatattgtctataaccccaaccaggtccgtatgcggtacctgttaaaggttcagtttaatttcctgcagctgtggtgaatgttgatattaaataaaccagagatctgatcttcaagcaagaaaataagcagtggtatacttgtgaattttgagatattttatgtaaataaaaactgtacaagtct

SEQ ID NO: 29931 - DNA, 1877 bp, Macaca Mulatta
  misc_feature (1)...(1877): n = A,T,C or G
gcaggggcagggtgcccagaagcagttcaagaactttcagatcgaggtgcagaagggccgctacagcctgcatggttcagaccgcagcttccccagcttgggagacctcatgagccacctcaagaagcagatcctgcgcacggataacatcagcttcatgttgaaacgctgctgccagcccaagccccgagngaaatctccaacctgctggtggctactaagaaagcccaggagtggcagcccgttctaccccatgagccagctgagttttgatcggattttccagaaggatctggtgcaggnnncagggcgagcaccttgggagaggcacgagaacacacatctactctgggaccctgatggattacaaggatgacgaaggaacttctgaagagaagaagataaaagtgatcctcaaagtcttagaccccagccacagggatatttccctggcaagtgtcttnnnnngccttcttcgaggcagccagcatgatgagacaggtctcccacaaacacatcgtgtacctctatggcgtctgtgtccgcgacgtggagnnnnnnnnnnnnnnnnnnnnnnnnnnnnnnnnnnnnnnnnnnnnnnnnnnnnnnnnnnnnnnnnnnnnnnnnnnnnnnnnnnnnnnnnnnnnnnnnnnnnnnnnnnnnnnnnnnnnnnnnnnnnnnnnnnnnnnnnnnnnnnnnnnnnnnnnnnnnnnnnnnnnnnnnnnnnnnnnnnnnnnnnnnnnnnnnnnnnnnnnnnnnnnnnnnnnnnnnnnnnnnnnnnnnnnnnnnnnnnnnnnnnnnnnnnnnnnnnnnnnnnnnnnnnnnnnnnnnnnnnnnnnnnnnnnnnnnnnnnnnnnnnnnnnnnnnnnnnnnnnnnnnnnnnnnnnnnnnnnnnnnnnnnnnnnnnnnnnnnnnnnnnnnnnnnnnnnnnnnnnnnnnnnnnnnnnnnnnnnnnnnnnnnnnnnnnnnnnnnnnnnnnnnnnnnnnnnnnnnnnnnnnnnnnnnnnnnnnnnnnnnnnnnnnnnnnnnnnnnnnnnnnnnnnnnnnnnnnnnnnnnnnnnnnnnnnnnnnnnnnnnnnnnnnnnnnnnnnnnnnnnnnnnnnnnnnnnnnnnnnnnnnnnnnnnnnnnnnnnnnnnnnnnnnnnnnnnnnnnnnnnnnnnnnnnnnnnnnnnnnnnnnnnnnnnnnnnnnnnnnnnnnnnnnnnnnnnnnnnnnnnnnnnnnnnnnnnnnnnnnnnnnnnnnnnnnnnnnnnnnnnnnnnnnnnnnnnnnnnnnnnnnnnnnnnnnnnnnnnnnnnnnnnnnnnnnnnnnnnnnnnnnnnnnnnnnnnnnnnnnnnnnnnnnnnnnnnnnnnnnnnnnnnnnnnnnnnnnnnnnnnnnnnnnnnnnnnnnnnnnnnnnnnnnnnnnnnnnnnnnnnnnnnnnnnnnnnnnnnnnnnnnnnnnnnnnnnnnnnnnnnnnnnnnnnnnnnnnnnnnnnnnnnnnnnnnnnnnnnnnnnnnnnnnnnnnnnnnnnnnnnnnnnnnnnnnnnnnnnggggatggactatttgggttctcggcaatatgttcaccgtgacttggcagcaagaaatgtccttgttgagagtgaacaccaagtgaaaattggagacttcggtttaaccaaagcaattgaaaccgataaggagtattacaccgtcaaggatgaccgggacagccctgtgttttggtannnnnnnnnnnnnnnnnnnnnnnnnnnnnnnnnnnnnnnnnnnnnnnnnnnnnnnnnnnnnnnnnnnnnnnnnnnnnnnnnnnnnnnnnnnnnnnnnnnnnnnnnnnnnnnnnnnttgttcctgaaaatgataggcccaacccatggccagatgacagtcacaagac

SEQ ID NO: 29932 - DNA, 1774 bp, Macaca Mulatta
  misc_feature (1)...(1774): n = A,T,C or G
agtggctgtaaggtgaagaagcatgaaactcagtctctcgctttggatgcatgttcnnnnnnnnnnnnnnnnnnnnnnnnnnnnnnnnnnnnnnnnnnnnnnnnnnnnnnnnnnnnnnnnnnnnnnnnnnnnnnnnnnnnnnnnnnnnnnnnnnnnnnnnnnnnnnnnnnnnnnnnnnnnnnnnnnnnnnnnnnnnnnnnnnnnnnnnnnnnnnnnnnnnnnnnnnnnnnnnnnnnnnnnnnnnnnnnnnnnnnnnnnnnnnnnnnnnnnnnnnnnnnnnnnnnnnnnnnnnnnnnnnnnnnnnnnnnnnnnnnnnnnnnnnnnnnnnnnnnnnnnnnnnnnnnnnnnnnnnnnnnnnnnnnnnnnnnnnnnnnnnnnnnnnnnnnnnnnnnnnnnnnnnnnnnnnnnnnnnnnnnnnnnnnnnnnnnnnnnnnnnnnnnnnnnnnnnnnnnnnnnnnnnnnnnnnnnnnnnnnnnnnnnnnnnnnnnnnnnnnnnnnnnnnnnnnnnnnnnnnnnnnnnnnnnnnnnnnnnnnnnnnnnnnnnnnnnnnnnnnnnnnnnnnnnnnnnnnnnnnnnnnnnnnnnnnnnnnnnnnnnnnnnnnnnnnnnnnnnnnnnnnnnnnnnnnnnnnnnnnnnnnnnnnnnnnnnnnnnnnnnnnnnnnnnnnnnnnnnnnnnnnnnnnnnnnnnnnnnnnnnnnnnnnnnnnnnnnnnnnnnnnnnnnnnnnnnnnnnnnnnnnnnnnnnnnnnnnnnnnnnnnnnnnnnnnnnnnnnnnnnnnnnnnnnnnnnnnnnnnnnnnnnnnnnnnnnnnnnnnnnnnnnnnnnnnnnnnnnnagccaatgaggagattgcgcaggttcgaacaaaggcaaaggctgagagtgcagctctccatgctggactccggaaagagcagatgaaggtggagtccctggaaagggccctacagcagaannnnnnnnnnnnnnnnnnnnnnnnnnnnnnnnnnnnnnnnnnnnnnnnnnnnnnnnnnnnnnnnnnnnnnnnnnnnnnnnnnnnnnnnnnnnnnnnnnnnnnnnnnnnnnnnnnnnngtgaccacaattatcttgccttatccaggaataatcgcccctttgcagannnnnnnnnnnnnnnnnnnnngcacatgtctactgctgcctgtcccgctttgctgccaatgcaacagccctggaagaaaccctagagggttgcgtagtctagaaaggagtgtgacctgacagtgccggagccttccagttccccatatgaaggttccattaggctgctgagtttgggtttgtgatttctttatgtttagtttgttttaaagtcatctttactttcccaaatgtgttaaaatttgtagctcctctttggggtcttctacaccacctgtctgatttttttgtgtgtgatctatttaatcttttaattttttaatatcagtggttttatttaaggagacaatttggcctattgttacttccagtttataatcaagaaggggctctgggtccccttttattacacacactctcacacacatacatgtatatttatagatgctgctactcttttccctgaagcatagtcaagtaagaacttgtctgcagaaggacatatttccttcgatgtgagaccctattttgaaatagagtcctgactcagaacaccaacttaagaatttgggggattaaagatatgaagaccacagtcttgggttttcatgtctgcagaagactattggccatgacattttgttgccctggtattt

SEQ ID NO: 29933 - DNA, 2274 bp, Macaca Mulatta
  misc_feature (1)...(2274): n = A,T,C or G
aatccttccttccccggggtagaagtccagggtgagaaattggttccgaactcaaaggaacccagcgccgggccacagccgggtcacgtggccggcggcccccatgacgtgccggctgcggggcgtcacagcgacgttcgggcgacctgccgagtggccaggctacctccgtcacctgcgtggtcgcagtgctgccatggacctgggacccatgcgcaagagttaccgcggggaccgagaggnnnnnnnnnnnnnnnnnnnnnnnnnnnnnnnnnnnnnnnnnnnnnnnnnnnnnnnnnnnnnnnnnnnnnnnnnnnnnnnnnnnnnnnnnnnnnnnnnnnnnnnnnnnnnnnnnnnnnnnnnnnnnnnnnnnnnnnnnnnnnnnnnnnnnnnnnnnnnnnnnnnnnnnnnnnnnnnnnnnnnnnnnnnnnnnnnnnnnnnnnnnnnnnnnnnnnnnnnnnnnnnnnnnnnnnnnnnnnnnnnnnnnnnnnnnnnnnnnnnnnnnnnnnnnnnnnnnnnnnnnnnnnnnnnnnnnnnnnnnnnnnnnnnnnnnnnnnnnnnnnnnnnnnnnnnnnnnnnnnnnnnnnnnnnnnnnnnnnnnnnnnnnnnnnnnnnnnnnnnnnnnnnnnnnnnnnnnnnnnnnnnnnnnnnnnnnnnnnnnnnnnnnnnnnnnnnnnnnnnnnnnnnnnnnnnnnnnnnnnnnnnnnnnnnnnnnnnnnnnnnnnnnnnnnnnnnnnnnnnnnnnnnnnnnnnnnnnnnnnnnnnnnnnnnnnnnnnnnnnnnnnnnnnnnnnnnnnnnnnnnnnnnnnnnnnnnnnnnnnnnnnnnnnnnnnnnnnnnnnnnnnnnnnnnnnnnnnnnnnnnnnnnnnnnnnnnnnnnnnnnnnnnnnnnnnnnnnnnnnnnnnnnnnnnnnnnnnnnnnnnnnnnnnnnnnnnnnnnnnnnnnnnnnnnnnnnnnnnnnnnnnnnnnnnnnnnnnnnnnnnnnnnnnnnnnnnnnnnnnnnnnnnnnnnnnnnnnnnnnnnnnnnnnnnnnnnnnnnnnnnnnnnnnnnnnnnnnnnnnnnnnnnnnnnnnnnnnnnnnnnnnnnnnnnnnnnnnnnnnnnnnnnnnnnnnnnnnnnnnnnnnnnnnnnnnnnnnnnnnnnnnnnnnnnnnnnnnnnnnnnnnnnnnnnnnnnnnnnnnnnnnnnnnnnnnnnnnnnnnnnnnnnnnnnnnnnnnnnnnnnnnnnnnnnnnnnnnnnnnnnnnnnnnnnnnnnnnnnnnnnnnnnnnnnnnnnnnnnnnnnnnnnnnnnnnnnnnnnnnnnnnnnnnnnnnnnnnnnnnnnnnnnnnnnnnnnnnnnnnnnnnnnnnnnnnnnnnnnnnnnnnnnnnnnnnnnnnnnnnnnnnnnnnnnnnnnnnnnnnnnnnnnnnnnnnnnnnnnnnnnnnnnnnnnnnnnnnnnnnnnnnnnnnnnnnnnnnnnnnnnnnnnnnnnnnnnnnnnnnnnnnnnnnnnnnnnnnnnnnnnnnnnnnnnnnnnnnnnnnnnnnnnnnnnnnnnnnnnnntttaacttaatctagctataatatatttctgttggttacaacttaactnnnnnnnnnnnnnnnnnnnnnnnnnnnnnnnnnnnnnnnnnnnnnnnnnnnnnnnnnnnnnnnnnnnngagcctcactctgtcgcccaggctggagtgcagtggcgtgatcttggctcactgcaacctctgcctcccgggttcaagcgattctcctgcctcagcctcctgagtagctgggactacaggcacccaccacacccagctaatttttgtatttttagtagagacggggtttcaccatgttggccaggatggtctccatctcttgaccttatgattcacccacctcagcctcccaaagtgctgggattacaaacatgagccaccgtgcccagccaggatagtatatttttatagcacttcccctactgattgctgccttctctgtggctccaaggnnnnnnnnnnnnnnnnnnnngttacagggaagcaggtttcatctcaatagtgggagagatttcaaacagtcagacctgcctaagaaggagtgggctgtcactaggaaattttattcccagtcagtcagggattttgtagaagagcttcatgtgctggtaccaatcggacaggaagattttaatcagctttactatctatgtttgtttatggaaattgtgtgtatatatacatacattttccaaaaagaaaaattaaatgattatagatataatgtttttcagact

SEQ ID NO: 29934 - DNA, 335 bp, Macaca Mulatta
ttagggaaatgcaattctttattagaactcaagtttgcatttgtaaacattcaacagaaggagtaaaacaaaaacaatccacatcatccttcccccggccccagcttctggggctgaagtagggagcttccactttaacaaccccgactggctctggctccagggtctgagatgccttcataatcaggtcatggtcccaggcagcctcgagaaactgctgggtccctgccttgctggcagcttcgggaggtcgctgggtccttgtctcgctggcagcctcaagagactgcagggtccggcttcccacacctccaccagggaaccctggggcccgg

SEQ ID NO: 29935 - DNA, 841 bp, Macaca Mulatta
gggccttttccccccctctagcgccgctgggcctgcaggtctctgtcgacccgcggacgctggtctctgttccgcaggatggggtttgttaaagttgttaagaataaggcctactttaagagataccaagtgaaatttagaagacgacgagagggtaaaactgattactatgctcggaaacgcttggtgatacaggataaaaataaatacaacacacccaaatacaggatgatagttcgtgtaacaaacagagatatcatttgtcagattgcttatgcccgtatagagggggatatgatagtctgcgcagcatatgcacacgaactgccaaaatacggtgtgaaggttggcctgacaaactatgctgcagcatattgtactggcctgctgctggcccgcaggcttctcaataggtttggcatggacaagatctatgaaggccaagtggaggtaactggcgatgaatacaatgtggaaagcattgatggtcagccaggtgcctttacctgctatttggatgcaggccttgccagaactaccactggcaataaagtttttggcgccctgaaagggagctgtggaatgaaggctttgtctatcccttcacagtacccaaacgatttcccccggttattgattcctgaaaagcaagggaattttaattggcaaaaactacccccgggaaagcccccctcccggggcccccaaattgctggccaaaactaaactggcgccttcctctattgggaaacagacatctgaaaattccttcaaccaacgaaacacggtttctcccgccgatcccgctaacgagaacctgcgttcaaatcctcccaacgac

SEQ ID NO: 29936 - DNA, 803 bp, Macaca Mulatta
  misc_feature (1)...(803): n = A,T,C or G
gggaggcaaacctgaggtcctcagaatggcgggcacgggtttggtggccggagaggttgtggtggatgcgctgccgtattttgatcaaggttatgaagcccctggtgtgcgggaagcggctgcagcgctggtggaggaggaaactcgcagataccgacctactaagaactacctgagctacctaacagccccggattattctgcctttgaaatatgagcttccagccccttcctctggtcaaaaaaatgacattactgcatggcaagaatgtgtaaacaattctatggcccagttagagcatcaagcagttagaattgagaatctggaactaatgtcacagcatggatgtaatgcctggaaagtatacaatgaaaatctagttcatatgattgaacacgcacagaaagaacttcagaaattaagaaaacatattcaagatttaaactggcagagaaagaacatgcagctcacagctggatctaaattgagagaaatggagtcaaattgggtatccctggtcagtaagaattatgagattgaacggactattgttcagctagaaaatgaaaatctatcanattaagcagcaacatggagaggcaaacaaagaaaacatccggcaagacttctgaaaagacagtttagcaggtagaagaaaaggtgggctttcacaaaaggcatctgaactttttatgaactgtgaaagacgacagcatcttcgcaaaaccattgatgtttaatgtttagaaatcatanaatgtgtgggcctgctgtannaaatctaatttgnatatctcaacaa

SEQ ID NO: 29937 - DNA, 720 bp, Macaca Mulatta
atcggcacgaggggttttttcccagtctgatctggttcttacacacacacgtaactcaaaagttttgtgaacaagtactttccttttttacatgttacatgtcctcatgttttctgttctctgttacataacacaaggctgcttgtggcctacaaacctcatttcgtggcccagtggttcacagtccagcgtggcctacacggatgtggggagccgcccagggatgttttccctccttgcttgtgccttaaaggcaaagaagcgaggcgggcgccccgggaacacccagcatcacacccaagctcatgtggggccaggccgggagcccatgcagcagggcagaaggcagcggaggccagttctgtcccggctgaagaacagtgtccatgcacagtcctgcctggggtcgggcccttgctgaccctcacgggagtccccaaggtgctgtctggacaggctgccccacgctggggtggctgatggccatgtgcagggaatggtgcctctggctgtggcacctggatcacccaggtccccgcagacatggccgcctgaagtcagtgtgcctcctctgtgttgtatggagctcgccgcctcatgtgtgaacacccgtgtctgggttgcctgggtggatcctcccgcatggggctgtctctgggaagcataacttgctgcttgcacggacagccccagcccccgtccgtccgtccaggctcacca

SEQ ID NO: 29938 - DNA, 2389 bp, Macaca Mulatta
  misc_feature (1)...(2389): n = A,T,C or G
agggcctgtctgcgagcctggctgccgagctgctgctgcgggacgggcccaacgcgctgcggccaccacggggcaccccagagtatgtcaagttcgcaaggcagctggctgggggcctgcagtgcctcatgtgggtggctgccgccagcacctcatcgccttnnnnnnnnnnnnnnnnnnnnnnnnnnnnnnnnnnnnnnnnnnnnnnnnnnnnnnnnnnnnnnnnnnnnnnnnnnnnnnnnnnnnnnnnnnnnnnnnnnnnnnnnnnnnnnnnnnnnnnnnnnnnnnnnnnnnnnnnnnnnnnnnnnnnnnnnnnnnnnnnnnnnnnnnnnnnnnnnnnnnnnnnnnnnnnnnnnnnnnnnnnnnnnnnnnnnnnnnnnnnnnnnnntggagatgaaaggcggggacagagtgcccgccgacatccgcatcctggcggcccagggctgcaaggtggacaactcctcactgaccggggagtccgagccgcagacccgctcacccgagtgcacgcacgagagtcccttggagacccgcaacatcgccttcttctccaccannnnnnnnnnnnnnnnnnnnnnnnnnnnnnnnnnnnnnnnnnnnnnnnnnnnnnnnnnnnnnnnnnnnnnnnnnnnnnnnnnnnnnnnnnnnnnnnnnnnnnnnnnnnnnnnnnnnnnnnnnnnnnnnnnnnnnnnnnnnnnnnnnnnnnnnnnnnnnnnnnnnnnnnnnnnnnnnnnnnnnnnnnnnnnnnnnnnnnnnnnnnnnnnnnnnnnnnnnnnnnnnnnnnnnnnnnnnnnnnnnnnnnnnnnnnnnnnnnnnnnnnnnnnnnnnnnnnnnnngtctgcctgtccctgacagccaagcgcctggccagtaagaactgcgtggtcaagaacttagaggcggtggagacattgggctccacctcagtgatctgctcagacaagacagggactctcactcagaaccgcatgactgtgtcccatctgtgnnnnnnnnnnnnnnnnnnnnnnnnnnnnnnnnnnnnnnnnnnnnnnnnnnnnnnnnnnnnnnnnnnnnnnnnnnnnnnnnnnnnnnnnnnnnnnnnnnnnnnnnnnnnnnnnnnnnnnnnnnnnnnnnnnnnnnnnnnnnnnnnnnnnnnnnnnnnnnnnnnnnnnnnnnnnnnnnnnnnnnnnnnnnnnnnnnnnnnnnnnnnnnnnnnnnnnnnnnnnnnnnnnnnnnnnnnnnnnnnnnnnnnnnnnnnnnnnnnnnnnnnnnnnnnnnnnnnnnnnnnnnnnnnnnnnnnnnnnnnnnnnnnnnnnnnnnnnnnnnnnnnnnnnnnnnnnnnnnnnnnnnnnnnnnnnnnnnnnnnnnnnnnnnnnnnnnnnnnnnnnnnnnnnnnnnnnnnnnnnnnnnnnnnnnnnnnnnnnnnnnnnnnnnnnnnnnnnnnnnnnnnnnnnnnnnnnnnnnnnnnnnnnnnnnnnnnnnnnnnnnnnnnnnnnnnnnnnnnnnnnnnnnnnnnnnnnnnnnnnnnnnnnnnnnnnnnnnnnnnnnnnnnnnnnnnnnnnnnnnnnnnnnnnnnnnnnnnnnnnnnnnnnnnnnnnnnnnnnnnnnnnnnnnnnnnnnnnnnnnnnnnnnnnnnnnnnnnnnnnnnnnnnnnnnnnnnnnnnnnnnnnnnnnnnnnnnnnnnnnnnnnnnnnnnnnnnnnnnnnnnnnnnnnnnnnnnnnnnnnnnnnnnnnnnnnnnnnnnnnnnnnnnnnnnnnnnnnnnnnnnnnnnnnnnnnnnnnnnnnnnnnnnnnnnnnnnnnnnnnnnnnnnnnnnnnnnnnnnnnnnnnnnnnnnnnnnnnnnnnnnnnnnnnnnnnnnnnnnnnnnnnnnnnnnnnnnnnnnnnnnnnnnnnnnnnnnnnnnnnnnnnnnnnnnnnnnnnnnnnnnnnnnnnnnnnnnnnnnnnnnnnnnnnnnnnnnnnnnnnnnnnnnnnnnnnnnnnnnnnnnnnnnnnnnnnnnnnnnnnnnnnnnnnnnnnnnnnnnnnnnnnnnnnnnnnnnnnnnnnnnnnnnnnnnnnnnnnnnnnnnnnnnnnnnnnnnnnnnnnnnnnnnnnnnnnnnnnnnnnnnnnnnnnnnnnnnnnnnnnnnnnnnnnnnnnnnnnnnnnnnnnnnnnnnnnnnnnnnnnnnnnnnnnnnnnnnnnnnnnnnnnnnnnnnnnnnnnnnnnnnnnnnnnnnnnnnnnnnnnnnnnnnnnnnnnnnnnnnnnnnnnnnnnnnnnnnnnnnnnnnnnnnnnnnnntcccatctgtgtccctggcgtatgaaaaagccgagagcgacatcatgcacctgcgtccacgcaacccaaagcgcgacagattggtcaacgagcctctggctgcctactcctacttccagattggtg

SEQ ID NO: 29939 - DNA, 697 bp, Macaca Mulatta
gacgaagagaggatcccggtcattatggaaagcctggaagacgcctacattctgcggggagacgatgattccctctccgacaagcatggctgcccggcttacgtaagcccagagatcttgaacaccagcggcagctactcgggcaaagcagccgacgtgtggagcctgggggtgatgctgtacaccatgttggtggggcggtaccctttccatgacattgaacccagctccctcttcagcaagatccggcgtggccagttcaacattccagagactctgtcacccaaggccaagtgcctcatccgaagcattctgcggcgggagccctcggagcggctgacctcgcaggaaattctggaccatccttggttttctacagattttagcgtctcgaattcaggatatggtgctaaggaagtgtctgaccagttggtgccggacgtcaacatggaagagaacttggaccctttctttaactgagctcatgccccacagagacttagcaggtaccaggagtgagcgagggcagcggaaaggagttcttccaggggacacgaatagcctggctgagtagcaaaaaagacattcacactcttaagtaacttggttcaccaaggataacttcaagacgctgactgaccatgtagcaagggggcaagaggcctcgatgggcgtggggtgcaaggctgggcacccc

SEQ ID NO: 29940 - DNA, 937 bp, Macaca Mulatta
  misc_feature (1)...(937): n = A,T,C or G
tgcaggcctgagtgttccttccagcatgtcggagggggagtcccagacagtactcagcagtggctcagacccaaaggtagannnnnnnnnnnnnnnnnnnnnnnnnnnnnnnnnnnnnnnnnnnnnnnnnnnnnnnnnnnnnnnnnnnnnnnnnnnnnnnnnnnnnnnnnnnnnnnnnnnnnnnnnnnnnnnnnnnnnnnnnnnnnnnnnnnnnnnnnnnnnnnnnnnnnnnnaggtgaatcaacggaatgtaccaggtattgacagtgcatacctggccatggatacagaggaaggtgtagaggttgtgtggaatgaggtacagttctctgagcgcaagaactacaagctgcaggaggnaggaaaaggttcgtgctgtgtttgataatctgattcaattggagcatcttaacattgttaagtttcacaaatattgggctgacattaaagagaacaaggccagggtnggtcatttttatcactagaatacatgtcatctggcagtctgaagcaatttctgaagaagaccaaaaagaaccacaagacnnnnnnnnnnnnnnnnnnnnnnnnnnnnnnnnnnnnnnnnnnnnnnnnnnnnnnnnnnnnnnnnnnnnnnnnnnnnnnnnnnntccatgggacctgacctgtgacaccatcttcatccagcacaacggactcatcaagattggctctgnnnnnnnnnnnnnnnnnnnnnnnnnnnnnnnnnnnnnnnnnnnnnnnnnnnnnnnnnnnnnnnnnnnnnnnnnnnnnnnnnnnnnnnnnnnnnnnnnnnnnnnnnnnnnnnnnnnnnnnnnnnnnnnnnnnnnnnnnnnnnnnnnnnnnnnnnnnnnnnnnnnnnnnnnnnnnnnnnnnnnnnnnnnnnnnnnnnnnnncatcagcagtgccatccagcttctagaagacccattacagaggg

SEQ ID NO: 29941 - DNA, 686 bp, Macaca Mulatta
tggcagaaggcagcgagccacgatggtctgggaggccctgggcgggaaggctgctaccgcacatccccacggctgaaggacaagaagatggatgcccatcctcctcgcctctttgcctgctccaacaagattggacgttttgtgatcgaagaggttcctggtgagctcatgcaggaagacctggctacggatgatgtcatgcttctggacacctgggaccaggtctttgtctgggttggaaaggattctcaagaagaagaaaagacagaagccttgacttctgctaagcggtacatcgagacggacccagccaatcgggatcggcggacgcccatcaccgtggtgaagcaaggctttgagcctccctccttcgtgggctggttccttggctgggatgatgattactggtctgtggatcccttggacagggccatggctgagctggctgcctgaggagggacaggacccacccatgtcaccggtcagtgccttttggaactgtccttccctcaaagaggccttacagcgagcagagcaactctgctatgagtgtgtgtgtatggtttactcgtgttcttggttttttacagtatccaaaaatagccctgcaaaaattcagggtccttgcaaaattgtctaaaacatctgtgtttgggaaattaaatttccataaaaaccttttgaag

SEQ ID NO: 29942 - DNA, 639 bp, Macaca Mulatta
aaattaattctgttaactagtctgtgcacagtattattctgaatgtagttcctgaataaattttcttccatgcttgaactgggaaaaattgctacacttttattcttaatgacgacagtgaaaatctcctagcatatgtctagaaaacaatgataacttacaaaagattatccttgatgaaactcagaatttccacagtgggaatgaataagaaggcaaaactcatttcctcaaaacaaaaaccccaggaattctctggatcttcttgagctaccttcacactattttcttggaaggattgcggattttctaattggtcagctagcacctttaaagaactcacaagaatggttacttgatttttctacaagcagttctgaataaagaaggtaagttgacaaaatgtggaaaatcctctctaactaagatttgaaggaaagcagccaaagtataagtagaaactcttttagacaatgagagtttacatcaacaagaggaaggagcaccagggtttggcatttcccactcatctaagatgagctaagggaccgagacgaagctcagtggagtgggatacaccattgactgggtgttctgaattcatgcctaagatgttcagtgggatcttggaacagagac

SEQ ID NO: 29943 - DNA, 734 bp, Macaca Mulatta
  misc_feature (1)...(734): n = A,T,C or G
gagtttgctgaaaacactgaaaacttgaaaaccaaaatgtcagaactaagactctactgtgacctccttgttcagcaagtggataaaacaaaagaagtgaccacaactggtgtgtccaattctgaggnnggagggaattgatgtgggaactttgctgaaatccacctgtaatacttttctgaagaccttggaagaatgcatgcagatcgcaaatgcagccttcacctctgagctgctctaccgcactccaccaggatcaccgcagctggccatgctcaagtccagcaagnnnnnnnnnnnnnnnnnnnnnnnnnnnnnnnnnnnnnnnnnnnnnnnnnnnnnnnnnnnnnnnnnnnnnnnnnnnnnnnnnnnnnnnnnnnnnnnnnnnnnnnnnnnnnnnnnnnnnnnnnnnnnnnnnnnnnnnnnnnnnnnnnnnnnnnnnnnnnnnnnnnnnnnnnnnnnnnnnnnnnnnnnnnnnnnnnnnnnnnnnnnnnnnnnnnnnnnnnnnnnnnnnnnnnnnnnnnnnnnnnnnnnnnnnnnnnnnnnnnnnnnnnnnnnnnnnnnnnnnnnnnnnnnnnnnnnnnnatgcctctgggaggaagtcacagaagttatcccaactttctttagtactatgaacacaagnagctttagtgacattgagcttctggaagacagtggcattcccacagaagcattcttggcatcatgttatgctgtggttccagtcttag

SEQ ID NO: 29944 - DNA, 339 bp, Macaca Mulatta
aggttatgaagccctggagggcccgaaggaaatcagtaggttcgaaggggacactgtgtccctgcggtgcacctatagggaagagctgagggaccaccggaagtactggtgcaggaagggtgggctcctcttccctcgctgctctggcaccatctatgcgggaaaagaaggccaggagacgacagagggcagggtgtccatccatgacaaccgccaggagctctcgctaattgtgacactgtggaacctcaccctacaagacgctgggaagtactggtgtggggtcgaaaaacggggccccgatgagtctttactgatatctctgttcgtctttccagg

SEQ ID NO: 29945 - DNA, 514 bp, Macaca Mulatta
  misc_feature (1)...(514): n = A,T,C or G
aactgttaaacctaactgtccgaattgagatcatggagaaggataccatttcttacactgaactggactttgagctgatcaaggtagaagtgaaggagatggcgaaactggtcgtacagctgaaggagagttttggtggaagctcagaaattgttgaccagctggaggtggannnnnnnnnnnnnnnnnnnnnnnnnnnnnnnnnnnnnnnnnnnnnnnnnnnnnnnnnnnnnnnnnnnnnnnnnnnnnnnnnnnnnnnnnnnnnnnnnnnnnnnnnnnnnnnnnnnnnnnnnnnnnnnnnnnnnnnnnnnnnnnnnnnnnnnnnnnnnnagggagctgtgatcatggtggtgtggtgaacatcagcaaaccgtctgtggttcagctcaactggagagggttttcttatcagtatggtgcttggggtagggattactctccccagcatccagacaaagggctgaaatgggtggcaccattgaatacagatgggagactgttggagtattacaga

SEQ ID NO: 29946 - DNA, 312 bp, Macaca Mulatta
tttacctgaaaatggtagtagtttacatttatacagtacagtttatgaagcactttcatacacaggcatctcttgttacctacatctaagctgttcccaagagtgttacagaacacaacaatattgtacaatattagataagcatatcttcactgaacttgttataaaaatgagtggtgaaataatgtttggagacataatgaaagcaattaacatttagcaaaatataataaagcctttttgtaattggtgagaaagtcatgaagacttaagttacctaagggcatttggtggcaagagaagggagatggg

SEQ ID NO: 29947 - DNA, 454 bp, Macaca Mulatta
tttgacagaacaaacctgtaatggctttcggattggtaactctttcactttgcgtggcatatattggttatctgcatgcaacacaagagaataaaaaggacctctatgaagctattgatagtgaggggcacagttacatgaggcggaaaacatccaaatgggattagtaatgctggttactgcagatggacgtttattatgcgttctgaaatcttcaactgaaagaccttgtgagtgtacagtatcatatttcttgttctagaacatgctaatgaagacagaagatagcagttgcaaccagacaactgtcgtaaattttgccctttcacagccgttatctcattctttttccacagagcgagcttcataatatttttctttccttgcctcttataaaagtgccatgagaatggaagttgtctttgttaattattaaattctgtataataaaagt

SEQ ID NO: 29948 - DNA, 671 bp, Macaca Mulatta
  misc_feature (1)...(671): n = A,T,C or G
ggtactggcggaggacactgggcatgcaagtccgctatgttcaccatgaagactatcagttctgttattccttccggggcaggcctgggcacaaaccctccatcctcatgctccacggattctctgcccacaaggatatgtggctcagtgtggtcaagnagttccttccaaagaacctgcacttggtctgcgtggacatgccaggacacgagggcaccacccgctcctccctggatgatctgtccatagatgggcaagtcaagaggatacaccagnagtttgtagaatgcctgaagctgaacaaaaaacctttccacctggtaggcacctccatgggtggccaggtggctggggtgtatgctgcttactacccatcggatgtctccagcctatgtcttgtgtgtcctgctggnnnnnnnnnnnnnnnnnnnnnnnnnnnnnnnnnnnnnnnnnnnnnnnnnnnnnnnnnnnnnnnnnnnnnnnnnnnnnnnnnnnnnnnnnnnnnnnnnnnnnnnnnnnnnnnnnnnnnnnnnnnnnnnnnnnnnnnnnnnnnnnnnnnnnnnnnnnntgtttttggaaatcgtcagtgagaagtccagatactccctccatcagaacatggacaagatcaaggttccgacgcagatcatctgggggaaacaagaccaggt

SEQ ID NO: 29949 - DNA, 1564 bp, Macaca Mulatta
  misc_feature (1)...(1564): n = A,T,C or G
ggcatcgagaccacccaaggagcgtcccctcggcctcccagcgctcccaggccgtagcggctgcgcccatttagctagcttgctcgctcgctctccttccctgctgccggctgcgccatggcgttggcgttggcggcgctggcggcggtcgagccggcctgtggcagccggtaccagcagttacagaatgaagaagagtctggagaacctgaacaggctgccggtgatgctcctccaccttacagcagcatttctgcagagagcgcagcatattttgactacaaggatgagtctgggtttccaaagcccccatcttacaatgtagctacaacactgcccagttatgatgaagcggagcggaccaaggccgaagctactatccctttggttcctgggagagatgaggattttgtgggtcgggatgattttgatgatgctgaccagctgaggataggaaatgatgggattttcatgttaacttttttcatggcattcctctttaactggattgggtttttcctgtctttttgcctgaccacttcagctgcaggaaggtatggggccatttcaggatttggtctctctctaattaagtggatcctgattgtcaggttttccacctatttccctggatattttgatggtcagtactggctctggtgggtgttcctggttttaggctttctcctgtttctcagaggatttatcaattatgcaaaagttcggaagatgccagaaactttctcaaatctccccaggaccagagttctctttatttattaaagatgttttctggcaaaggccttcctgcatttatgaattctctctcaagaagcaagagaacacctgcaggaagtgaatcaagatgcagaacacagaggaataatcacctgctttaaaaaaataaagtactgttgaaaagatcatttctctctatttgttcctaggtgtaaaattttaatagttaatgcagaattctgtaatcattgaatcattagtggttaatgttttgaaaaagctcttgcaatcaagtctgtgatgtattaataatgccttatatattgtttgtagtcattttaagtaagcatgagccatgtccctgtggtcagtagggggcagtcttgcctttattcatcctccatctcaaagtgaacttggaaattaaatattttattggtaagatatgtataaatgctggccatttttaagggggtttttcctcaaaagttaaacttttgttagtatgtttttgcacataatccatatttgctgttcaaattaatctagaaatttattcaattctgtgtgaacacctggaaagcaaagtcattagtggcaaaaatacattttaaggtggtgggtcaaaaaatatggtccttttaaattggntaaaaataaataaagccgtgttaaattttttttaataggccctggtaatttcaccaacattttttgcacaataaccctttttattttggttaccccttagaagggggaatttccctaaaaagggctggggttgggtcccccccttggttaaattanaaaaatatatgcgaaaaaa

SEQ ID NO: 29950 - DNA, 4545 bp, Macaca Mulatta
  misc_feature (1)...(4545): n = A,T,C or G
aggagtagcccatcgaagccagagcagtgaaggagtcagttctctcagcagctcgccctctaatagccttgaaacgcaatctcagtctctctcacgttcccagagcatggatatcgatggtgtctcatgtgagaaaannnnnnnnnnnnnnnnnnnnnnnnnnnnnnnnnnnnnnnnnnnnnnnnnnnnnnnnnnnnnnnnnnnnnnnnnnnnnnnnnnnnnnnnnnnnnnnnnnnnnnnnnnnnnnnnnnnnnnnnnnnnnnnnnnnnnnnnnnnnnnnnnnnnnnnnnnnnnnnnnnnnnnnnnnnnnnnnnnnnnnnnnnnnnnnnnnnnnnnnnnnnnnnnnnnnnnnnnnnnnnnnnnnnnnnnnnnnnnnnnnnnnnnnnnnnnnnnnnnnnnnnnnnnnnnnnnnnnnnnnnnnnnnnnnnnnnnnnnnnnnnnnnnnnnnnnnnnnnnnnnnnnnnnnnnnnnnnnnnnnnnnnnnnnnnnnnnnnnnnnnnnnnnnnnnnnnnnnnnnnnnnnnnnnnnnnnnnnnnnnnnnnnnnnnnnnnnnnnnnnnnnnnnnnnnnnnnnnnnnnnnnnnnnnnnnnnnnnnnnnnnnnnnnnnnnnnnnnnnnnnnnnnnnnnnnnnnnnnnnnnnnnnnnnnnnnnnnnnnnnnnnnnnnnnnnnnnnnnnnnnnnnnnnnnnnnnnnnnnnnnnnnnnnnnnnnnnnnnnnnnnnnnnnnnnnnnnnnnnnnnnnnnnnnnnnnnnnnnnnnnnnnnnnnnnnnnnnnnnnnnnnnnnnnnnnnnnnnnnnnnnnnnnnnnnnnnnnnnnnnnnnnnnnnnnnnnnnnnnnnnnnnnnnnnnnnnnnnnnnnnnnnnnnnnnnnnnnnnnnnnnnnnnnnnnnnnnnnnnnnnnnnnnnnnnnnnnnnnnnnnnnnnnnnnnnnnnnnnnnnnnnnnnnnnnnnnnnnnnnnnnnnnnnnnnnnnnnnnnnnnnnnnnagtttgggagcctctggtggagcaagtaattgggattcctacagtgaccatttcaccattgaaacctgcaaagagacagatatgctgaactacctcatcgagtgtttcgaccgagttggaatagagnnnnnnnnnnnnnnnnnnnnnnnnnnnnnnnnnnnnnnnnnnnnnnnnnnnnnnnnnnnnnnnnnnnnnnnnnnnnnnnnnnnnnnnnnnnnnnnnnnnnnnnnnnnnnnnnnnnnnnnnnnnnnnnnnnnnnnnnnnnnnnnnnnnnnnnnnnnnnnnnnnnnnnnnnnnnnnnnnnnnnnnnnnnnnnnnnnnnnnnnnnnnnnnnnnnnnnnnnnnnnnnnnnnnnnnagatatttatccccattttacaaggcctggctcttgctgcnnnnnnnnnnnnnnnnnnnnnnnnnnnnnnnnnnnnnnnnnnnnnnnnnnnnnnnnnnnnnnnnnnnnnnnnnnnnnnnnnnnnnnnnnnnnnnnnnnnnnggttgcttctttgccgttgtggttgccgaaatccttaagtcctggctgtgggcgggagctgcagagactctcttacttgggggctttcttcagcttctcagtctttgcagaagatgatgnnnnnnnnnnnnnnnnnnnnnnnnnnnnnnnnnnnnnnnnnnnnnnnnnnnnnnnnnnnnnnnnnnnnnnnnnnnnnnnnnnnnnnnnnnnnnnnnnnnnnnnnnnnnnnnnnnnnnnnnnnnnnnnnnnnnnnnnnnnnnnnnnnnnnnnnnnnnnnnnnnnnnnnnnnnnnnnnnnnnnnnnnnnnnnnnnnnnnnnnnnnnnnnnnnnnnnnnnnnnnnnnnnnnnnnnnnnnnnnnnnnnnnnnnnnnnnnnnnnnnnnnnnnnnnnnnnnnnnnnnnnnnnnnnnnnnnnnnnnnnnnnnnnnnnnnnnnnnnnnnnnnnnnnnnnnnnnnnnnnnnnnnnnnnnnnnnnnnnnnnnnnnnnnnnnnnnnnnnnnnnnnnnnnnnnnnnnnnnnnnnnnnnnnnnnnnnnnnnnnnnnnnnnnnnnnnnnnnnnnnnnnnnnnnnnnnnnnnnnnnnnnnnnnnnnnnnnnnnnnnnnnnnnnnnnnnnnnnnnnnnnnnnnnnnnnnnnnnnnnnnnnnnnnnnnnnnnnnnnnnnnnnnnnnnnnnnnnnnnnnnnnnnnnnnnnnnnnnnnnnnnnnnnnnnnnnnnnnnnnnnnnnnnnnnnnnnnnnnnnnnnnnnnnnnnnnnnnnnnnnnnnnnnnnnnnnnnnnnnnnnnnnnnnnnnnnnnnnnnnnnnnnnnnnnnnnnnnnnnnnnnnnnnnnnnnnnnnnnnnnnnnnnnnnnnnnnnnnnnnnnnnnnnnnnnnnnnnnnnnnnnnnnnnnnnnnnnnnnnnnnnnnnnnnnnnnnnnnnnnnnnnnnnnnnnnnnnnnnnnnnnnnnnnnnnnnnnnnnnnnnnnnnnnnnnnnnnnnnnnnnnnnnnnnnnnnnnnnnnnnnnnnnnnnnnnnnnnnnnnnnnnnnnnnnnnnnnnnnnnnnnnnnnnnnnnnnnnnnnnnnnnnnnnnnnnnnnnnnnnnnnnnnnnnnnnnnnnnnnnnnnnnnnnnnnnnnnnnnnnnnnnnnnnnnnnnnnnnnnnnnnnnnnnnnnnnnnnnnnnnnnnnnnnnnnnnnnnnnnnnnnnnnnnnnnnnnnnnnnnnnnnnnnnnnnnnnnnnnnnnnnnnnnnnnnnnnnnnnnnnnnnnnnnnnnnnnnnnnnnnnnnnnnnnnnnnnnnnnnnnnnnnnnnnnnnnnnnnnnnnnnnnnnnnnnnnnnnnnnnnnnnnnnnnnnnnnnnnnnnnnnnnnnnnnnnnnnnnnnnnnnnnnnnnnnnnnnnnnnnnnnnnnnnnnnnnnnnnnnnnnnnnnnnnnnnnnnnnnnnnnnnnnnnnnnnnnnnnnnnnnnnnnnnnnnnnnnnnnnnnnnnnnnnnnnnnnnnnnnnnnnnnnnnnnnnnnnnnnnnnnnnnnnnnnnnnnnnnnnnnnnnnnnnnnnnnnnnnnnnnnnnnnnnnnnnnnnnnnnnnnnnnnnnnnnnnnnnnnnnnnnnnnnnnnnnnnnnnnnnnnnnnnnnnnnnnnnnnnnnnnnnnnnnnnnnnnnnnnnnnnnnnnnnnnnnnnnnnnnnnnnnnnnnnnnnnnnnnnnnnnnnnnnnnnnnnnnnnnnnnnnnnnnnnnnnnnnnnnnnnnnnnnnnnnnnnnnnnnnnnnnnnnnnnnnnnnnnnnnnnnnnnnnnnnnnnnnnnnnnnnnnnnnnnnnnnnnnnnnnnnnnnnnnnnnnnnnnnnnnnnnnnnnnncagagatcctacagtaaggagttgtttgaagaagtaatttcaaagatgcggaaggcagggatcaaatccacaatagcgatagaaaaatttaagctgctcgccgagaaagtggaggagatagtggccaagaatgcacgcgcagaaattgactacagcgacgctcctgatgagttcagaggcaagtggactnnnnnnnnnnnnnnnnnnnnnnnnnnnnnnnnnnnnnnnnnnnnnnnnnnnnnnnnnnnnnnnnnnnnnnnnnnnnnnnnnnnnnnnnnnnnnnnnnnnnnnnnnnnnnnnnnnnnnnnnnnnnnnnnnnnnnnnnnnnnnnnncagtgccagaactgaaagagcagattcaggcatggatgagagagaaacagaacagcgatcactaaaccgttccgccgcccaccctctgctagacacagccaaggccaacgaggcaagcagaagcagcggctgcagcaaagctgccattcacgtgttggaggccaaatgtggcaaaccacccaggcccacccagagcgagcaaacgctgagagctggaaggacacggatgagaagaggagcccggttcctgtacatatatttaagtgacaaacacgctcaaaagcttaaaggacaggttttatggttgcttgtgtaataaagcacgtccttcgtatgtcacagtttggggcaactgaagtctttcagtgatggctgatgggtctgggcagcatcccttcatgaattttttttaatccaatatccgttgatttgattgtgattagagaaccttggacattttgctgctaaagaatcttttnnnnnnnnnnnnnntcctgaccctacttgcactgctgtggattttttaagagaagcaaaaacagaagtaaacccctctccccggcccaccaaacatatattctgtgagataactgtgcctgccaccaagtgttcatcctgggatcgtatttttatatcatattcacatatttgtttttttaattggtgttagatgacatgattaataaaaaaggcaagatattttcagaatttgaatttcagttttttttcttttgaaatgtccctttaagatttttttattctaaacaaaataaagaaaatcttgctgctctggtccttgtaataagcctctattaggcacctgaggagcaactgcagcaaaatctaggggtgtcagtgtatcaggacttatgtgacttaccgtattttgggaagatgagggt

SEQ ID NO: 29951 - DNA, 309 bp, Macaca Mulatta
  misc_feature (1)...(309): n = A,T,C or G
agccgatttatctcaggatgccacaaacactcttgcaaagaagaagccagtttttgtgccttacagggattctgtgttgacttggttgttaaaagatagccttggaggaaactctaaaactatcatgattgccannnnnnnnnnnnnnnnnnnnnnnnnnnnnnnnnnnnnnnnnnnnnnnnnnnnnnnnnnnnnnnnnnnnnnnnnnnnnnnnnnnnnnnnnnnnnntgaggatgccaacgtcaaacttatccgtgagctgcgagctgaaatagccagactgaaaacgctgcttgctcaagggaatca

SEQ ID NO: 29952 - DNA, 100 bp, Macaca Mulatta
catcaattttcattccagcctttggatcagaaactaaggtcagagtaaacagtaacatgagaactgaagaagaataaagcaacttctccaaaaatttaag

SEQ ID NO: 29953 - DNA, 1384 bp, Macaca Mulatta
  misc_feature (1)...(1384): n = A,T,C or G
cagtgaccaggagttaaactttgaggtgtgcccgtgatgttggaccaccaggacttagaagccgaagtccaccccttgaaaaatgaagaaagaaaatcgcaggaaaatctgggaaacccatcgaaaaatgaggataagttgaaaagcacacctccacagtcccggctctcccgatgccgaacggtggcgttttttctttcattgtttctctgcctttttgtggtgtttgtcatctcattcgtcatcccgtgtccagaccggccagcgtcacagcgaatgtggaggatcgactacaatgccgctgnnnnnnnnnnnnnnnnnnnnnnnnnnnnnnnnnnnnnnnnnnnnnnnnnnnnnnnnnnnnnnnnnnnnnnnncaccaacagcagcaacaatttcaaccgatcctgtgtggatgaaggnaggcttttcctctccctgcgcctttgccgctgctgtgtcgggggccaacggcagcacgctctgggagagacctgtggcccaagacgtggccctggtggagtgtgctgtgccccagccaagaggcagtgaggcaccttctgcctgcatccttgtgggcagacccggttctttcattgcagtcgactcgttcacaggnnnnnnnnnnnnnnnnnnnnnnnnnnnnnnnnnnnnnnnnnnnnnnnnnnnnnnnnnnnnnnnnnnnnnnnnnnnnnnnnnnnnnnnnnnnnnnnnnnnnnnnnnnnnnnnnnnnnnnnnnnnnnnnnnnnnnnnnnnnnnnnnnnnnnnnnnnnnnnnnnnnnnnnnnnnnnnnnnnnnnnnnnnnnnnnnnnnnnnnnnnnnnnnnnnnnnnnnnnnnnnnnnnnnnnnnnnnnnnnnnnnnnnnnnnnnnnnnnnnnnnnnnnnnnnnnnnnnnnnnnnnnnnnnnnnnnnnnnnnnnnnnnnnnnnnnnnnnnnnnnnnnnnnnnnnnnnnnnnnnnnnnnnnnnnnnnnnnnnnnnnnnnnnnnnnnnnnnnnnnnnnnnnnnnnnnnnnnnnnnnnnnnnnnnnnnnnnnnnnnnnnnnnnnnnnnnnnnnnnnnnnnnnnnnnnnnnnnnnnnnnnnnnnnnnnnnnnnnnnnnnnnnnnnnnnnnnnnnnnnnnnnnnnnnnnnnnnnnnnnnnnnnnnnnnnnnnnnnnnnnnnnnnnnnnnnnnnnnnnnnnnnnnnnnnnnnnnnnnnnnnnnnnnnnnnnnnnnnnnnnnnnnnnncagatcctgttcctggaccttggcactggagctgtcctgtgtagcctagccctcccgagcctccctgggggtccactgtccgccagcctgccgaccgcagaccaccgctcagccttcttcttctggggcctccacgagctgggcagcaccagcgagacg

SEQ ID NO: 29954 - DNA, 1640 bp, Macaca Mulatta
  misc_feature (1)...(1640): n = A,T,C or G
gatttctaactctgatggaacacgaccagttggcatgctggggaaagccacatctaccagtgacatgctgctcaaactggcccggaccacaccctactacaaaaggaatcgaccccacatttgctcccttcggggtgaaaggagagtgtaagagaggagaggaatgtccatacaggcaannnnnnnnnnnnnnnnnnnnnnnnnnnnnnnnnnnnnnnnnnnnnnnnnnnnnnnnnnnnnnnnnnnnnnnnnnnnnnnnnnnnnnnnnnnnnnnnnnnnnnnnnnnnnnnnnnnnnnnnnnnnnnnnnnnnnnnnnnnnnnnnnnnnnnnnnnnnnnnnnnnnnnnnnnnnnnnnnnnnnnnnnnnnnnnnnnnnnnnnnnnnnnnnnnnnnnnnnnnnnnnnnnnnnnnnnnnnnnnnnnnnnnnnnnnnnnnnnnnnnnnnnnnnnnnnnnnnnnnnnnnnnnnnnnnnnnnnnnnnnnnnnnnnnnnnnnnnnnnnnnnnnnnnnnnnnnnnnnnnnnnnnnnnnnnnnnnnnnnnnnnnnnnnnnnnnnnnnnnnnnnnnnnnnnnnnnnnnnnnnnnnnnnnnnnnnnnnnnnnnnnnnnnnnnnnnnnnnnnnnnnnnnnnnnnnnnnnnnnnnnnnnnnnnnnnnnnnnnnnnnnnnnnnnnnnnnnnnnnnnnnnnnnnnnnnnnnnnnnnnnnnnnnnnnnnnnnnnnnnnnnnnnnnnnnnnnnnnnnnnnnnnnnnnnnnnnnnnnnnnnnnnnnnnnnnnnnnnnnnnnnnnnnnnnnnnnnnnnnnnnnnnnnnnnnnnnnnnnngctccaggaccaatccactatccttctcaggaccctcagaggatgggagctcacgctgggaaacacagcagcccctagcaccttgtcaccactctggggctctgtggaagaaagggcacttaaaactcccagtaaatcttggaataaatatatttgtccttcccttgtagtttccatggtagctgaatgtgctcagatgtgggcattcggagactgacagccatgctttcctacacatgttcaaaggatcgatggaccgtaaataagctgccgttaacacatctggttactgctataacacgactaataaagcctaatgcctgttccccttacctgtgtgggggacaagcagatgagtgaattggaatgtccagcagagttaccatcccaattatatgttcattttgtatattttttgggcgggggaataattgacctgcggtaaaaaaaacctttgaccatttttatgtccattgagtattttcctttnnnnnnnnnnnnnnnngataactagtactaatcattggagtggcctaagtgtgatttaactctttggaagtcacaccctcagaaagatgagtagaaaccagcaccagcacagcccagatcttttctttcctctccttttcctcgtttattcctaaaggaatctgaccattttaagtctctacggcccaaaaaaaagacaaaactaaaaattcctttttattactgtcaactggatggaaacaaatttaatggagctgtgtaccattgaagaaacctggtgtctggcatgaaattactgtaaagaacttcctgtaaaacacgttctttaacaaa

SEQ ID NO: 29955 - DNA, 346 bp, Macaca Mulatta
cttttgatcttcagaactattcggatgcatgccattttggtaatcagtggtgacaactcaagtattaattaacaaggaacctccttccaatctgttaactgaatggctcagagtgaatgctacttttgtctttgtgtgtttccttggtgaattatcttttgtctactttgggagttttcaatgacttatatgttaatcttaattaacctaactaatgggaactatattttatagaggcacatttgtgcatttgtagaagtctgcgtatttctttactgttgcgttgtctttattaggttatctatgtttggttgggcacttagctctcaagtagagtttatggaga

SEQ ID NO: 29956 - DNA, 616 bp, Macaca Mulatta
aatggacaagcaggcaaagccgtgtgatctccagactgcaaccgcggggtccttcgcctctccttttgctgcgctggctctctgccccactgagcttgtgaagtgccggctacagaccatgtatgaaatggagatgtcagggaagatagcaaaaagccataatacaatttggtctgtcgtgaagggtatccttaaaaaggatggccccttgggcttctaccatggactctcgagtactctacttcaagaagtaccgggttatttcttttactttggtggctatgaactgagccgatcgtttttcgcatcagggagatcaaaagatgaactaggccctgtccatttgatgttaagtggtggagttgctggaatttgcctctggcttgtcgtgttcccagtggattgtattaaatccagaattcaagttctttccatgtatggaaaacaggcaggatttattggtactctcttaagtgttgtgagaaatgaaggaatagtagccttatattctggactgaaagctactatgattcgagcaatccctgccaatggggcactgtttgtggcctatgaatacagcaggaagatgatgatgagccagttggaagcatactga

SEQ ID NO: 29957 - DNA, 3023 bp, Macaca Mulatta
  misc_feature (1)...(3023): n = A,T,C or G
atgtgtgacttgcggcggccagcggcaggtgggatgatggacttggcctacgtctgtgagtgggagaaatggtccaagagcacccactgcccgtcggtgcccctggcctgcgcctggtctagccgaaatctcatcgccttcaccatggacctgcgcagcgacgaccagnnctgacccgtatgatccacatcctggacacggagcacccctgggacctgcactccatcccctcagaccaccgcgaggccatcacctgcctggagtgggatcagtcagnnnnnnnnnnnnnnnnnnnnnnnnnnnnnnnnnnnnnnnnnnnnnnnnnnnnnnnnnnnnnnnnnnnnnnnnnnnnnnnnnnnnnnnnnnnnnnnnnnnnnnnnnnnnnnnnnnnnnnnnnnnnnnnnnnnnnnnnnnnnnnnnnnnnnnnnnnnnnnnnnnnnnnnnnnnnnnnnnnnnnnnnnnnnnnnnnnnnnnnnnnnnnnnnnnnnnnnnnnnnnnnnnnnnnnnnnnnnnnnnnnnnnnnnnnnnnnnnnnnnnnnnnnnnnnnnnnnnnnnnnnnnnnnnnnnnnnnnnnnnnnnnnnnnnnnnnnnnnnnnnnnnnnnnnnnnnnnnnnnnnnnnnnnnnnnnnnnnnnnnnnnnnnnnnnnnnnnnnnnnnnnnnnnnnnnnnnnnnnnnnnnnnnnnnnnnnnnnnnnnnnnnnnnnnnnnnnnnnnnnnnnnnnnnnnnnnnnnnnnnnnnnnnnnnnnnnnnnnnnnnnnnnnnnnnnnnnnnnnnnnnnnnnnnnnnnnnnnnnnnnnnnnnnnnnnnnnnnnnnnnnnnnnnnnnnnnnnnnnnnnnnnnnnnnnnnnnnnnnnnnnnnnnnnnnnnnnnnnnnnnnnnnnnnnnnnnnnnnnnnnnnnnnnnnnnnnnnnnnnnnnnnnnnnnnnnnnnnnnnnnnnnnnnnnnnnnnnnnnnnnnnnnnnnnnnnnnnnnnnnnnnnnnnnnnnnnnnnnnnnnnnnnnnnnnnnnnnnnnnnnnnnnnnnnnnnnnnnnnnnnnnnnnnnnnnnnnnnnnnnnnnnnnnnnnnnnnnnnnnnnnnnnnnnnnnnnnnnnnnnnnnnnnnnnnnnnnnnnnnnnnnnnnnnnnnnnnnnnnnnnnnnnnnnnnnnnnnnnnnnnnnnnnnnnnnnnnnnnnnnnnnnnnnnnnnnnnnnnnnnnnnnnnnnnnnnnnnnnnnnnnnnnnnnnnnnnnnnnnnnnnnnnnnnnnnnnnnnnnnnnnnnnnnnnnnnnnnnnnnnnnnnnnnnnnnnnnnnnnnnnnnnnnnnnnnnnnnnnnnnnnnnnnnnnnnnnnnnnnnnnnnnnnnnnnnnnnnnnnnnnnnnnnnnnnnnnnnnnnnnnnnnnnnnnnnnnnnnnnnnnnnnnnnnnnnnnnnnnnnnnnnnnnnnnnnnnnnnnnnnnnnnnnnnnnnnnnnnnnnnnnnnnnnnnnnnnnnnnnnnnnnnnnnnnnnnnnnnnnnnnnnnnnnnnnnnnnnnnnnnnnnnnnnnnnnnnnnnnnnnnnnnnnnnnnnnnnnnnnnnnnnnnnnnnnnnnnnnnnnnnnnnnnnnnnnnnnnnnnnnnnnnnnnnnnnnnnnnnnnnnnnnnnnnnnnnnnnnnnnnnnnnnnnnnnnnnnnnnnnnnnnnnnnnnnnnnnnnnnnnnnnnnnnnnnnnnnnnnnnnnnnnnnnnnnnnnnnnnnnnnnnnnnnnnnnnnnnnnnnnnnnnnnnnnnnnnnnnnnnnnnnnnnnnnnnnnnnnnnnnnnnnnnnnnnnnnnnnnnnnnnnnnnnnnnnnnnnnnnnnnnnnnnnnnnnnnnnnnnnnnnnnnnnnnnnnnnnnnnnnnnnnnnnnnnnnnnnnnnnnnnnnnnnnnnnnnnnnnnnnnnnnnnnnnnnnnnnnnnnnnnnnnnnnnnnnnnnnnnnnnnnnnnnnnnnnnnnnnnnnnnnnnnnnnnnnnnnnnnnnnnnnnnnnnnnnnnnnnnnnnnnnnnnnnnnnnnnnnnnnnnnnnnnnnnnnnnnnnnnnnnnnnnnnnnnnnnnnnnnnnnnnnnnnnnnnnnnnnnnnnnnnnnnnnnnnnnnnnnnnnnnnnnnnnnnnnnnnnnnnnnnnnnnnnnnnnnnnnnnnnnnnnnnnnnnnnnnnnnnnnnnnnnnnnnnnnnnnnnnnnnnnnnnnnnnnnnnnnnnnnnnnnnnnnnnnnnnnnnnnnnnnnnnnnnnnnnnnnnnnnnnnnnnnnnnnnnnnnnnnnnnnnnnnnnnnnnnnnnnnnnnnnnnnnnnnnnnnnnnnnnnnnnnnnnnnnnnnnnnnnnnnnnnnnnnnnnnnnnnnnnnnnnnnnnnnnnnnnnnnnnnnnnnnnnnnnnnnnnnnnnnnnnnnnnnnnnnnnnnnnnnnnnnnnnnnnnnnnnnnnnnnnnnnnnnnnnnnnnnnnnnnnnnnnnnnnnnnnnnnnnnnnnnnnnnnnnnnnnnnnnnnnnnnnnnnnnnnnnnnnnnnnnnnnnnnnnnnnnnnnnnnnnnnnnnnnnnnnnnnnnnnnnnnnnnnnnnnnnnnnnnnnnnnnnnnnnnnnnnnnnnnnnnnnnnnnnnnnnnnnnnnnnnnnnnnnnnnnnnnnnnnnnnnnnnnnnnnnnnnnnnnnnnnnnnncccctcagctacccctgagtccagctgctgcgagagccaccgctctccctggacgctccttggcgcagttaacctcagcccacctggcagggctgtcgaaggccatgggccggacgcctgcgtgaccagcagagctgctgaggaagcccctgcctttgtccagctgggcccgtggcccacataccgccctcccgggaccccccgatccctggaccatccgcatccagaggaccgtctgtgacggccgggggtccccgcggaccttggggtgacccggctcgggcgcctgcctcggtttcctcgcctctcctgccgagagcgctgaacctggacaagctgcagctgggaagggcgggtccaataaacgccctctgc

SEQ ID NO: 29958 - DNA, 942 bp, Macaca Mulatta
  misc_feature (1)...(942): n = A,T,C or G
ggggaaagggaatgaattgcaacgttgtatccgaaagaagaaaatggttggaagtagaatgttcgctgatgacctgcacaaccttcataaacgcatccgctatctctacaaacactttaaccgacatgggaggtttcggtagaagagaaagctgagaacttcggaaaaggctcatctgtcaccctggagaagggaaactgtactcttccctgtgaggaaacagctttgtattttctctgtaataaaatggggcttctttggaatttgatagccacatgcttctgttttcctctagatgctgcctctacttactcatgtagactgtgaagtcnnnnnnnnnnnnnnnnnnnnnnnnnnnnnnnnnnnnnnngttctgttgccccagctggaagttagtgggatcagtaattgcttaaataataaaccacacactctcttacaccttcttcctctctccaacttctcggcccgtcgagagacctatgttgaacaatatgaccatacatattttctcctctgttgtccactaccttttttacgttgattatttctattttatatacacacatcttttcactatcatcatcagtatacaaatgtatgctgtaaacatgtccatatctccaaaagttcagtccaaattgcacatgctcgtcctctattattgaccgcggggatcttctctcgtacctcgatctttatttatagatagccctatagcactacttcatagataattctattacattactcttaattaacaatatgtttacataccatttctctccattatatttacgttgcatgaaagcggctatgattacgttggaaccctcgctcactactttcacatcaccataagcgattataaaacgaacactcagctgtcgtcctatttcatagcgtattccgatcaccatcttcgatatcgctgcgttctcc

SEQ ID NO: 29959 - DNA, 630 bp, Macaca Mulatta
  misc_feature (1)...(630): n = A,T,C or G
ttgcaactgacaccactatatttgcctagcaacttgcagctgcttcctcttcaaagcctcatgtatcnnnnnnnnnnnnnnnnnnnnnnnnnnnnnnnnnnnnnntaagaatgtttcaataatgcgttggcaagagatgtgggatgacaacaggaacatacaagatactgtgaatctagatgttctgacctaaagatgtagtctacctagccccagcttgtggtccaatccatctgtctctggcatgtgccctcatgtagcaggtgctttgctgatcccctttgtgagatgctgtgggtgctaaaacctcagagctgtcctcttctctagagtggaggttttcaaagtgcatcatcagcattacctgtgaacttgctggaaatacaaattctcagaccccaccccagacctaccgaatcagaatttccaggggttggcacagcattctgatttaccaaaccctccaagtgattttgatgtattctaattttgagaccatctctagaaaagaattgctacctcttgtatggaggtacaaaagactgacctcttacatcgaggaaattcctttcccagagctcctcatggaatcaggctgaagtcaatgttcttctgagagcacattcttac

SEQ ID NO: 29960 - DNA, 444 bp, Macaca Mulatta
tcccaccacagtgaggcatccggcactgaggccatggtgttcctggtcacatcccccaggggaccctgcccccttcctggacttcgtgccttactgtgtctctaagactttgactaataaacaagccagtgcatgtaccatgttctgtgcccctcaccctcagcatggagccccactgcatgggggccggtgtggggtttgggaatggaatgttagggcagagggggctgggacatcagggccagaccaggaggagcctcaaaggcagacagaatggcctgggctctgtcttctgggtcatggagcgcctgaggggagggggccaatgaggaaggaggggcaaaccagggttttgggaaagggatgtgtctggtggtcagaaaaggagaccctgtaggcagtggggtcagtaggaggctgcctaaccatctgatcatccgagga

SEQ ID NO: 29961 - DNA, 573 bp, Macaca Mulatta
tctacggggactgttttaaggttatcaactctgacttttttgatagtggtttttaagagtataaatagaagggagagtatatatgtatgaatgaacatacatttcctgcatatatatgtatgaagggcatatatatgtatgaatgagcatacatatttgaaaactgacttttggatgataagaaaaatcttacagtgagatgagttcatctcctgatccattgtttcttggagaattatactcaactgaattacggacaggagaaagagtggatttcttttagctaattccccaacccatatgcccctctgaagttgagagtcatggctgcctcaccacacatcagagaatgactgttcttcggtagttctgggattaaaaattggtttctagaggtaacctgtacacataaacacacagggatgcacatggcgtcctctacctttgtgactaactttcttcttgatatttattaatagtatctaaataaagtatgggggggtagaaaaataatgctgttagcccatacttccatgaaaacatttattataggctcaaaggaataatgcctgc

SEQ ID NO: 29962 - DNA, 704 bp, Macaca Mulatta
  misc_feature (1)...(704): n = A,T,C or G
gaagaatgannnnnnnnnnnnnnnnnnnnnnnnnnnnnacacgggggaaagggggggagggacccccttgggggggaaaaaaaagggatggggggaattttttctcttttctcccggggaaattccttctcccaaggggagtggttttattttccagggaatgggggttacacaaatggggtttcccctctcaaaaaagggggcccccttnnnnnnnnnnnnnnnnnnnnnnnnnncttaggggggggccaccgggttttctccaaggggaatttcaccggggcggggcccctttccccctttaaaaaatccgggctggggcccggttttttttcagggggggcaaaaaacttcataagattcccattccccaagttttgctaattggcagttttttggcagctcacaatctcggaacccatgtggcggcctagtgagcatgacccgatcttgaacttcactgtactgcaggttaactaccttgttaaaaagaaacgctctgccagtggcgcctgtgaaacgagtggagatgagttctgagcggttggtcaggatcgtatcacagtttgcacaagaaaatagacgggtaccaccgatatgatcaaggaaaattctgcccatttttatggctgaagttctaaaaaccctgagcggcggtgagatcagcgactgccactggctcctcgctcttcagctggtctccc

SEQ ID NO: 29963 - DNA, 794 bp, Macaca Mulatta
ggagcacagcactagccaaagagggaaatgtctattcttcttaccgtgcctatattaagactagtacaaatgtggtgtggcttccagctttcattgaaaatgccatatctgtgacatattttattcgagtcactgatgatgtcatgatatattttttcattattatagtagaatatttttatggcaagatatttgcgatcttgattgtacctattaaaataatgccaaacaccagatatgaattttatgatgtactttgtgcttggcattaaaagaaaaaaacacacatcctggaagtctgtaggttgtttttttgttactgtagttcttcaaagttaagagtgtaagtgaaaaatctggaggagaggataatttccactgtgtggaatgtgaatagttaaatgaaaagttatggttatttaatgtaattattaattcaaatcctttggtcactgtgattgcaagcatgttttctttttctcctttatatgactttctctgagttgggcaaagaagaagctggcacattgtatgttgttggagtctcttatctggtcagggggaacaaaatcttgacccatctgaatgtgtgttactgagtcagtgcctgaacctttattttttaaattgatgttccttaaaggttaacatttctaaagcaatattaagaaagactttaaatgctattttgggaagacttatgatgtgtgtatacaaacaaatagcagataatgggtgaatagctcacacataaagaccctttttaagggagaaaaatcttaaaatgaaaaagg

SEQ ID NO: 29964 - DNA, 440 bp, Macaca Mulatta
gttgccagacagagcagtggtccggcaagaagggagacacagcttccctgggagggaagaagtccaagaagaagagcaaaaaaaccaaggcagcaggcggcaggagtagaagcagcagcaaacaaaggaaggagctgggtggccttgagggagaccccagccccgaggaggatgagggcatccagaaggcatcccctctaacacacagcccccctgatgagctctgagcccacccagcgtcctctgtgctgagacctctgattttgaagctgaggagtcgggggcatggctctggcaggccaggatggccccgcaggcttcaggccctccttgccttggctgtgccgtcgtcttccaaggaaagacacaagccccaggaagaactcaggagaaaacatgggtagcctatgccggcctttcccgtccccagatgtttctct

SEQ ID NO: 29965 - DNA, 751 bp, Macaca Mulatta
  misc_feature (1)...(751): n = A,T,C or G
atgaagcccccctatctcggctacagatctgcccaaggtcctcaaaggcttcccttccctactggttacaaaaggcagcgagaatatgaagagnnnnnnnnnnnnnnnnnntacgactctgaaatggaagattttatcgaagatgaaggagagcctcaggaagaaatatccaagcacattagagaaatttttggttatgaccgaaaaaaatacaaagatgaaagtgattatgccttacgttacatggaaagtagttggaaagagcagcagaaggaagaagcaaagagcttaagactaggtatgcaagaggacttagaggaaatgagacgtgaagaagaagaaatgcaacgtcgaagggccaagaagctgaagaggcgttagctgctgcttttatttttgtgaaattctagagctgctctgctgcaaggatttcctgccttcagactgaagaagtccccttatcattttagatttatacttgggtactcaaggagaaggaatgcatactgtcatttgcaggctgtcatttgagcataaaatattttcagatattttccagggtgaaatctgtaatgcagatgatataatgcccacatgtgctcttatgaagttaactgttcacagatgccagccttgatcctgatgagctatgcactcttatgtggggccagtcaacagtcaggcaacttttatggtcctttgctatcttgaagggcaaaaagcgtggcctgattctatatctgctgatctg

SEQ ID NO: 29966 - DNA, 175 bp, Macaca Mulatta
agattacttagtcactgcaaactccaatctagtgattatcacagcaggtgcacgccagaaaaaaggagaaacacgccttgatttagtccagcgaaatgtgtccatctttaaattaatgattcccaatattacccagtatagccctcactgcaaactgcttattgttactaatcca

SEQ ID NO: 29967 - DNA, 174 bp, Macaca Mulatta
caggtgctgacctgacagcagtggaccctgttcggggcaagacggccctggaatgggcagtgctgactgacagtttcgacactgtgtggaggattcggcagctgctgagaaggccccaagtggagcagcttagccagcactaccagcccgagggccggcctgtccgggctcgtg

SEQ ID NO: 29968 - DNA, 849 bp, Macaca Mulatta
ggatgcttctgctggcacacctggcctcccctccatgctcagaactgcctcctactctacatccaggctcctgagcagcccccagcttaagcctcagcagctcgagggtaaatccacctctgcccagaactgactctggatctgccccagtgacaataacaagataaatgccttccattctcttcatactttcaggatgtaatccacatatttacacagtgtttcatcagttgcggtaatgtttgttttgtttcttgttcctttgtacctatctgggaagcctgtgcaattcagatgtccaggcccacttccagaagttctcattccctgtgcttgagtcaatggctgcagaccatacatctgagggcaagttaatctgctctaacaaagataccacatctgagaatggtggttggcaggggctagggggtgggaagaatggggagttggtgcttaatggttacagagattcagttttgcaagaggaaaagagctctggagatggatggtgctgatggctgcacaacaatgtgaatgtgcatgatgcttaaaaatggttaagatgggccgggcgcggtggctcacgcctgtaatcccagcactttaggaggacaaggcgcgtggatcaaggtccagggagatcgagaccatcctggctaacacggtgaaacccccatctctactaaaaaaatgcaaacaaattagccaggtgtggtggtgggcacctgtggtcccagcttctcgggaggctgaggcaggagaatggcctgaacctgggaggtggagcttgcagtgagccgagatctcgccactgcactccagcctggatgacagagcaagactccgtct

SEQ ID NO: 29969 - DNA, 473 bp, Macaca Mulatta
  misc_feature (1)...(473): n = A,T,C or G
ggggaccattacctattaggaagattcaaaatgactgtgtttttaaaggaataaatcccagtgtgcctgatttgacattcttatcagcaaaaaaacttgatttctagtaaatctataaaaaggggtaagtccctaaatttcaaatgagaaaactgaagcacaaggaaaaaaataactagtttgaaatattttgaaaagtaataacataaaactaatatttgtagaagattatgttgtatataacaaattggtatttatagaatatgacctatttatctaaagtttataattgtttatacctaatacaattctgtttggagtaagaatgattatataatcattatccatttgggtataaatctgtatttttagttttttttccctttgattagtatgtgttatatataaaagacagaaaataaagtataaatcangaacnnnnnnnnnnnnnnnnnnnnnnnnnnnnnnnnntc

SEQ ID NO: 29970 - DNA, 171 bp, Macaca Mulatta
ggatatgggaacctggcacccagcacagaggcaggtcaggtcttctgtgtcttctatgccctgttgggcatcccgcttaatgtgatcttcctcaaccacctgggcatggggctgcgtgcccacctggccaccattgagagatgggaggaccggcccagacgctccaaggta

SEQ ID NO: 29971 - DNA, 201 bp, Macaca Mulatta
aatattttgatgaaatgaaagaatatggcccaattcatattctgtggtcagcgtcagaagaggatctggttgatactctaaaggatgttgccggctgcattgacagatgctgtaaggccactgaaaagcggatgtctggactctcagaggccctgcttcctgttgtacatgagtacgtgctttatagtgaaatgttaatgg

SEQ ID NO: 29972 - DNA, 938 bp, Macaca Mulatta
  misc_feature (1)...(938): n = A,T,C or G
ggctcttgggaaatggctgagcatcaacggagaggccatctatgcctccaaaccgtggcgggtgcaatggngaaaagaacacaacatctgtatggtatacctcaaagggatcagctgtttatgccatttttctgcattggccagaaaatggagtcttaaaccttgaatctcccataactacctcaactacgaagataatgatgctgggaattcaaggagatctgaagtggtccacagatccagataaaggtctcctcatctctctgccccagttgccaccctctgctgttcctgcagagtttgcttggactataaagctgacgggagtgaagtaatcatttgagtgcaagaagaaagaggcgctgcctgctgttttgctgtttcagttttcctcttataataccatcactataatcaacgaacttgtcttctccacccagagatggcttttccaacacattttaatcaaaggaactgagtacgttaccccgatgtcttaatggaccaaagatttgagatccattgcgattatatctgtatcaggtcagcagaagaagggactgagcagttaaactctgagttcatcaattctaatatttgaaattatctacaatggaatcttccctctgttctctgataacctacttgcttactcaatacctttcagcccaagtcaccctgttgcctatgggaaggaagttgggaaaggattttggcaagctcaacccccatgcctatttagttaggcatcggttgtcaccaacactaatgcaaaggggcaggagagcccttgggggaaaaggaaaagggctaaccaagcctggttagggtcaacctccttcgaaaattttccggaagaatcctaagaagcccccaacaaaatttcccctaaggttttaccggggaaaccattttaaaaaaaatggattgttaattcc

SEQ ID NO: 29973 - DNA, 212 bp, Macaca Mulatta
tggaatccaccctggcagagacggaggcccgctatagctcccaactggcccagatgcagtgcatgattaccaacgtggagacccagctggccgagatccgggctgacctggagcggcagaaccaggagtaccaggtgctactggacgtcaaggcccggctggagggcgagatcgctacctaccgccgcctgctggagggagaggactgcaag

SEQ ID NO: 29974 - DNA, 674 bp, Macaca Mulatta
attcctccagcaaaagctgaagcagtcccagctgctggctttgaagaaagagctgatggtgcagaagcagcaggaggcacttggggagcaggcggctctggagcccaagctggacctgctgctggagaagagcaaggagctgcagaagctggtgagatgggaaagggaggcctgccagtgggaggactcccaatctgtgcagagcgaggccctgaacacccctgcttccgcccacttggtatcactatttcagattgaagctgacatctccaagaggtacagcgggcgccctgtgaacctgatgggaacctctctgtgacaccctccgtgttcttgcctgcccatcttctcagcctttgggctgaagatgatagccagggctgatgttttgaggcccttcaaggcaaaagatcaggccgactggaagatggaaagccacaggaaggaagcagtacctgatggtgatcttggcattcttcatgttccctacaagaagctgtggtgattggccctgtggcctgtcaggcaaaaaccacagctgctccttctagttagtatagcagacttaataaaagaggaaaaaaactcttgcttcagtactgacagttccttatgctgcttctctgagcctgcagttgaggctccacacccgtttttgtggggttcttgatcct

SEQ ID NO: 29975 - DNA, 833 bp, Macaca Mulatta
ggggggcagttcggcggtcccgcgggtctgtctcttgcttcaacagtgtttggacggaacagatccggggactctttcttccagcctccgagcgccctccgatttcctctccacttgcaacctccgggaccatcttctcggccatctcctgcttctgggacctgccagcaccgtttttgtggttagctccgtcttgccgaccaaccatgagctcccagattcgtcagaattattccaccgacgtggaggcagccgtcaacagcctggtcaatatgtacctgcaggcctcctacagctacctctctctgggcttctatttcgaccgcgatgatgtggctctggaaggcgtgagccacttcttccgcgaattggccgaggagaagcgcgagggctacgagcgtctcctgaagatgcaaaaccaagcgtggtgggccgcgctccttttttcggaacttcaagaagcccgctgaagatgaatggggtaacacccccggaatgccctgaaaagccccccatggggcccttgaagaaaaaactgaaaatcgggcccctttttggattttccactgcccctgggtttttggcccacgcggaatcccccattctctggggagttccctggtaaaactccatttccctggatagagggaaagtgggaaccttcccctccaaaaatacggggctgaactacccttggaattaaaccctctattaaggccccgcccctacccccgactgggcggggcctggtggcgcgtttactccccttccgcaaggggcgttccgcttccaggcccaaaccgcagcaggccgtactcaccccctcccgtgat

SEQ ID NO: 29976 - DNA, 1376 bp, Macaca Mulatta
  misc_feature (1)...(1376): n = A,T,C or G
gattgctctgaatgttgcaggaaaaggtgatagtttggcatcatgggatggtgttttagacttgccagaacagaacactattcacaaagattgcctgcagtttattgaccagctttcagtgccagaggagaaggcaacagaattacttttggatattgaatctgtaattaccttttattgtaaatcacgtaacattaaatatagcacatcccttagctggatacatctactcaaaccattggtgcatcttcaactgccacgcagcgatttatacaactgcttttatgccataatgaataagtacattcccaggnnnnnnnnnnnnnnnnnnnnnnnnnnnnnnnnnnnnnnnnnnnnnnnnnnnnnnnnnnnnnnnnnnnnnnnnnnnnnnnnnnnnnnnnnnnnnnnnnnnnnnnnnnnnnnnnnnnnnnnnnnnnnnnnnnnnnnnnnnnnnnnnnnnnnnnnnnnnnnnnnnnnnnnnnnnnnnnnnnnnnnnnnnnnnnnnnnnnnnnnnnnnnnnnnnnnnnnnnnnnnnnnnnnnnnnnnnnnnnnnnnnnnnnnnnnnnnnnnnnnnnnnnnnnnnnnnnnnnnnnnnnnnnnnnnnnnnngttcttgcaaaatactccatccagtctgaatatagaagatatagaagaccttttctctctggctcagtattattgcagcaaaacaccagcttctnnnnnnnnnnnnnnnnnnnnnnnnnnnnnnnnnnnnnnnnnnnnnnnnnnnnnnnnnnnnnnnnnnnnnnnnnnnnnnnnnnnnnnnnnnnnnnnnnnnnnnnnnnnnnnnnnnnnnnnnnnnnnnnnnnnnnnnnnnnnnnnnnnnnnnnnnnnnnnnnnnnnnnnnnnnnnnnnnnnnnnnnnnnnnnnnnnnnnnnnnnnnnnnnnnnnnnnnnnnnnnnnnnnnnnnnnnnnnnnnnnnnnnnnnnnnnnnnnnnnnnnnnnnnnnnnnnnnnnnnnnnnnnnnnnnnnnnnnnnnnnnnnnnnnnnnnnnnnnnnnnnnnnnnnnnnnnnnnnnnnnnnnnnnnnnnnnnnnnnnnnnnnnnnnnnnnnnnnnnnnnnnnnnnnnnnnnnnnnnnnnnnnnnnnnnnnnnnnnnnnnnnnnnnnnnnnnnnnnnnnnnnnnnnnnnnnnnnnnnnnnnnnnnnnnnnnnnnnnnnnnnnnnnnnnnnnnnnnnnnnnnnnnnnnnnnnnnnnnnnnnnnnnnnnnnnnnnnnnnnnnnnnnggtgaatctcctaatggctcaaatgatagaggaatgaaatcactagtaaataaaatgaccgtggctttgaagacaaaatccgttaatgtcaaggaaaaagtaatcagttttatagagaatacatcaac

SEQ ID NO: 29977 - DNA, 1091 bp, Macaca Mulatta
  misc_feature (1)...(1091): n = A,T,C or G
gcctaaagtcttgcatgactcagtggatagatgttattcaactcctaccagttatcttgaactgtctgattcatgccagccctacagaagtgccttttactcattggaaaaacagcatgttggcttggnnnnnnnnnnnnnnnnnnnnnnnnnnnnnnnnnnnnnnnnnnnnnnnnnnnnnnnnnnnnnnnnnnnnnnnnnnnnnnnnnnnnnnnnnnnnnaagagcctaaagtcttgcatgactcagtggatagatgttattcaactcctaccagttatcttgaactgtctgattcatgccagccctacagaagtgccttttactcattggaaaaacagcatgttggcttggttcttgnnnnnnnnngaattaaaaaggaccaagaagaggaagaagacgaaagcccaccatgccccaggnnnnnnnnnnnnnnnnnnnnnnnnnnagagcctaaagtcttgcatgactcagtggatagatgttattcaactcctaccagttatcttgaactgtctgattcatgccagccctacagaagtgccttttactcattggaaaaacagcatgttggcttnnnnnnnnnnnnnnnnnnnnnnnnnnnnnnnnnnnnnnnnnnnnnnnnnnnnnnnnnnnnnnnnnnnnnnnnnnnnnnnnnnnnnnnnnnnnnnnnnnnnnnnnnnnnnnnnnnnnnnnnnnnnnnnnnnnnnnnnnnnnnnnnnnnnnnnnnnnnnnnnnnnnnnnnnnnnnnnnnnnnnnnnnnnnnnnnnnnnnnnnnnnnnnnnnnnnnnnnnnnnnnnnnnnnnnnnnnnnnnnnnnnnnnnnnnnnnnnnnnnnnnnnnnnnnnnnnnnnnnnnnnnnnnnnnnnnnnnnnnnnnnnnnnnnnnnnnnnnnnnnnnnnnnnnnnnnnnnnnnnnnnnnnnnnnnnnnnnnnnnnngcccttactgagctgagagatgtcactgccacagggaggacctataggtgtatgtaggttataaggaaactctagttccagttggaagcccagacataggatgggccagtgagcatggctctactcctagtctccagccatgtctgtggcaacc

SEQ ID NO: 29978 - DNA, 445 bp, Macaca Mulatta
  misc_feature (1)...(445): n = A,T,C or G
ttacactgcactgtggacattctacttccagtttgactgataacagtatgtgtaaagtgtttcatcggtttgcaaagtacttctcacatacaacattgagccgtagctaatactttctcatcagttcaacatctttaaagtaagtggagttgttaagtaatctgtggttaaggacattgtgcttgtcttctgcaccatgtgcttgttaccatgtggcagcttctgcaccacagagctcttctgtagaaagtaggttactcctaaagcctctggcagcaggggccacaccttctcaatgggccacaggtactttgggtttcctggagctgcaaaagnntactcaaacccatgcaacagctgtactaaagaagaagaatcacttttcttttgttccactgtgcgtgtgcatgcacacccaggggggcacagtcattccattgtggca

SEQ ID NO: 29979 - DNA, 579 bp, Macaca Mulatta
tatttaagtccttcccaggccatgccccaccctctttgtattaaaagcctcctcttttgggccttgtctcttgtagcttcttgggggagtgggggtgggagtgcatcagggactgggtgggaggtggcctggggagggacaggactccagcagtctcctagctctgcccctctgctagcctgagggctgttatccttttccaaagaacttgggatggagacctcaactggcttctggctcctggtccctgtgtgtcctgcacgacctcatcaggctagctgcctaccactgctctggggtggttggggtcagaagctactcacccctcagctcagaagccatggcttgtaagggctggcgcaggggtcaggactgggctttagacagtggacctgcatgtcaaactggcttggcttcctctcccaggtcaggtcaggaagctggaggggacagactgcctctgaggtatggggatcgggagtgggagtgtgagtgggaccctgcactgtgggcttactgtttggagacagggatccaagttgggaagagctccgtctttggtctgaatgtcagaaccag

SEQ ID NO: 29980 - DNA, 5875 bp, Macaca Mulatta
  misc_feature (1)...(5875): n = A,T,C or G
aggaaaggggtccccggactctggggttctcagcacctgcggtcgcaaaccaacctcatgccctgaccttaccaggcgtcgggactctgacttaaccagggaaggagggacttggtctggcggcannnnnnnnnnnnnnnnnnnnnnnnnnnnnnnnnnnnnnnnnnnnnnnnnnnnnnnnnnnnnnnnnnnnnnnnnnnnnnnnnnnnnnnnnnnnnnnnnnnnnnnnnnnnnnnnnnnnnnnnnnnnnnnnnnnnnnnnnnnnnnnnnnnnnnnnnnnnnnnnnnnnnnnnnnnnnnnnnnnnnnnnnnnnnnnnnnnnnnnnnnnnnnnnnnnnnnnnnnnnnnnnnnnnnnnnnnnnnnnnnnnnnnnnnnnnnnnnnnnnnnnnnnnnnnnnnnnnnnnnnnnnnnnnnnnnnnnnnnnnnnnnnnnnnnnnnnnnnnnnnnnnnnnnnnnnnnnnnnnnnnnnnnnnnnnnnnnnnnnnnnnnnnnnnnnnnnnnnnnnnnnnnnnngatgcagagtctgtacgcgtttgatgaggaggagacggacatgaggaaccaagtcgtggaagacctgaagacggccctccggacacagcctatgaggnnnnnnnnnnnnnnnnnnnnnnnnnnnnnnnnnnnnnnnnnnnnnnnnnnnnnnnnnnnnnnnnnnnnnnnnnnnnnnnnnnnnnnnnnnnnnnnnnnnnnnnnnnnnnnnnnnnnnnnnnnnnnnnnnnnnnnnnnnnnnnnnnnnnnnnnnnnnnnnnnnnnnnnnnnnnnnnnnnnnnnnnnnnnnnnnnnnnnnnnnnnnnnnnnnnnnnnnnnnnnnnnnnnnnnnnnnnnnnnnnnnnnnnnnnnnnnnnnnnnnnnnnnnnnnnnnnnnnnnnnnnnnnnnnnnnnnnnnnnnnnnnnnnnnnnnnnnnnnnnnnnnnnnnnnnnnnnnnnnnnnnnnnnnnnnnnnnnnnnnnnnnnnnnnnnnnnnnnnnnnnnnnnnnnnnnnnnnnnnnnnnnnnnnnnnnnnnnnnnnnnnnnnnnnnnnnnnnnnnnnnnnnnnnnnnnnnnnnnnnnnnnnnnnnnnnnnnnnnnnnnnnnnnnnnnnnnnnnnnnnnnnnnnnnnnnnnnnnnnnnnnnnnnnnnnnnnnnnnnnnnnnnnnnnnnnnnnnnnnnnnnnnnnnnnnnnnnnnnnnnnnnnnnnnnnnnnnnnnnnnnnnnnnnnnnnnnnnnnnnnnnnnnnnnnnnnnnnnnnnnnnnnnnnnnnnnnnnnnnnnnnnnnnnnnnnnnnnnnnnnnnnnnnnnnnnnnnnnnnnnnnnnnnnnnnnnnnnnnnnnnnnnnnnnnnnnnnnnnnnnnnnnnnnnnnnnnnnnnnnnnnnnnnnnnnnnnnnnnnnnnnnnnnnnnnnnnnnnnnnnnnnnnnnnnnnnnnnnnnnnnnnnnnnnnnnnnnnnnnnnnnnnnnnnnnnnnnnnnnnnnnnnnnnnnnnnnnnnnnnnnnnnnnnnnnnnnnnnnnnnnnnnnnnnnnnnnnnnnnnnnnnnnnnnnnnnnnnnnnnnnnnnnnnnnnnnnnnnnnnnnnnnnnnnnnnnnnnnnnnnnnnnnnnnnnnnnnnnnnnnnnnnnnnnnnnnnnnnnnnnnnnnnnnnnnnnnnnnnnnnnnnnnnnnnnnnnnnnnnnnnnnnnnnnnnnnnnnnnnnnnnnnnnnnnnnnnnnnnnnnnnnnnnnnnnnnnncaggccctgtatcttccccaccaccccctgggggttttttcaccttgtcttcctcaatgacaaccaatgacctgcctccaccccctcctcctctgcccttcgcctgttgtccccctccgccaccaccaccccttcctcctgggggacccccgactcccccaggtgccccaccttgcctcggtatgtgcctgcccctccctcatgacccctaccccagnnnnnnnnnnnnnnnnnnnnnnnnnnnnnnnnnnnnnnnnnnnnnnnnnnnnnnnnnnnnnnnnnnnnnnnnnnnnnnnnnnnnnnnnnnnnnnnnnnnnnnnnnnnnnnnnnnnnnnnnnnnnnnnnnnnnnnnnnnnnnnnnnnnnnnnnnnnnnnnnnnnnnnnnnnnnnnnnnnnnnnnnnnnnaggagctgataactaatccttctcagcannnnnnnnnnnnnnnnnnnnnnnnnnnnnnnnnnnnnnnnnnnnnnnnnnnnnnnnnnnnnnnnnnnnnnnnnnnnnnnnnnnnnnnnnnnnnnnnnnnnnnnnnnnnnnnnnnnnnnnnnnnnnnnnnnnnnnnnnnnnnnnnnnnnnnnnnnnnnnnnnnnnnnnnnnnnnnnnnnnnnnnnnnnnnnnnnnnnnnnnnnnnnnnnnnnnnnnnnnnnnnnnnnnnnnnnnnnnnnnnnnnnnnnnnnnnnnnnnnnnnnnnnnnnnnnnnnnnnnnnnnnnnnnnnnnnnnnnnnnnnnnnnnnnnnnnnnnnnnnnnnnnnnnnnnnnnnnnnnnnnnnnnnnnnnnnnnnnnnnnnnnnnnnnnnnnnnnnnnnnnnnnnnnnnnnnnnnnnnnnnnnnnnnnnnnnnnnnnnnnnnnnnnnnnnnnnnnnnnnnnnnnnnnnnnnnnnnnnnnnnnnnnnnnnnnnnnnnnnnnnnnnnnnnnnnnnnnnnnnnnnnnnnnnnnnnnnnnnnnnnnnnnnnnnnnnnnnnnnnnnnnnnnnnnnnnnnnnnnnnnnnnnnnnnnnnnnnnnnnnnnnnnnnnnnnnnnnnnnnnnnnnnnnnnnnnnnnnnnnnnnnnnnnnnnnnnnnnnnnnnnnnnnnnnnnnnnnnnnnnnnnnnnnnnnnnnnnnnnnnnnnnnnnnnnnnnnnnnnnnnnnnnnnnnnnnnnnnnnnnnnnnnnnnnnnnnnnnnnnnnnnnnnnnnnnnnnnnnnnnnnnnnnnnnnnnnnnnnnnnnnnnnnnnnnnnnnnnnnnnnnnnnnnnnnnnnnnnnnnnnnnnnnnnnnnnnnnnnnnnnnnnnnnnnnnnnnnnnnnnnnnnnnnnnnnnnnnnnnnnnnnnnnnnnnnnnnnnnnnnnnnnnnnnnnnnnnnnnnnnnnnnnnnnnnnnnnnnnnnnnnnnnnnnnnnnnnnnnnnnnnnnnnnnnnnnnnnnnnnnnnnnnnnnnnnnnnnnnnnnnnnnnnnnnnnnnnnnnnnnnnnnnnnnnnnnnnnnnnnnnnnnnnnnnnnnnnnnnnnnnnnnnnnnnnnnnnnnnnnnnnnnnnnnnnnnnnnnnnnnnnnnnnnnnnnnnnnnnnnnnnnnnnnnnnnnnnnnnnnnnnnnnnnnnnnnnnnnnnnnnnnnnnnnnnnnnnnnnnnnnnnnnnnnnnnnnnnnnnnnnnnnnnnnnnnnnnnnnnnnnnnnnnnnnnnnnnnnnnnnnnnnnnnnnnnnnnnnnnnnnnnnnnnnnnnnnnnnnnnnnnnnnnnnnnnnnnnnnnnnnnnnnnnnnnnnnnnnnnnnnnnnnnnnnnnnnnnnnnnnnnnnnnnnnnnnnnnnnnnnnnnnnnnnnnnnnnnnnnnnnnnnnnnnnnnnnnnnnnnnnnnnnnnnnnnnnnnnnnnnnnnnnnnnnnnnnnnnnnnnnnnnnnnnnnnnnnnnnnnnnnnnnnnnnnnnnnnnnnnnnnnnnnnnnnnnnnnnnnnggaaggcctcaggccagctaaccccaggctgaaggggccctgttccccatcccctaccatgggcacccatgtgctagcacagaacagttccagatctcgactggagaggtccacagccttgtccagatttcctgtgcagcatgatggagggagcccctgagagggaatctggtgagggaatccagactcctgtctctcaaagggaggctcaacagaacattgacctaggggcaaactttcctcttgaacggaaacagaggaggcattatatattctagttagatcagctctggtaggttccagaaaacagtcaatgttggaaggatgatgcagggaccaaagacatcaggacagagtaacaatgtctgtttcccaggtcctctggcctctccctgtatgtcttaagtctctcccccttccttctctaccctcactgccatcctgtctactaatccacannnnnnnnnnnnnnnnnnnnnnnnnnnnnnnnnnnnnnnnnnnnnnnnnnnnnnnnnnnnnnnnnnnnnnnnnnnnnnnnnnnnnnnnnnnnnnnnnnnnnnnnnnnnnnnnnnnnnnnnnnnnnnnnnnnnnctcctggacacctggccattgttgtgaagccagacagtgacctcaaatgttgccttggagtcccctatagcccctcagcagagggcagcacttgaatgcttagctccatcccacagctctctatttaatataaattgctcaggccttcccaccccttctctaacaccagcctcaaggcnnnnnnnnnnnnnnnnnnnnnnnnnnnnnnnnnnnnnnnnnnnnnnnnnnnnnnnnnnnnnnnnnnnnnnnnnnnnnnnnnnnnnnnnnnnnnnnnnnnnnnnnnnnnnnnnnnnnnnnnnnnnnnnnnnnnnnnnnnnnnnnnnnnnnnnnnnnnnnnnnnnnnnnnnnnnnnnnnnnnnnnnnnnnnnnnnnnnnnnnnnnnnnnnnnnnnnnnnnnnnnnnnnnnnnnnnnnnnnnnnnnnnnnnnnnnnnnnnnnnnnnnnnnnnnnnnnnnnnnnnnnnnnnnnnnnnnnnnnnnnnnnnnnnnnnnnnnnnnnnnnnnnnnnnnnnnnnnnnnnnnnnnnnnnnnnnnnnnnnnnnnnnnnnnnnnnnnnnnnnnnnnnnnnnnnnnnnnnnnnnnnnnnnnnnnnnnnnnnnnnnnnnnnnnnnnnnnnnnnnnnnnnnnnnnnnnnnnnnnnnnnnnnnnnnnnnnnnnnnnnnnnnnnnnnnnnnnnnnnnnnnnnnnnnnnnnnnnnnnnnnnnnnnnnnnnnnnnnnnnnnnnnnnnnnnnnnnnnnnnnnnnnnnnnnnnnnnnnnnnnnnnnnnnnnnnnnnnnnnnnnnnnnnnnnnnnnnnnnnnnnnnnnnnnnnnnnnnnnnnnnnnnnnnnactcctggggctgggaccgtagtgtagctgtgggggaagaaacacagggtcggcgagtccagcatgtgcgttggtttgagggggtgggtggcgcgtgtgttctggtgggagggatctgagcaagtgcaagcctggctgacacaggtgtgaagaggccatcctggaacccaggtgagggcaagataaaggcttccaggcagaacagctgcacagagtttggctatacccatctgcacccccaagagctcccactgcaagacaggtgttggggaagatgggaggttgtgggtgaggcctctaaaggtcctctcccaaaccggccaagctgtcaacctaaccccccaaaggggcagggaacaggggatggctccacaagcatgtctggcattcccacccaccatggaagactggatacacacctgagaagacagggacaatggaagctgttcaagacacatttgatcttcagaaaagcagaatttggttcaagtgagacagaggacacaaatnnnnnnnnnnnnnnnnnnnnnnnnnnnnnnnnnnnnnnnnnnnnnnnnnnnnnnnnnnnnnnnnnnnnnnnnnnnnnnnnnnnnnnnnnnnnnnnnnnnnnnnnnnnnnnnnnnnnnnnnnnnnnnnnnnnnnnnnnnnnnnnnnnnnnnnnnnnnnnnnnnnnnnnnnnnnnnnnnnnnnnnnnnnnnnnnnnnnntgtttcttggtcttgcttttttcatgcccttccccaccgctcctgccacctttagataagtttctccagctaattttgtggccaacgtaaaatt

SEQ ID NO: 29981 - DNA, 230 bp, Macaca Mulatta
ggttcgaggggaattgctgcgggagagagtgcagcggctggaggcacaggagggaggctttgcacagtcgcttgttgctctgcagttccagaaggcggcccgggtgaccgagaccctgtcagcctacaccgccctcctcagcatccaggacttgctcctggaagagctaagtgcgtctgagatgctgaccaagtcggcctgcacgcagatcctggaatcgcacagccggg

SEQ ID NO: 29982 - DNA, 2555 bp, Macaca Mulatta
  misc_feature (1)...(2555): n = A,T,C or G
ctgttgcactgcctacaagccttagcctatctactcctcagccaacagcacaaataactgtatcatatccaacaccaaggtccagtcaacagcaaacccagcctcagaagcagcgtgttttcacaggggtggttacaaaactacatgatacatttggatttgtggatgaagatgtattctttcagcttannnnnnnnnnnnnnnnnnnnnnnnnnnnnnnnnnnnnnnnnnnnnnnnnnnnnnnnnnnnnnnnnnnnnnnnnnnnnnnnnnnnnnnnnnnnnnnnnnnnnnnnnnnnnnnnnnnnnnnnnnnnnnnnnnnnnnnnnnnnnnnnnnnnnnnnnnnnnnnnnnnnnnnnnnnnnnnnnnnnnnnnnnnnnnnnnnnnnnnnnnnnnnnnnnnnnnnnnnnnnnnnnnnnnnnnnnnnnnnnnnnnnnnnnnnnnnnnnnnnnnnnnnnnnnnnnnnnnnnnnnnnnnnnnnnnnnnnnnnnnnnnnnnnnnnnnnnnnnnnnnnnnnnnnnnnnnnnnnnnnnnnnnnnnnnnnnnnnnnnnnnnnnnnnnnnnnnnnnnnnnnnnnnnnnnnnnnnnnnnnnnnnnnnnnnnnnnnnnnnnnnnnnnnnnnnnnnnnnnnnnnnnnnnnnnnnnnnnnnnnnnnnnnnnnnnnnnnnnnnnnnnnnnnnnnnnnnnnnnnnnnnnnnnnnnnnnnnnnnnnnnnnnnnnnnnnnnnnnnnnnnnnnnnnnnnnnnnnnnnnnnnnnnnnnnnnnnnnnnnnnnnnnnnnnnnnnnnnnnnnnnnnnnnnnnnnnnnnnnnnnnnnnnnnnnnnnnnnnnnnnnnnnnnnnnnnnnnnnnnnnnnnnnnnnnnnnnnnnnnnnnnnnnnnnnnnnnnnnnnnnnnnnnnnnnnnnnnnnnnnnnnnnnnnnnnnnnnnnnnnnnnnnnnnnnnnnnnnnnnnnnnnnnnnnnnnnnnnnnnnnnnnnnnnnnnnnnnnnnnnnnnnnnnnnnnnnnnnnnnnnnnnnnnnnnnnnnnnnnnnnnnnnnnnnnnnnnnnnnnnnnnnnnnnnnnnnnnnnnnnnnnnnnnnnnnnnnnnnnnnnnnnnnnnnnnnnnnnnnnnnnnnnnnnnnnnnnnnnnnnnnnnnnnnnnnnnnnnnnnnnnnnnnnnnnnnnnnnnnnnnnnnnnnnnnnnnnnnnnnnnnnnnnnnnnnnnnnnnnnnnnnnnnnnnnnnnnnnnnnnnnnnnnnnnnnnnnnnnnnnnnnnnnnnnnnnnnnnnnnnnnnnnnnnnnnnnnnnnnnnnnnnnnnnnnnnnnnnnnnnnnnnnnnnnnnnnnnnnnnnnnnnnnnnnnnnnnnnnnnnnnnnnnnnnnnnnnnnnnnnnnnnnnnnnnnnnnnnnnnnnnnnnnnnnnnnnnnnnnnnnnnnnnnnnnnnnnnnnnnnnnnnnnnnnnnnnnnnnnnnnnnnnnnnnnnnnnnnnnnnnnnnnnnnnnnnnnnnnnnnnnnnnnnnnnnnnnnnnnnnnnnnnnnnnnnnnnnnnnnnnnnnnnnnnnnnnnnnnnnnnnnnnnnnnnnnnnnnnnnnnnnnnnnnnnnnnnnnnnnnnnnnnnnnnnnnnnnnnnnnnnnnnnnnnnnnnnnnnnnnnnnnnnnnnnnnnnnnnnnnnnnnnnnnnnnnnnnnnnnnnnnnnnnnnnnnnnnnnnnnnnnnnnnnnnnnnnnnnnnnnnnnnnnnnnnnnnnnnnnnnnnnnnnnnnnnnnnnnnnnnnnnnnnnnnnnnnnnnnnnnnnnnnnnnnnnnnnnnnnnnnnnnnnnnnnnnnnnnnnnnnnnnnnnnnnnnnnnnnnnnnnnnnnnnnnnnnnnnnnnnnnnnnnnnnnnnnnnnnnnnnnnnnnnnnnnnnnnnnnnnnnnnnnnnnnnnnnnnnnnnnnnnnnnnnnnnnnnnnnnnnnnnnnnnnnnnnnnnnnnnnnnnnnnnnnnnnnnnnnnnnnnnnnnnnnnnnnnnnnnnnnnnnnnnnnnnnnnnnnnnnnnnnnnnnnnnnnnnnnnnnnnnnnnnnnnnnnnnnnnnnnnnnnnnnnnnnnnnnnnnnnnnnnnnnnnnnnnnnnnnnnnnnnnnnnnnnnnnnnnnnnnnnnnnnnnnnnnnnnnnnnnnnnnnnnnnnnnnnnnnnnnnnnnnnnnnnnnnnnnnnnnnnnnnnnnnnnnnnnnnnnnnnnnnnnnnnnnnnnnnnnnnnnnnnnnnnnnnnnnnnnnnnnnnnnnnnnnnnnnnnnnnnnnnnnnnnnnnnnnnnnnnnnnnnnnnnnnnnnnnnnnnnnnnnnnnnnnnnnnnnnnnnnnnnnnnnnnnnnnnnnnnnnnnnnnnnnnnnnnnnnnnnnnnnnnnnnnnnnnnnnnnnnnnnnnnnnnnnnnnnnnnnnnnnnnnaggaaaaagaaaagacgcaaatgatcacagttaacagagatctgttaatggcttttgtttattttgatcaaagtcattgtggttaccttcttgaaaaggatttggaagaaatactttatactcttggactacatctttctcgggctcaggta

SEQ ID NO: 29983 - DNA, 2015 bp, Macaca Mulatta
  misc_feature (1)...(2015): n = A,T,C or G
aggagggcaacgccgggacacactgggtgcctgtctccggggtgccctgaccaccctgcccgctggtctgagtggcttggcccatctggcccacctggacctgagcttcaacaacctggagacgctgccggcctgtgtcctgcggatgcgaggtctgggtgcactcttgctgtctcacnnnnnnnnnnnnnnnnnnnnnnnnnnnnnnnnnnnnnnnnnnnnnnnnnnnnnnnnnnnnnnnnnnnnnnnnnnnnnnnnnnnnnnnnnnnnnnnnnnnnnnnnnnnnnnnnnnnnnnnnnnnnnnnnnnnnnnnnnnnnnnnnnnnnnnnnnnnnnnnnnnnnnnnnnnnnnnnnnnnnnnnnnnnnnnnnnnnnnnnnnnnnnnnnnnnnnnnnnnnnnnnnnnnnnnnnnnnnnnnnnnnnnnnnnnnnnnnnnnnnnnnnnnnnnnnnnnnnnnnnnnnnnnnnnnnnnnnnnnnnnnnnnnnnnnnnnnnnnnnnnnnnnnnnnnnnnnnnnnnnnnnnnnnnnnnnnnnnnnnnnnnnnnnnnnnnnnnnnnnnnnnnnnnnnnnnnnnnnnnnnnnnnnnnnnnnnnnnnnnnnnnnnnnnnnnnnnnnnnnnnnnnnnnnnnnnnnnnnnnnnnnnnnnnnnnnnnnnnnnnnnnnnnnnnnnnnnnnnnnnnnnnnnnnnnnnnnnnnnnnnnnnnnnnnnnnnnnnnnnnnnnnnnnnnnnnnnnnnnnnnnnnnnnnnnnnnnnnnnnnnnnnnnnnnnnnnnnnnnnnnnnnnnnnnnnnnnnnnnnnnnnnnnnnnnnnnnnnnnnnnnnnnnnnnnnnnnnnnnnnnnnnnnnnnnnnnnnnnnnnnnnnnnnnnnnnnnnnnnnnnnnnnnnnnnnnnnnnnnnnnnnnnnnnnnnnnnnnnnnnnnnnnnnnnnnnnnnnnnnnnnnnnnnnnnnnnnnnnnnnnnnnnnnnnnnnnnnnnnnnnnnnnnnnnnnnnnnnnnnnnnnnnnnnnnnnnnnnnnnnnnnnnnnnnnnnnnnnnnnnnnnnnnnnnnnnnnnnnnnnnnnnnnnnnnnnnnnnnnnnnnnnnnnnnnnnnnnnnnnnnnnnnnnnnnnnnnnnnnnnnnnnnnnnnnnnnnnnnnnnnnnnnnnnnnnnnnnnnnnnnnnnnnnnnnnnnnnnnnnnnnnnnnnnnnnnnnnnnnnnnnnnnnnnnnnnnnnnnnnnnnnnnnnnnnnnnnnnnnnnnnnnnnnnnnnnnnnnnnnnnnnnnnnnnnnnnnnnnnnnnnnnnnnnnnnnnnnnnnnnnnnnnnnnnnnnnnnnnnnnnnnnnnnnnnnnnnnnnnnnnnnnnnnnnnnnnnnnnnnnnnnnnnnnnnnnnnnnnnnnnnnnnnnnnnnnnnnnnnnnnnnnnnnnnnnnnnnnnnnnnnnnnnnnnnnnnnnnnnnnnnnnnnnnnnnnnnnnnnnnnnnnnnnnnnnnnnnnnnnnnnnnnnnnnnnnnnnnnnnnnnnnnnnnnnnnnnnnnnnnnnnnnnnnnnnnnnnnnnnnnnnnnnnnnnnnnnnnnnnnnnnnnnnnnnnnnnnnnnnnnnnnnnnnnnnnnnnnnnnnnnnnnnnnnnnnnnnnnnnnnnnnnnnnnnnnnnnnnnnnnnnnnnnnnnggtggatgccacccttcggcgtttgctggagcggtaccggggccccgagccctctgacacggtggagatgttcgagggcgaagagttctttgcggccttcgagcgcggcatcgacgtggatgctgngaccgccctgactgcgtggagggcagaatctgctttgtcttctactcgcacctgaagaatgtgaaggaggtatacgtgactaccactctggaccgggaggcccaggctgtgcggggccaggtgncaggtgtccttctaccgtggcacggtgcctgtgcaggtacccgaggaggctgaggctgcccggcagaggaagggcgcagacgccctgtggatggccactctgcccatcaagctgccg

SEQ ID NO: 29984 - DNA, 342 bp, Macaca Mulatta
  misc_feature (1)...(342): n = A,T,C or G
tttctaaaatcacttttcagaggaaacatattttacccatgttctcagaggaacatttttacccagacataagtggttttgtcggctatgggaaatggtttgtgatctggtgtgggtcttgaagcattggaccttgtctgcagtatctttaatttcgttantctcgctttgcctgcatatctacagcctcgaggacctttcagttgtcagtgacccagggaattctgtcagctagctgagatgttgtctcttcctgtgagtgcaacatttagtcagacctgtctgaagccctcccctccctgtaccccnggaatgagacccttactattagacatggcccaa

SEQ ID NO: 29985 - DNA, 1646 bp, Macaca Mulatta
  misc_feature (1)...(1646): n = A,T,C or G
ttaattcagtgcacaaatgagatgaatgtgaacatcccacagttggcagacagtttatttgaaagaactactaacagtagttgggtggtggtcttcaaatctctcattacgactcatcatttgatggtgtatggaaatgagnagcgttttattcagtatttggcttcaagaaacacgttgtttaacttaagcaattttttggataaaagtggattgcaaggnaggatatgacatgtctacatttattaggcggtatagtagatatttaaatgaaaaagcagtttcatacagacaagttgcatttgatttcacaaaagtgaagagagggngggctgatggagttatgagaacaatgaacacagaaaaactccttaaaactgtaccaattattcagaatcaaatggatgcacttcttgattttaatgtngttaatagcaatgaacttacaaatggggtaataaatgctgccttcatgctcctgttcaaagatgccattagactgtttgcagcatacaatgaaggaattattaatttgttggnnnnnnnnnnnnnnnnnnnnnnnnnnnnnnnnnnnnnnnnnnnnnnnnnnnnnnnnnnnnnnnnnnnnnnnnnnnnnnnnnnnnnnnnnnnnnnnnnnnnnnnnnagcaagttggaattgacagaggtgatataccagacctttcacaggncaggcccccagcagtcttcttgatgctttggaacaacacttagcttccttggaaggaaagaaaatcaaagatctacagctnnnnnnnnnnnnnnnnnnnnnnnnnnnnnnnnnnnnnnnnnnnnnnnnnnnnnnnnnnnnnnnnnnnnnnnnnnnnnnnnnnnnnnnnnnnnnnnnnnnnnnnnnnnnnnnnnnnnnnnnnnnnnnnnnnnnnnnnnnnnnnnnnnnnnnnnnnnnnnnnnnnnnnnnnnnnnnnnnnnnnnnnnnnnnnnnnnnnnnnnnnnnnnnnnnnnnnnnnnnnnnnnnnnnnnnnnnnnnnnnnnnnnnnnnnnnnnnnnnnnnnnnnnnnnnnnnnnnnnnnnnnnnnnnnnnnnnnnnnnnnnnnnnnnnnnnnnnnnnnnnnnnnnnnnnnnnnnnnnnnnnnnnnnnnnnnnnnnnnnnnnnnnnnnnnnaggattcactccttctccagttgcacagccacacccttcagctggccttaatgtggactttgaatctgtatttggaaataaatctacaaatgttattgtagattctgggggnnnnnnnnnnnnnnnnnnnnnnnnnnnnnnnnnnnnnnnnnnnnnnnnnnnnnnnnnnnnnnnnnnnnnnnnnnnnnnnnnnnnnnnnnnnnnnnnnnnnnnnnnnnnnnnnnnnnnnnnnnnnnnnnnnnnnnnnnnnnnnnnnnnnnnnnnnnnnnnnnntgatgtaaattggacccaaccaggggaaaaaaattaactggaggaactaactgggaaacaaaagttgccccaacaactggttggaatgnnnnnnnnnnnnnnnnnnnnnnnnnnnnnnnnnnnncctccacaaatgggaagtgtccctgtaatgacgcaaccaaccttaatatacagccagcctgtcatgagaccaccaaacccctttggccctgtatcaggagcacaggta

SEQ ID NO: 29986 - DNA, 83 bp, Macaca Mulatta
agactctgatcaaaataatagatccgaatgacctacgacatgacattgatagaaggcgaaaagattggttacagaatgaagat

SEQ ID NO: 29987 - DNA, 274 bp, Macaca Mulatta
cagaatttctgaactagaggaactatacagcctgctttccatatcagagcattcaacccaatgtgattcactgccataatctccatgttatgattttaagccaggcttctcttcacctttcctattcctttcatttaaagactccaaagcttgtttactgagcacagatcttggaaaacaggatcttcagacttgggaaagcatgacagtaggtgatggaagggtaaagactcagactagcatctagtagtctcactacacatggatagtaatg

SEQ ID NO: 29988 - DNA, 261 bp, Macaca Mulatta
gcagagaattacctgttccagggacggcaggaatgctacgcgtttaacgggacacagcgctacctggagagatacatctacaaccgggaggagttcgcgcgctttgacagtgacgtgggggagttccgggcggtgacagagctgggacggcctaatgcggaatactgcaacagccagaaggacatcctggaggagatgcgggcagtggtggacacgatgtgcagacacaactacgagctggacgaggccgtgaccctgcag

SEQ ID NO: 29989 - DNA, 405 bp, Macaca Mulatta
aagtgaagacgatgaaaacgaagaaaggccacaagccacgaatgaagaaaagactgctgcagaagattcagaggaagctcctctaagcggtggactgcaaacccaatcatgcgacccttagaattctgataccggcttcacccttgcaattgtttgtgaatatacgacgcttagaagatatctgcttcacccttgcaattgtttgtgaaatacaaaccttgttactgtaatacactgcttcttgttttctgtagcgcatgcgtcgagtgctaaattacttaaattgtaatgcagaattgaatggtaatcttagagagtaatagattaagtgggaaatgcctgcttgatgttgttgtaattatttatcacaaatacagatcctgatattgcttttaattttataat

SEQ ID NO: 29990 - DNA, 92 bp, Macaca Mulatta
aggtcaaagaaattgtctgttccagcctcagtggtgtccaggataatgggaagaggaggatgcaacatcactgcaatacgagaagttactgg

SEQ ID NO: 29991 - DNA, 308 bp, Macaca Mulatta
  misc_feature (1)...(308): n = A,T,C or G
accccaatttctggagctgcagccgtcccgcgccccacccaaggtgggcaccttcccctcctgtgcccagggcggtgggcgtggtgtccacctgcccctcccggtgcccacggtggatactgcatgatgtgaaccttggttttgaactctgttcctgcccctccccgaccgccctggcctgtgcccgccccgtgcctgctgtggctggtgnggtggcggtggtggggnccgggtgggcccccgcccagcacctgctggaatgagaagcacagactccgccacggactcccttttccctccctcctccg

SEQ ID NO: 29992 - DNA, 144 bp, Macaca Mulatta
tgtgtgtggcggcgtcctgactggcctgtcgggggtcctcaccagccctgagtaccccaacaactaccccaacagcatggagtgccactgggtgatccgggccgctggtcctgccagtgtcaagctggtgttcgtggacttcca

SEQ ID NO: 29993 - DNA, 1084 bp, Macaca Mulatta
  misc_feature (1)...(1084): n = A,T,C or G
ggggtgctttttcgttcttttactaggtcgttgctggctttttcgttctttagagtggtacgcgggtcccggtccgcgccagctccctgcgcgccttgtcgccatgcctcggaaaattgaggaaatcaaggactttctgctcacagcccgacgaaaggatgccaaatctgtcaagatcaagaaaaataaggacaatgtgaagtttaaagttcgatgcagcagatacctttacaccctggtcatcactgacaaagagaaggcagagaaactgaagcagtccctgccccctggtttggcagtgaaggaactgaaatgaaccagacacactgatttgaagtgtattaaaatactaaaaatcctaaaaaatacaaaaaaattcaaaagataacataccaaattgaatgtctaatagtaatccaacattaaaaacagtaaaatatatcaanacaacgnanagcgggccgggacatcagccctgaataataccataatattaaacatatagtctttaatttccttttgtggggcggccccctccgtgccatatatataaaaaatctttttcccatagaaaaaccttatttctcatttggcgagacccggaaagtcaacatatgggaagggtgttgtatcataagataatcgtggacaaatagataatctggagcttatgtcacaggaagagagaaaaacaaggccgttgtacaatattgcgcaaccatgcgtatattttgctttatttatctctctcctctctacttgagaaagaaaacacctctccccccgcggcggggtgtaattacacgtaatccaacggtattattatttatttcaacacataatactgcgcaggataataggcggtatatgctccgatccgagacgatcaaccctcttagctggggaagataccattcttcaactgaaagaaagggacggttgttgttacaggcagcgatatcgcgctggtaaaaaaaaatattataagagaatggaagtgatgtagccttgacctgtccaatatcttgtttcgcctcgcaatccctacgcacttgattatttatgtagagattatgataacgcc

SEQ ID NO: 29994 - DNA, 571 bp, Macaca Mulatta
tatcagagtcctcagcctgcaatttctgtcccacaaaggcccttcctggggcagcaggaaccccatgctcagcccctgcatctgcagtatcccaggagccccagaaaaccagtcttccctattctgggaggaacagtcatgcccaataagacagcaagggcagtgcagggaagactcttgcagttcagcagatgctcttcccaagacaacaggctactttccagcagttcccagggggaccaccagatgagctggttcagtgacctcaatcttggatgttcagagaaacatctatgcaatgaggcaggaaagaatttgctctatgacctgggttttgatagcagtgatgatgatggcttctgaccagcccacagttaatttattggtctcagctagaaagacaaattgcaggacatttgggctggccaagagcagaaagtccctgaagcctgccaaataccctagggtcagaggccctgctgaggtggggtcaatgggcacgaggggagggaaggtccagcactctgggtaccaggtgctgcccatgacaaggattaagtgcatccttatt

SEQ ID NO: 29995 - DNA, 356 bp, Macaca Mulatta
gtgcctgctgaaccctgaagccttgtctggctgcggaacaaggtgtagcaccctttgagattttttttcgagaagaccgatctgaaagttcagctcatgcccatctttcagtacaccaaggcaaagacaacatggggctagaactccagaaaggatgctgactctaagaggactcagccacccatctcagagagcacttcagggaatccagtaagggtcagaaaaggcagtgtgagctgatatttatctaatctaagagatgctagctcagatgccttcctggggcacacaagaatatgtataatagaaaagctgaaatgttatgatataaggcaactgacttccagccccagttt

SEQ ID NO: 29996 - DNA, 145 bp, Macaca Mulatta
ggagtcgagcgggtgctgctagcggaggcgccatattggaagggacaaaactccggcgacagcgagtgacacaaataaacccctggacccccttgttccctcagctctaagggccgcgatgttgtacctagaagactatctggaa

SEQ ID NO: 29997 - DNA, 279 bp, Macaca Mulatta
  misc_feature (1)...(279): n = A,T,C or G
atggcctggctctccttcacctgctgcatggcgtcagctgtcaccaccttcaacacgtacaccaggatggtgctggantgtttccctcggcagctgtcaagtgcagcccccaccacgggttctttgaccggctaccaccagtatcataatcagcccatccactctgtctctgagggagtcgacttctactctgagctgcggaacaagggatttcaacgagaggccagccaggagctgaaagaagcagttaggtcatctgtagaggaagagcagtgttag

SEQ ID NO: 29998 - DNA, 185 bp, Macaca Mulatta
cctggacagcctcagccgcaccctgggcgtcctagaggagcgcgtcaacagctcgaggcggagggcacgcaggcacgctgcggacgacgactacaacatcgaggtcctgctgggcgtggacgactctgtggtgcagttccacgggaaggagcacgtgcagaagtacctgctcacgctcatgaaca

SEQ ID NO: 29999 - DNA, 325 bp, Macaca Mulatta
atgtgtaggccttctattgtttgttggaatctgtatgtacaaagtgtaaataaatgtttcttttcgttatccttgcttgaatccatcaaaaatatgaattcaaagaactaaaatgatatgaaatggggtcataatttgaaactaaggaaaacattaagacacagcaaagagataaacaagaggtaacacatggctcaatggcagggttaatggttggaagtctgaggagcagaatgaaagggcagaatgagccacagcaatgtccctgcactgtggccatcctccaggaaaagctgctgctctgaagccacttttgcagagaaca

SEQ ID NO: 30000 - DNA, 180 bp, Macaca Mulatta
ggctttatatgtggcaaatcgctatgattactctgtggagtttactggtgttggggaaccaccagctggagctgaaaatgttggatactgtacccagataggaatcttccagaaaaacggaggaagggcaacagaagcatgtgtttcagagcagcatgatcagcatgtttataaagctgt

SEQ ID NO: 30001 - DNA, 624 bp, Macaca Mulatta
  misc_feature (1)...(624): n = A,T,C or G
tatgtacagaccagatgtcaccattttgcccagannnnnnnnnnnnnnnnnnnnnnnnncaatgtattttaattttaaaacaaccagacactcattcttatgaatgaataaacatttggaggtatataaagtaaaaagttaaagtctttcctgtaagttaacacaaatgtttactattgctaaaacctttacaggtagctctctagataattttcgatttttgtgtacatacttatacatacatgtaagtatataaacatttagaagtatacctatctaacaaaccatcatgaaatattttcaaatagatctattatactattttaaaagtctcaatagtagtgtgttatatagataaatcataacttttttcttttttattgtagcaaagatacataacataaaattgatcattttaaccatgtttaagtgtacagttcagtggcattaagtactatcataatatattttaatccttctcaccactggtggacattaaggaggttccaaaaaaattcatattataaaaacaaagttcaaacaaatgtctttgtacaagcatattatgcactcctgctggactatctgaaggataaatttgtaaatctagtattgctagattat

SEQ ID NO: 30002 - DNA, 658 bp, Macaca Mulatta
  misc_feature (1)...(658): n = A,T,C or G
cccctggcgaagcggtgccgcctccagcccagagatgccgccaagatgcccgagagtgcttggaagtttctcttctacctgggcagctggagctacagtgcctacctgctgtttggcaccgactaccccttcttccacgacccaccatctgtcttctacggactggacgccgggcatggcggtgccgcgggacatcgcagccgcctacctgctccagggaagcttctatggccactccatctacgccacgctgtacatggacacctggcgcaaggactcggtggtcatgctgctccatcacgtgtcactctcagcacatcgtctcctcctacgccttccggnngtaccacaatgtgggcatccttgtgctcttcctgcacgatatcagtgacgtgcagcttgagttcaccaagctcaacatttacttcaagtcccgcggtggctcctaccaccggctgcatgccctggcagcagacctgggctgcctcagcttcggcttcagctggtnnnggttctggttccgcctctactggttcccgctcaaggtcctgtacgccacttgtcactgcagtctgcgcgcggtgcctgacatccccttctacttcttcttcaatgcgctcctgctgctgctcaccctcatgaacctctactggttcct

SEQ ID NO: 30003 - DNA, 688 bp, Macaca Mulatta
tggaaagtgacctgcaccagatcatccactcctcacagcccctcacactggaacacgtgcgctacttcctgtaccaactgctgcggggcctgaagtacatgcactcggctcaggtcatccaccgtgacctcaagccctccaacctattggtgaatgagaactgtgagctcaagattggtgtctttggtatggctcgtggcctgtgcacctcgcccgctgaacatcagtacttcatgaccgagtatgtggccacgcgctggtaccgtgcccctgagctcatgctctctttgcatgagtatacacaggctattgacctttggtctgtgggctgcatctttggtgagatgctggcccggcgccagctcttcccgggcaaaaactatgtacaccagctacagctcatcatgatggtgctgggtaccccatcaccagccgtgattcaggctgtgggggctgagagggtgcgggcctatatccagagcttgccaccacgccagcctgtgccctgggagacagtgtacccaggtgccgaccgtcaggccctatcactcctgggtcgcatgctgcgttttgaagccagcgcccgcatctcatcagctgctgcccttcgccacccttttcctggccaagtaccttgatcctggagatgagcctgactgtgcccggccctttgactttgcctttgacg

SEQ ID NO: 30004 - DNA, 203 bp, Macaca Mulatta
agatgaatggtcatctccggttattgaatattgcctgtgctgcaaaggctaagtggagacaggttgtgctgcagaaggcttcccgcgagtcccctctacaattcagccttaatggaggaagtgagaagggatttggtatttttgttgaaggagtagaacctggtagcaaagctgctgattcaggactgaaacgtggtgatcag

SEQ ID NO: 30005 - DNA, 966 bp, Macaca Mulatta
tcttgtggttcaaataagcttttggctcacatctagccacatcataaagaacgctgtagaagaggtgacatgatgaggcgggaagaggaggaagaggagggagccatgatgaaggcaaaaggggacttggagatgaaggaagaggaagagattagtgagacaggagaactggttggcccttttgtgagtgctatgcccactccaacgccccacaacaagggcacccggttctctgaggcatgggagtatttccacctagcccctgctcgtgctgggcaccatcccaaccaatatgccacctgccgcctgtgtggcaggcaggtgagccgtggccctggggtcaatgtgggcaccacagcactgtggaagcatctgaaaagtatgcacagagaggagctggagaagagtggccatggtcaggccgggcagcgccaggatccaaggccccatgggccccagctccccacgggcattgagggtgactggggtaggctcctggagcaggtgggcacaatggctttgtgggccagccaaagggaaaaggaggtgcttaggagagaaatggcagtggaatggcgggagagggctgtggaaaaaagggaacgagccttggaggaggtggaaagggccatcctggagatgaagtggaaggtgagggctgagaaggaggtatgccagcaggagaaagagttgccggcagcagtacatgccttccattttgtttaaattgggcttggagaatctatcctgaaaacattgactctagacttgtacaaaagagccactttagtttcaactcaaatgtaaagcaaagtagtttagtgacattttgcttttatgtgaaatagtgcacagtatgagttaatctgagcaggtctgaattgaccagatgcttctctatgaggttactagagctctgctgacccttggccgaaactctaaaatgtacctattaaagataaatgc

SEQ ID NO: 30006 - DNA, 270 bp, Macaca Mulatta
ttcaggtacatacttcactcatgaagccaaaggagccgatgacgcagcagacgcagacacagctataatcaatgcagaaggaggacagaacaactctgaagaaaagaaagagtacttcatctagatcagcctttttgtttcaatgaggtgtccaactggccctatttagatgataaagagacagtgatattggaacttgcgagaaattcgtgtgttttttcatgaatgggtggaaaggtgtgagactgggaaggcttgggatttgctgtg

SEQ ID NO: 30007 - DNA, 824 bp, Macaca Mulatta
tgggggaccggggaggcgtgtcagcggcgcaaaaggggggggcgcggcacagaggaggaagagggagtaacaaggggtggtgcctgcgggggaggtggtgtgcgggatgggaatggggcggggggggatagctgggggaacgcgggcatacaagggggggagacgattcgtacaaggggggggtgagaatgggtggaggttgtggacaaacccaggaaggttattgcatcagacagcttgatcatcagtagcaacctgccacacaattgcaccgtttgtgtttttgctataggcgcccgctgggacacccaatcaggaaccattgtcgaagcccgtctcaaggagctgacatgccctatgccggtcatctttgcaaaagccacccccgtggagagacaagaaaccaagcagacctacgagtgccctgtgtacagaaccaaactgagaggccccagctacatctggaccttcaggctgaagagcgaagacaagactgcaaaatgggttctagccggagtggctctgctgctagaagtgtaagaactctagcctcggctggagtgcagtgaggattttctgttgtgttgctgcactgttcccatgcacattaatgtattcaattacaactttttagtaactcacatgtgcattcttttttcaacgctatccttaaaaagtgaagaaaggagagtgaaaatcagacaaaatattagaaacttattcagggctgagcgcggtggggaactgaaaggctactcgaagaccaatactacttcttctagacctacttcttcttgaggtagccttatcttcttcttcatccc

SEQ ID NO: 30008 - DNA, 236 bp, Macaca Mulatta
cacactgccaaatgtgtctttagatagccctctcctggtggtattttcagtagccactaaccttgcctggtacagtatgggggttgtaaattggcatggaaatttaaagcaggttcttgttggtccacagcacaaattagttatatacagggatggtagttttttcatcttcagttgtctctgatgcagtttatacaaaataattgttctgttaactgaataccactttgtaattg

SEQ ID NO: 30009 - DNA, 351 bp, Macaca Mulatta
ctctcctccgcttcctctcacttttcggacaaaccagtccttctgaggcccatgggttcccgggctgcctccggggctgctcctgtgaatggcattcgagggctcttccagctcggccactgaggcagccacaacccccggtgctcggggcggctctcaggtccctgaagtcctgtcctctcccggagccgacgtgttctcagctcctgggccacagctcctggatttggagccctcctttcttgggacccggagctggtgcttcctgctgttgtgggtactgtgggggtttggagtctgcaggctccggacagaggattcttcctgcgacttctctcatccccagctcat

SEQ ID NO: 30010 - DNA, 236 bp, Macaca Mulatta
cacccggccgccagactgcctgggcctgcccagatggccacctcgtggtgctgcggtgactttgtagccaactttataataaagtccagtttgcctttttggtacctctggtttcatgcactactgtgtaaaaggaagggtggaggataagtttgggaggcttggatgggagcctgggggccaggaggtaaaagctggacctgtttgtggcccctgcatttcttcgtccacttgtg

SEQ ID NO: 30011 - DNA, 877 bp, Macaca Mulatta
tcaaaaccatagggagcaagtggcagccaccaatttcctctttagatagtaaactcacttactgaacctcacaggttcaataatcttatactacaaaattaacttttttgtcagtcagctgtttttagtgaaagtttaaaagataattgcaatgttgggatagatattgaagagttggcacacttcagtctaagtgtacttattcctgagctttacttagttctatgagagatatcaatgttgctctctttagatattatctttttatttatttttccattcctgaatctcgctttcaaagatagtgcccctctttcatgagatatttgtttaatggacttcatcacttgaaaatttccctcctttttcatattgctttctgtatattaaataatgtaaaatatttttcttcacattcctcatatgtatgtcatatttttctgttcttactacttacgccatgcttttgacctttctttctttagtaggcccttcttaatcaaacatcatcaccaagagattaagaaatgtaatcacggtgaagtgatgtgttacctctagatctgttggtagctcattttaatttcatcacctgctgcatgggccaagcccaatttgtcttcatgttggaatgaagacagtcataattttcaatcccagttgacatacattctttattctattcaaaaggcagaatgtcctgagggatttttctaaaactaagtccccaaaacattactattttatagagtatcttaaatttaggaaattttttccctaacaatttagaaaacagaatcagataaaatatgcagaaagaaacaagggtttttttgatggggaataaaaagtcttagttatataatgcctaaagtta

SEQ ID NO: 30012 - DNA, 568 bp, Macaca Mulatta
ttatatacacaaaaaaatcaaaggtctcctctccccatccctaacctctgctagaaaatttgccataatgaaactgacttgacagattaaaagaccctgtcctcgatgaccaggaattggatagtcacccattttatggacttcatggcagcgatgagtaatctgtgatgatactaaatagaggcaatagtaactaactccattaaatgtcatgctgattgtctgtttttatagcactgatgatactgttttatttattaccaatagaccacaacattcacatctgtttttcctcaagggaaccatatttgcttttggttgaaggatttatctatttgatactatccagaatattgttaaactataatttcctgggttatattttagatgggttttctgcatggtggtaaaataagctttttcctcttgcctacatcctttggaagatctcctgatcatacataactaggtagggcttattcttgctgttggagcttggcacccagctctagactgtttctttgagtattactgcaaattggagacgtgtgtgataggagcagggctc

SEQ ID NO: 30013 - DNA, 204 bp, Macaca Mulatta
  misc_feature (1)...(204): n = A,T,C or G
gcccgaccgctttccggagactgtagtcgaaggccctgaggtatttttcaaagtnagtcagccataatggcaggtgaagaaattaatgaagactatccagtagaaattcatgagtatttgtcagcgtttgagaattccattggtgctgtggatgagatgctgaagaccatgatgtctgtttctagaaatgagttgttgcagaag

SEQ ID NO: 30014 - DNA, 1194 bp, Macaca Mulatta
  misc_feature (1)...(1194): n = A,T,C or G
tgggtcaggaatctagcaagcctgtatggcccaatccaacaggagggtatcagtccaatacaggtaggaggtatggaagaaggcatgcttatgtcagtttcaggccacccacgagccagcgggaaaggattgccagccagagaaagacgaactccaaagtcccaatgcacagatcagcctccagtcaaaccaccaagaggagccgatcgccattttccactactcgtcgtagttgggacgacagcgagagttcgggaaccaacctaaatattgataatgaggactattccagnncagtacttccaggtggagggatactgccaatgacaatgaaggccactcagatggcccagcaagaagaggcagaggcgagagttcaagtggctattctgagccaaagtaccctgaagacaaacgggaagtgaggagtgtccaagtgaaaccagaaaaggtgccgagacgacgacacaccatggccgaccctgacttctggacgcacagtgatgattactacaaatactgcgaggaagactctgacagtgacaaagagtggaaaaaagctatgcgtcggaaatatcgaagccgagagcaagccctgtcctccagtggcgaaagctgggagactctgccggggaaagaagagcgggaacctccgcaggttaaggtgagtgccagcactggcgccagccccggccccggtgctagtgccagtgccggggctggcgccggggccagtgctggcagcaatggcaacaattaccttgaagaagttcgagaaccatctcttcaggaagagcaggcatccctggaagaaggagaaattccttggctccagtacaatgagaatgagagtagcagtgagggggataatgattctggtcatgagttgatgcagcctggggtattcatgctggatgggaacaacaaccttgaagatgactccagtgtgagcgaagacctagaagtggattggagcctctttgatggatttgcagatgggttaggagtggctgaagccatttcctatgtggatcctcagttcctcacctacatggcacttgaagaacgcctggcccaggcaatggaaactgcccttgcacacttggagtctcttgcagtggatgtggaggtggccaatccaccagcaagcaaggagaggattgacgctcttcccgagatcctggtcactgaaga

SEQ ID NO: 30015 - DNA, 844 bp, Macaca Mulatta
  misc_feature (1)...(844): n = A,T,C or G
agataatgcggtgtacctcctggtggtgaaccatccagatgccaagtccacggtggagttgtttaaatttcaagaagaagaaaagtcgcttttgcatctaaaaaccatcagacataaacatgtgcctannnnnnnnnnnnnnnnnnnnnnnnnnnnnnnnnnnnnnnnnnnnnnnnnnnnnnnnnnnnnnnnnnnnnnnnnnnnnnnnnnnnnnnnnnnnnnnnnnnnnnnnnnnnnnnnnnnnnnnnnnnnnnnnnnnnnnnnnnnnnnnnnnnnnnnnnnnnnnnnnnnnnnnnnnnnnnnnnnnnnnnnnnnnnnnnnnnnnnnnnnnnnnnnnnnnnnnnnnnnnnnnnnnnnnnnnnnnnnnnnnnnnnnnnnnnnnnnnnnnnnnnnnnnnnnnnnnnnnnnnnnnnnnnnnnnnnnnnnnnnnnnnnnnnnnnnnnnnnnnnnnnnnnnnnnnnnnnnnnnnnnnnnnnnnnnnnnnnnnnnnnnnnnnnnnnnnnnnnnnnnnnnnnnnnnnnnnnnnnnnnnnnnnnnnggtgcttcaaatccagaacattctaacagaagaacctaaagtgacacaggtttatgcagaaaatggcacagtgttgcaaggcagtacagttgcctctgtgtacaaagggaaactgctgattggcacagtgtttcacaaagctctttactgtgagctctaacagaccaacttgcatccacgccatagaaactgaggccattatttcaactgcttgccatattccaaggacctagtgatcttagctgaacaatgaatgctgaccctaaatgtggacatcatgaagcatcaaagcactgtttaactggg

SEQ ID NO: 30016 - DNA, 478 bp, Macaca Mulatta
  misc_feature (1)...(478): n = A,T,C or G
gctccctcaaagcggaagtgaagccggactgaggctcctacagtggtccctcctggcctttggtgacgagtcgcgtcagttccgacccggacccgtacgctgctgcgctgacgtggctcccggaagtagggctggcgtagggccgccatgttgcagcagnnnnnnnnnnnnnnnnnnnnnnnnnnnnnnnnnnnnnnnnnnnnnnnnnnnnnnnnnnnnnnnnnnnnnnnnnnnnnntcagacatccagtagcatcatttttccacttattctttcgagtcagtgcaatcgtcgtctatcttctctgtgagttgctcagcagcagctttattacctgtatggtgacaattatcttgttgttgtcgtgtgacttttgggcagtgaangaatgtcacaggtagactaatggttggcctaccttggtggaatcacattgataaagatggaaagagccactgggtatttgaatctagaaagg

SEQ ID NO: 30017 - DNA, 668 bp, Macaca Mulatta
aggcttgagaaagggttaaaacagaacctccaggtagttttcttcctctacctccgtgtccccccgagactgaaaagagtcactagctctcttttcccaagccttttataaaactgcaggaacactgtggagatgggtcctatctggagtccttttggggacatatgcctcagtcagtcattctgtgattgatccaaaattatttactgagtgcctgcctactctgcgtcaggctctctagcctctcactactgagttagggtgcaggccgaggctggggcagaatgtctgcagccagtgccagcacagggtagtaatctagtggcagagaacagggtgttacggggagcatatgaaaggccatccagcccagcctgggtgaccctggagagtttcctagggttgtgatatgtggcaggcctactcatggatgggaagagaggagggccacttggctggaccttgtatccccaagggaccacacgtgtattttttgatattccaaaatcaggttttatacatagctgttgtatatttgtagtgtgaaaaacattaatatattatatgcaaacgtttaaatatagtatgatgtttttaactctggtatgtatttcattatttttggagctttcaaggggttgggaggaaaggaagcaactgcatcttaa

SEQ ID NO: 30018 - DNA, 412 bp, Macaca Mulatta
gcaatgcatgccactggtcacaatgtcagaactgggcagggaatgcagctggtaaccacctttgaaaaagccctcatacacaaaaaggagtcagaagccaagagtacttccactgtgatttcccttctgaatttcaatatcagatcatgggttctcttactctccggaaaatatcgctggtccttttattttgattgtaatcagattatacttactgagacaaacttctcaggaccagaacttccaaagatatagaacaagaacgttacttaaggtgcaaggtagtcctctgtgaagcaccacatagagattggcaatgttatttaggattttgcatgactgcatgtgagagctgttggacaactgctctgacccagggtaacacctgtggcccatgtcttgaaaaaccttt

SEQ ID NO: 30019 - DNA, 502 bp, Macaca Mulatta
tagtcattcatgataccaaaagacgttatgaggccattctgctataaaatcatgtgtagtagttcttgcagtttacttctaagtcaacatgcataaataatactgttaaactattctaaacagtattcttgtacacattgctgaagatagttcataaaaataagaactcatagttgtacaagaatatggcattaaatacagtttttaatctcacataagaatgatgttaaataacaagtgttattagcatattttcatcttttgcttttgtccctgtaaaatcctctgtataagaaccaataagaaagcagatacagtcagaggtcagcattaactaaaggttaaaatatactttaaattgtttttctttcacttactgcttaaattgagaattgtaggaaaaatgaacataaaaattgaaaagaattcccctaaaatgtatgactaatgacatttagaattttaaatggaatgagtcatcaaacaatttctgatgtggcca

SEQ ID NO: 30020 - DNA, 346 bp, Macaca Mulatta
tccatctgataagagggagagttcctaaatagttgtggaaagaatcccattcctgttccaggaaaatagatttcagttcccaaactattgcaattagaagaggtaagggttacattttatcatctgtcttttcggttctttatagatgccagtagtttttaataagctatttgacgtttatgtaacacttgaaagcttacaaagtatgtatgtcatttgctttcatacagcatgttttgtgaaaactaatagaatataagtgtacatctaatttgtggaaccagcacacgaatagtagactaacataaagtagaacatgaagagaggcattgtagaggagtgcagc

SEQ ID NO: 30021 - DNA, 1298 bp, Macaca Mulatta
  misc_feature (1)...(1298): n = A,T,C or G
gagtcaggccaatggggccgctgttcnnnnnnnnnnnnnntttattcttattcttggaggcagggtctcgcttagttgcccaggctggagtgcggtggtgcgatcacggttccatgcagcccccgacctcccgggctcaggtgattctcccgcctcagcaccttgagcagctgggaccacaggcgcgcgccaccgcgtccggccggcgggacttacttgtcaggcggggattgggttccgccggaccaaagggaggggtaagcgccagaatatgaatcgccaggaagctgggggaaagctacgggaaaccctgagcagccnnnnnnnnnnnnnnnnnnnnnnnnnnnnnnnnnnnnnnnnnnnnnnnnnnnnnnnnnnnnnnnnnnnnnnnnnnnnnnnnnnnnnnnnnnnnnnnnnnnnnnnnnnnngtctgagagtcactggagctaccagcagcaccatggggccctggggagagccagagctcctggtgtggcgcccagaggcggtagcttcagagcctccagtgcctgtggggctggaggtgaagttgggggccctggtgctgctgctggtgctcaccctcctctgcagcctggtgcccatctgtgtgctgcgccggccaggagctaaccatgaagcctcagncagcttcccgccagaaagcgctgagcctagtaagctgttttgcggggggcgtctttttggccacctgtctcctggacctgctgcctgactacttggctgccatagatgaggccctggcagccttgcacgtgacgctccagttcccgctgcaagagttcatcctggccatgggcttcttcctggtcctggtgatggagcagatcacactggcttacaaggagcagtcagggctgtcacctcttgaggaaacaagggctctgctgggaacagtgaatggtgggccgcagcattggcataatgggccaggggttccacaggcgagtggaaccccagcaagcccctcagccttgcgtgcctgtgtactggtattctccctggccctccactctgtgtttgagggactggcggtggggctacagcgagaccgggctcgggcgatggagctgtgcctggctttgctgctccacaagggcatcctggctgtcagcctgtccctgcggctgctgcagagccaccttagggcacaggtggtggctggctgtgggatcctcttctcatgcatgacacctctaggcatcaggctgggtgcagctctggctgagtcggcaggacctctgcaccagctggctcagtctgtgctagagggcatg

SEQ ID NO: 30022 - DNA, 820 bp, Macaca Mulatta
gtctatacattctcctttctttctaattaggatctagaagacgatcaagggaaggtcgttctcagtgaaaatccaaaaaccagacaaaaatgtttatacaatcctaaatcaataacctgtccttagaaaattgtgagagccaagctgacttcaggaactgaaacatcagcacaaagaagcaaacatcaaataattctgaacacaaatttaatatttttttttcggaatgagaaacatgagggaaattgtggagttagcctcctgtggtaaaggaatatgaagaaaatataacaccttacatgctttttcatcttaaaagttctggctgactttgaaatccagagaaaaatgcttgtcaccagattcattacaattcaaatcgaagagttgtgaactgttatcccattgaaaagaccgagccttgtatgtatgttatggatacataaaatgtatgcaagcagttacctctccatgggaagctaagttataaaaataggtgcttggtgtacaacaaaactttttacatcaaaaggctttgcacatttctatatgagtgggtttactggtaaattatgttattttttacaactaattttgtactctcagaatgtttgtcatacgcttcttgcaatgtatattttttaatctcaaacgtttcaataaaaccatttttcaggtataaagagaattacttcaaattgagtaattcagaaaaaaactcaagatttaagttaaaaagtggtttggactcgggaacaggactttatacctcttttactgtaacaagtactcattaaaggaaattgaatgaaatcagtga

SEQ ID NO: 30023 - DNA, 2782 bp, Macaca Mulatta
  misc_feature (1)...(2782): n = A,T,C or G
tttccaagccacatgatgaactgaagttgtcttgtgaggcccagctagtaaaggcaggcgaagtgcccaaggtggagctgaaagatgcctcagtgcagactgtggccacggagggcgacctgctcagaaccaagcacgaagcagtgagagaggcttgggaagagaaaccgatcaacactgcactcagagcagagcatcggccagagaacctgcccggggtgcctgggtggcaggctgccctcctttccctccctggnnnnnnnnnnnnnnnnnnnnnnnnnnnnnnnnnnnnnnnnnnnnnnnnnnnnnnnnnnnnnnnnnnnnnnnnnnnnnnnnnnnnnnnnnnnnnnnnnnnnnnnnnnnnnnnnnnnnnnnnnnnnnnnnnnnnnnnnnnnnnnnnnnnnnnnnnnnnnnnnnnnnnnnnnnnnnnnnnnnnnnnnnnnnnnnnnnnnnnnnnnnnnnnnnnnnnnnnnnnnnnnnnnnnnnnnnnnnnnnnnnnnnnnnnnnnnnnnnnnnnnnnnnnnnnnnnnnnnnnnnnnnnnnnnnnnnnnnnnnnnnnnnnnnnnnnnnnnnnnnnnnnnnnnnnnnnnnnnnnnnnnnnnnnnnnnnnnnnnnnnnnnnnnnnnnnnnnnnnnnnnnnnnnnnnnnnnnnnnnnnnnnnnnnnnnnnnnnnnnnnnnnnnnnnnnnnnnnnnnnnnnnnnnnnnnnnnnnnnnnnnnnnnnnnnnnnnnnnnnnnnnnnnnnnnnnnnnnnnnnnnnnnnnnnnnnnnnnnnnnnnnnnnnnnnnnnnnnnnnnnnnnnnnnnnnnnnnnnnnnnnnnnnnnnnnnnnnnnnnnnnnnnnnnnnnnnnnnnnnnnnnnnnnnnnnnnnnnnnnnnnnnnnnnnnnnnnnnnnnnnnnnnnnnnnnnnnnnnnnnnnnnnnnnnnnnnnnnnnnnnnnnnnnnnnnnnnnnnnnnnnnnnnnnnnnnnnnnnnnnnnnnnnnnnnnnnnnnnnnnnnnnnnnnnnnnnnnnnnnnnnnnnnnnnnnnnnnnnnnnnnnnnnnnnnnnnnnnnnnnnnnnnnnnnnnnnnnnnnnnnnnnnnnnnnnnnnnnnnnnnnnnnnnnnnnnnnnnnnnnnnnnnnnnnnnnnnnnnnnnnnnnnnnnnnnnnnnnnnnnnnnnnnnnnnnnnnnnnnnnnnnnnnnnnnnnnnnnnnnnnnnnnnnnnnnnnnnnnnnnnnnnnnnnnnnnnnnnnnnnnnnnnnnnnnnnnnnnnnnnnnnnnnnnnnnnnnnnnnnnnnnnnnnnnnnnnnnnnnnnnnnnnnnnnnnnnnnnnnnnnnnnnnnnnnnnnnnnnnnnnnnnnnnnnnnnnnnnnnnnnnnnnnnnnnnnnnnnnnnnnnnnnnnnnnnnnnnnnnnnnnnnnnnnnnnnnnnnnnnnnnnnnnnnnnnnnnnnnnnnnnnnnnnnnnnnnnnnnnnnnnnnnnnnnnnnnnnnnnnnnnnnnnnnnnnnnnnnnnnnnnnnnnnnnnnnnnnnnnnnnnnnnnnnnnnnnnnnnnnnnnnnnnnnnnnnnnnnnnnnnnnnnnnnnnnnnnnnnnnnnnnnnnnnnnnnnnnnnnnnnnnnnnnnnnnnnnnnnnnnnnnnnnnnnnnnnnnnnnnnnnnnnnnnnnnnnnnnnnnnnnnnnnnnnnnnnnnnnnnnnnnnnnnnnnnnnnnnnnnnnnnnnnnnnnnnnnnnnnnnnnnnnnnnnnnnnnnnnnnnnnnnnnnnnnnnnnnnnnnnnnnnnnnnnnnnnnnnnnnnnnnnnnnnnnnnnnnnnnnnnnnnnnnnnnnnnnnnnnnnnnnnnnnnnnnnnnnnnnnnnnnnnnnnnnnnnnnnnnnnnnnnnnnnnnnnnnnnnnnnnnnnnnnnnnnnnnnnnnnnnnnnnnnnnnnnnnnnnnnnnnnnnnnnnnnnnnnnnnnnnnnnnnnnnnnnnnnnnnnnnnnnnnnnnnnnnnnnnnnnnnnnnnnnnnnnnnnnnnnnnnnnnnnnnnnnnnnnnnnnnnnnnnnnnnnnnnnnnnnnnnnnnnnnnnnnnnnnnnnnnnnnnnnnnnnnnnnnnnnnnnnnnnnnnnnnnnnnnnnnnnnnnnnnnnnnnnnnnnnnnnnnnnnnnnnnnnnnnnnnnnnnnnnnnnnnnnnnnnnnnnnnnnnnnnnnnnnnnnnnnnnnnnnnnnnnnnnnnnnnnnnnnnnnnnnnnnnnnnnnnnnnnnnnnnnnnnnnnnnnnnnnnnnnnnnnnnnnnnnnnnnnnnnnnnnnnnnnnnnnnnnnnnnnnnnnnnnnnnnnnnnnnnnnnnnnnnnnnnnnnnnnnnnnnnnnnnnnnnnnnnnnnnnnnnnnnnnnnnnnnnnnnnnnnnnnnnnnnnnnnnnnnnnnnnnnnnnnnnnnnnnnnnnnnnnnnnnnnnnnnnnnnnnnnnnnnnnnnnnnnnnnnnnnnnnnnnnnnnnnnnnnnnnnnnnnnnnnnnnnnnnnnnnnnnnnnnnnnnnnnnnnnnnnnnnnnnnnnagtttcagagactcttccactctctgagaatgacacggactccctctcctgtgatagtggcagctcggcaactagcactccgtgtgtgtcccgcctggtcgctggccaccgcctgtgggccagcaagaacggccgccacgtcctgggcctgattgaggactatgaggccctgctcaaacagatcggccagggacagaggcttcttgccgaaatggacattcaaacccaagaggctcccagctacacaagtcaagagctgggaacaaagg

SEQ ID NO: 30024 - DNA, 904 bp, Macaca Mulatta
  misc_feature (1)...(904): n = A,T,C or G
gggtgaaaagatcttctacctgattcgcccaacaaatgccaatctgactctctttgagtgctggagcagttcctctaatcagaatgagatgttctttggggaccaggtggacaagtgctacaagtgttccgtgaagcaaggacagacacttttcattcccacaggnnncaggatggatccatgctgtgctgacgcctgtggactgccttgcctttggagggaacttcttacacagccttaacatcgagatgcagctcagcctatgagattgagaagcggctgagcacagcagacctcttcaaattccccaactttgagaccatctgttggtatgtgggaaagcacatcctggacatctttcgngtttgcgagagaacaggagacaccctgcttcctacctggtccatggtggcaaagccttgaacttggcctttagagcctggacaaggaaagaagnnnnnnnnnnnnnnnnnnnnnnnnnnnnnnnnnnnnnnnnnnnnnnnnnnnnnnnnnnnnnnnnnnnnnnnnnnnnnnnnnnnnnnnnnnnnnnnnnnnnnnnnnnnnnnnnnnnnnnnnnnnnnnnnnnnnnnnnnnnnnnnnnnnnnnnnnnnnnnnnnnnnnnnnnnnnnnnnnnnnnnnnnnnnnnnnnnnnnnnnnnnnnnnnnnnnnnnnnnnnnnnnnnnnnnnnnnnnnnnnnnnnnnnnnnnnnnnnnnnnnnnnnnnnnnnnnnnnnnnnnnnnnnnnnnnnnnnnnnnnnnnnnnnnnnnnnnnnnnnnnnnnnnnnnnnnnnnnnnnnnnnnnnnnnnnnnnnnnnnnnnnnnnnnnnnnnnnnnnnnnnnnnnnnnnagttcaacatcactggtgcctgcttgaatgactcagatgatgactcaccagacttgga

SEQ ID NO: 30025 - DNA, 906 bp, Macaca Mulatta
  misc_feature (1)...(906): n = A,T,C or G
gggcatcgcagggaccgacgtggccaaggaggcctccgacatcatcctgaccgatgacaacttcaccagcatcgtcaaggccgtcatgtggggccgtaacgtctatgacagcatctccaagttcctgcagtttcaactgacggtcaatgtggtggccgtgatcgtggccttcacaggcgcctgcattactcagnnaggactctcctctcaaagccgtgcagatgttatgggtgaacttgatcatggacacgtttgcctctctggccctggcgacggagccacccacggagtcgctgctgctgcggaagctgtacggcnnnnnnnnnnnnnnnnnnnnnnnnnnnnnnnnnnnnnnnnnnnnnnnnnnnnnnnnnnnnnnnnnnnnnnnnnnnnnnnnnnnnnnnnnnnnnnnnnnnnnnnnnnnnnnnnnnnnnnnnnnnnnnnnnnnnnnnnnnnnnnnnnnnnnnnnnnnnnnnnnnnnnnnnnnnnnnnnnnnnnnnnnnnnnnnnnnnnnnnnnnnnnnnnnnnnnnnnnnnnnnnnnnnnnnnnnnnnnnnnnnnnnnnnnnnnnnnnnnnnnnnnnnnnnnnnnnnnnnnnnnnnnnnnnnnnnnnnnnnnnnnnnnnnnnnnnnnnnnnnnnnnnnnnnnnnnnnnnnnnnnnnnnnnnnnnnnnnnnnnnnnnnnnnnnnnnnnnnnnnnnnnnnnnnnnnnnnnnnnnnnnnnnnnnnaggtcattgccaccatcctcaccagtcagctcaagtgcctgaaggaagctgggcatgggcctgggaaggacgagatgaccaacgaggagctggccggaggcgaggaagagatcgaccacgccgagcaggagctccgcaggggccagatcctctggttctggggcctgaaccggattcag

SEQ ID NO: 30026 - DNA, 138 bp, Macaca Mulatta
ggtcggtactgggagacagtagagaggttgaagatcaatcagttctatggcgctccaacggctgtccggctgttgctgaaatacggtgatgcttgggtgaagaagtacgatcgctcctccctgcggaccctggggtca

SEQ ID NO: 30027 - DNA, 556 bp, Macaca Mulatta
  misc_feature (1)...(556): n = A,T,C or G
ggcgggatgtggcttggagtagagatgagtcactgctgagagcagctgcagtagctgagcagtggcagcagagaggcagacgtgagctgagggcgcagaggcaggcagatcctgcagctcctgaaaggcaagctggtggtgggtcatgacctgaagcacgacttccaggcactgaaagaggacatgagccgctacacaatctatgacacgtccaccgacatgctgctgtggcgtgaggccaagctggaccactgcagacgtgtctccctgcgggtgctgagtgagcgcctcctgcacaagagcatccagaacagcctgcttggacacagctcggtggaagatgcgaaggcaacaatggagctctaccaaatctcccagagaatccgagcccgccgagggctgccccgcctggctgtgtcagactgaagccccgtccagcccattccccagggactagaggctttcggctttttgggacagcaactaccttgcttttggaaaatacatttttaatnnnnnnnnnnnnnnnnnnnnnnnnnnnnnnnnnnnnnnnnnn

SEQ ID NO: 30028 - DNA, 1060 bp, Macaca Mulatta
  misc_feature (1)...(1060): n = A,T,C or G
acccccgactgaaggtgctggcatttggagcaaagccagattccaccctgcatacctacttcccttctttcctgtccagagccacccctagctgtccncctgagatgaagaaagannnnnnnnnnnnnnnnnnnnnnnnnnnnnnnnnnnnnnnnnnnnnnnnnnnnnnnnnnnnnnnnnnnnnnnnnnnnnnnnnnnnnnnnnnnnnnnnnnnnnnnnnnnnnnnnnnnnnnnnnnnnnnnnnnnnnnnnnnnnnnnnnnnnnnnnnnnnnnnnnnnnnnnnnnnnnnnnnnnnnnnnnnnnnnnnnnnnnnnnnnnnnnnnnnnnnnnnnnnnnnnnnnnnnnnnnnnnnnnnnnnnnnnnnnnnnnnnnnnnnnnnnnnnnnnnnnnnnnnnnnnnnnnnnnnnnnnnnnnnnnnnnnnnnnnnnnnnnnnnnnnnnnnnnnnnnnnnnnnnnnnnnnnnnnnnnnnnnnnnnnnnnnnnnnnnnnnnnnnnnnnnnnnnnnnnnnnnnnnnnnnnnnnnnnnnnnnnnnnnnnnnnnnnnnnnnnnnnnnnnnnnnnnnnnnnnnnnnnnnnnnnnnnnnnnnnnnnnnnnnnnnnnnnnnnnnnnnnnnnnnnnnnnnnnnnnnnnnnnnnnnnnnnnnnnnnnnnnnnnnnnnnnnnnnnnnnnnnnnnnnnnnnnnnnnnnnnnnnnnnnnnnnnnnnnnnnnnnnnnnnnnnnnnnnnnnnnnnnnnnnnnnnnnnnnnnnnnnnnnnnnnnnnnnnnnnnnnnnnnnnnnnnnnnnnnnnnnnnnnnnnnnnnnnnnnnnnnnnnnnnnnnnnnnnnnnnnnnnnnnnnnnnnnnnnnnnnnnnnnnnnnnnnnnnnnnnnnnnnnnnnnnnnnnnnnnnnnnnnnnnnnnnnnnnnnnnnnncagaggtgaggtgacctgggactgcatgaagacacagctcagtgaggctgtccactggacctggctctgcctacaggacatcacagtggctgtgctaagactgggcacttgccctgatatcccagcagtaggccctgccttcctggcc

SEQ ID NO: 30029 - DNA, 7423 bp, Macaca Mulatta
  misc_feature (1)...(7423): n = A,T,C or G
agtgcctggaggaccaaacaacaacaactatgcaaatgtggaattaattcttgatattgctaaaaggatcccagtacaagnnnnnnnnnnnnnnnnnnnnnnnnnnnnnnnnnnnnnnnnnnnnnnnnnnnnnnnnnnnnnnnnnnnnnnnnnnnnnnnnggtcctccaagccaggccatgtgggctttaggggataagattgcatcttccatagtggctcaaactgcaggtatcccaactcttccctggagtggcagtggnnnnnnnnnnnnnnnnnnnnnnnnnnnnnnnnnnnnnnnnnnnnnnnnnnnnnnnnnnnnnnnnnnnnnnnnnnnnnnnnnnnnnnnnnnnnnnnnnnnnnnnnnnnnnnnnnnnnnnnnnnnnnnnnnnnnnnnnnnnnnnnnnnnnnnnnnnnnnnnnnnnnnnnnnnnnnnnnnnnnnnnnnnnnnnnnnnnnnnnnnnnnnnnnnnnnnnnnnnnnnnnnnnnnnnnnnnnnnnnnnnnnnnnnnnnnnnnnnnnnnnnnnnnnnnnnnnnnnnnnnnnnnnnnnnnnnnnnnnnnnnnnnnnnnnnnnnnnnnnnnnnnnnnnnnnnnnnnnnnnnnnnnnnnnnnnnnnnnnnnnnnnnnnnnnnnnnnnnnnnnnnnnnnnnnnnnnnnnnnnnnnnnnnnnnnnnnnnnnnnnnnnnnnnnnnnnnnnnnnnnnnnnnnnnnnnnnnnnnnnnnnnnnnnnnnnnnnnnnnnnnnnnnnnnnnnnnnnnnnnnnnnnnnnnnnnnnnnnnnnnnnnnnnnnnnnnnnnnnnnnnnnnnnnnnnnnnnnnnnnnnnnnnnnnnnnnnnnnnnnnnnnnnnnnnnnnnnnnnnnnnnnnnnnnnnnnnnnnnnnnnnnnnnnnnnnnnnnnnnnnnnnnnnnnnnnnnnnnnnnnnnnnnnnnnnnnnnnnnnnnnnnnnnnnnnnnnnnnnnnnnnnnnnnnnnnnnnnnnnnnnnnnnnnnnnnnnnnnnnnnnnnnnnnnnnnnnnnnnnnnnnnnnnnnnnnnnnnnnnnnnnnnnnnnnnnnnnnnnnnnnnnnnnnnnnnnnnnnnnnnnnnnnnnnnnnnnnnnnnnnnnnnnnnnnnnnnnnnnnnnnnnnnnnnnnnnnnnnnnnnnnnnnnnnnnnnnnnnnnnnnnnnnnnnnnnnnnnnnnnnnnnnnnnnnnnnnnnnnnnnnnnnnnnnnnnnnnnnnnnnnnnnnnnnnnnnnnnnnnnnnnnnnnnnnnnnnnnnnnnnnnnnnnnnnnnnnnnnnnnnnnnnnnnnnnnnnnnnnnnnnnnnnnnnnnnnnnnnnnnnnnnnnnnnnnnnnnnnnnnnnnnnnnnnnnnnnnnnnnnnnnnnnnnnnnnnnnnnnnnnnnnnnnnnnnnnnnnnnnnnnnnnnnnnnnnnnnnnnnnnnnnnnnnnnnnnnnnnnnnnnnnnnnnnnnnnnnnnnnnnnnnnnnnnnnnnnnnnnnnnnnnnnnnnnnnnnnnnnnnnnnnnnnnnnnnnnnnnnnnnnnnnnnnnnnnnnnnnnnnnnnnnnnnnnnnnnnnnnnnnnnnnnnnnnnnnnnnnnnnnnnnnnnnnnnnnnnnnnnnnnnnnnnnnnnnnnnnnnnnnnnnnnnnnnnnnnnnnnnnnnnnnnnnnnnnnnnnnnnnnnnnnnnnnnnnnnnnnnnnnnnnnnnnnnnnnnnnnnnnnnnnnnnnnnnnnnnnnnnnnnnnnnnnnnnnnnnnnnnnnnnnnnnnnnnnnnnnnnnnnnnnnnnnnnnnnnnnnnnnnnnnnnnnnnnnnnnnnnnnnnnnnnnnnnnnnnnnnnnnnnnnnnnnnnnnnnnnnnnnnnnnnnnnnnnnnnnnnnnnnnnnnnnnnnnnnnnnnnnnnnnnnnnnnnnnnnnnnnnnnnnnnnnnnnnnnnnnnnnnnnnnnnnnnnnnnnnnnnnnnnnnnnnnnnnnnnnnnnnnnnnnnnnnnnnnnnnnnnnnnnnnnnnnnnnnnnnnnnnnnnnnnnnnnnnnnnnnnnnnnnnnnnnnnnnnnnnnnnnnnnnnnnnnnnnnnnnnnnnnnnnnnnnnnnnnnnnnnnnnnnnnnnnnnnnnnnnnnnnnnnnnnnnnnnnnnnnnnnnnnnnnnnnnnnnnnnnnnnnnnnnnnnnnnnnnnnnnnnnnnnnnnnnnnnnnnnnnnnnnnnnnnnnnnnnnnnnnnnnnnnnnnnnnnnnnnnnnnnnnnnnnnnnnnnnnnnnnnnnnnnnnnnnnnnnnnnnnnnnnnnnnnnnnnnnnnnnnnnnnnnnnnnnnnnnnnnnnnnnnnnnnnnnnnnnnnnnnnnnnnnnnnnnnnnnnnnnnnnnnnnnnnnnnnnnnnnnnnnnnnnnnnnnnnnnnnnnnnnnnnnnnnnnnnnnnnnnnnnnnnnnnnnnnnnnnnnnnnnnnnnnnnnnnnnnnnnnnnnnnnnnnnnnnnnnnnnnnnnnnnnnnnnnnnnnnnnnnnnnnnnnnnnnnnnnnnnnnnnnnnnnnnnnnnnnnnnnnnnnnnnnnnnnnnnnnnnnnnnnnnnnnnnnnnnnnnnnnnnnnnnnnnnnnnnnnnnnnnnnnnnnnnnnnnnnnnnnnnnnnnnnnnnnnnnnnnnnnnnnnnnnnnnnnnnnnnnnnnnnnnnnnnnnnnnnnnnnnnnnnnnnnnnnnnnnnnnnnnnnnnnnnnnnnnnnnnnnnnnnnnnnnnnnnnnnnnnnnnnnnnnnnnnnnnnnnnnnnnnnnnnnnnnnnnnnnnnnnnnnnnnnnnnnnnnnnnnnnnnnnnnnnnnnnnnnnnnnnnnnnnnnnnnnnnnnnnnnnnnnnnnnnnnnnnnnnnnnnnnnnnnnnnnnnnnnnnnnnnnnnnnnnnnnnnnnnnnnnnnnnnnnnnnnnnnnnnnnnnnnnnnnnnnnnnnnnnnnnnnnggtgtatgttcgaagggcttatattgcctacgaacttaacagcgtacaacaccgccagcttaaggacaacacctgtgtggtggaattccagttcatgctgcccacatctcatccaaacagnnnnnnnnnnnnnnnnnnnnnnnnnnnnnnnnnnnnnnnnnnnnnnnnnnnnnnnnnnnnnnnnnnnnnnnnnnnnnnnnnnnnnnnnnnnnnnnnnnnnnnnnnnnnnnnnnnnnnnnnnnnnnnnnnnnnnnnnnnnnnnnnnnnnnnnnnnnnnnnnnnnnnnnnnnnnnnnnnnnnnnnnnnnnnnnnnnnnnnnnnnnnnnnnnnnnnnnnnnnnnnnnnnnnnnnnnnnnnnnnnnnnnnnnnnnnnnnnnnnnnnnnnnnnnnnnnnnnnnnnnnnnnnnnnnnnnnnnnnnnnnnnnnnnnnnnnnnnnnnnnnnnnnnnnnnnnnnnnnnnnnnnnnnnnnnnnnnnnnnnnnnnnnnnnnnnnnnnnnnnnnnnnnnnnnnnnnnnnnnnnnnnnnnnnnnnnnnnnnnnnnnnnnnnnnnnnnnnnnnnnnnnnnnnnnnnnnnnnnnnnnnnnnnnnnnnnnnnnnnnnnnnnnnnnnnnnnnnnnnnnnnnnnnnnnnnnnnnnnnnnnnnnnnnnnnnnnnnnnnnnnnnnnnnnnnnnnnnnnnnnnnnnnnnnnnnnnnnnnnnnnnnnnnnnnnnnnnnnnnnnnnnnnnnnnnnnnnnnnnnnnnnnnnnnnnnnnnnnnnnnnnnnnnnnnnnnnnnnnnnnnnnnnnnnnnnnnnnnnnnnnnnnnnnnnnnnnnnnnnnnnnnnnnnnnnnnnnnnnnnnnnnnnnnnnnnnnnnnnnnnnnnnnnnnnnnnnnnnnnnnnnnnnnnnnnnnnnnnnnnnnnnnnnnnnnnnnnnnnnnnnnnnnnnnnnnnnnnnnnnnnnnnnnnnnnnnnnnnnnnnnnnnnnnnnnnnnnnnnnnnnnnnnnnnnnnnnnnnnnnnnnnnnnnnnnnnnnnnnnnnnnnnnnnnnnnnnnnnnnnnnnnnnnnnnnnnnnnnnnnnnnnnnnnnnnnnnnnnnnnnnnnnnnnnnnnnnnnnnnnnnnnnnnnnnnnnnnnnnnnnnnnnnnnnnnnnnnnnnnnnnnnnnnnnnnnnnnnnnnnnnnnnnnnnnnnnnnnnnnnnnnnnnnnnnnnnnnnnnnnnnnnnnnnnnnnnnnnnnnnnnnnnnnnnnnnnnnnnnnnnnnnnnnnnnnnnnnnnnnnnnnnnnnnnnnnnnnnnnnnnnnnnnnnnnnnnnnnnnnnnnnnnnnnnnnnnnnnnnnnnnnnnnnnnnnnnnnnnnnnnnnnnnnnnnnnnnnnnnnnnnnnnnnnnnnnnnnnnnnnnnnnnnnnnnnnnnnnnnnnnnnnnnnnnnnnnnnnnnnnnnnnnnnnnnnnnnnnnnnnnnnnnnnnnnnnnnnnnnnnnnnnnnnnnnnnnnnnnnnnnnnnnnnnnnnnnnnnnnnnnnnnnnnnnnnnnnnnnnnnnnnnnnnnnnnnnnnnnnnnnnnnnnnnnnnnnnnnnnnnnnnnnnnnnnnnnnnnnnnnnnnnnnnnnnnnnnnnnnnnnnnnnnnnnnnnnnnnnnnnnnnnnnnnnnnnnnnnnnnnnnnnnnnnnnnnnnnnnnnnnnnnnnnnnnnnnnnnnnnnnnnnnnnnnnnnnnnnnnnnnnnnnnnnnnnnnnnnnnnnnnnnnnnnnnnnnnnnnnnnnnnnnnnnnnnnnnnnnnnnnnnnnnnnnnnnnnnnnnnnnnnnnnnnnnnnnnnnnnnnnnnnnnnnnnnnnnnnnnnnnnnnnnnnnnnnnnnnnnnnnnnnnnnnnnnnnnnnnnnnnnnnnnnnnnnnnnnnnnnnnnnnnnnnnnnnnnnnnnnnnnnnnnnnnnnnnnnnnnnnnnnnnnnnnnnnnnnnnnnnnnnnnnnnnnnnnnnnnnnnnnnnnnnnnnnnnnnnnnnnnnnnnnnnnnnnnnnnnnnnnnnnnnnnnnnnnnnnnnnnnnnnnnnnnnnnnnnnnnnnnnnnnnnnnnnnnnnnnnnnnnnnnnnnnnnnnnnnnnnnnnnnnnnnnnnnnnnnnnnnnnnnnnnnnnnnnnnnnnnnnnnnnnnnnnnnnnnnnnnnnnnnnnnnnnnnnnnnnnnnnnnnnnnnnnnnnnnnnnnnnnnnnnnnnnnnnnnnnnnnnnnnnnnnnnnnnnnnnnnnnnnnnnnnnnnnnnnnnnnnnnnnnnnnnnnnnnnnnnnnnnnnnnnnnnnnnnnnnnnttcctcttatgaactcaaaggatcctatagacagaatcatcgagtttgttcccacaaaggccccatatgataatacgatggatgctagcagcccgtcatcatccannnnnnnnnnnnnnnnnnnnnnnnnnnnnnnnnnnnnnnnnnnnnnnnnnnnnnnnnnnnnnnnnnnnnnnnnnnnnnnnnnnnnnnnnnnnnnnnnnnnnnnnnnnnnnnnnnnnnnnnnnnnnnnnnnnnnnnnnnnnnnnnnnnnnnnnnnnnnnnnnnnnnnnnnnnnnnnnnnnnnnnnnnnnnnnnnnnnnnnnnnnnnnnnnnnnnnnnnnnnnnnnnnnnnnnnnnnnnnnnnnnnnnnnnnnnnnnnnnnnnnnnnnnnnnnnnnnnnnnnnnnnnnnnnnnnnnnnnnnnnnnnnnnnnnnnnnnnnnnnnnnnnnnnagatatgtacgaccaagtgctgaagtttggtgcttacattgtggacggcttgagggagtgctcccagcctgtgctggtttacattcctccccaggctgagctgcggggcggctcctgggtagtgattgactcctccatcaatccccggcacatggagatgtatgctgaccgagaaagcagnnnnnnnnnnnnnnnnnnnnnnnnnnnnnnnnnnnnnnnnnnnnnnnnnnnnnnnnnnnnnnnnnnnnnnnnnnnnnnnnnnnnnnnnnnnnnnnnnnnnnnnnnnnnnnnnnnnnnnnnnnnnnnnnnnnnnnnnnnnnnnnnnnnnnnnnnnnnnnnnnnnnnnnnnnnnnnnnnnnnnnnnnnnnnnnnnnnnnnnnnnnnnnnnnnnnnnnnnnnnnnnnnnnnnnnnnnnnnnnnnnnnnnnnnnnnnnnnnnnnnnnnnnnnnnnnnnnnnnnnnnnnnnnnnnnnnnnnnnnnnnnnnnnnnnnnnnnnnnnnnnnnnnnnnnnnnnnnnnnnnnnnnnnnnnnnnnnnnnnnnnnnnnnnnnnnnnnnnnnnnnnnnnnnnnnnnnnnnnnnnnnnnnnnnnnnnnnnnnnnnnnnnnnnnnnnnnnnnnnnnnnnnnnnnnnnnnnnnnnnnnnnnnnnnnnnnnnnnnnnnnnnnnnnnnnnnnnnnnnnnnnnnnnnnnnnnnnnnnnnnnnnnnnnnnnnnnnnnnnnnnnnnnnnnnnnnnnnnnnnnnnnnnnnnnnnnnnnnnnnnnnnnnnnnnnnnnnnnnnnnnnnnnnnnnnnnnnnnnnnnnnnnnnnnnnnnnnnnnnnnnnnnnnnnnnnnnnnnnnnnnnnnnnnnnnnnnnnnnnnnnnnnnnnnnnnnnnnnnnnnnnnnnnnnnnnnnnnnnnnnnnnnnnnnnnnnnnnnnnnnnnnnnnnnnnnnnnnnnnnnnnnnnnnnnnnnnnnnnnnnnnnnnnnnnnnnnnnnnnnnnnnnnnnnnnnnnnnnnnnnnnnnnnnnnnnnnnnnnnnnnnnnnnnnnnnnnnnnnnnnnnnnnnnnnnnnnnnnnnnnnnnnnnnnnnnnnnnnnnnnnnnnnnnnnnnnnnnnnnnnnnnnnnnnnnnnnnnnnnnnnnnnnnnnnnnnnnnnnnnnnnnnnnnnnnnnnnnnnnnnnnnnnnnnnnnnnnnnnnnnnnnnnnnnnnnnnnnnnnnnnnnnnnnnnnnnnnnnnnnnnnnnnnnnnnnnnnnnnnnnnnnnnnnnnnnnnnnnnnnnnnnnnnnnnnnnnnnnnnnnnnnnnnnnnnnnnnnnnnnnnnnnnnnnnnnnnnnnnnnnnnnnnnnnnnnnnnnnnnnnnnnnnnnnnnnnnnnnnnnnnnnnnnnnnnnnnnnnnnnnnnnnnnnnnnnnnnnnnnnnnnnnnnnnnnnnnnnnnnnnnnnnnnnnnnnnnnnnnnnnnnnnnnnnnnnnnnnnnnnnnnnnnnnnnnnnnnnnnnnnnnnnnnnnnnnnnnnnnnnnnnnnnnnnnnnnnnnnnnnnnnnnnnnnnnnnnnngttattcttgatttaggggaattgaagcttgggttcagtctctgaggacagagggaaaggtagttggcctacctctcacctgcatgttactgctggactagctgttgcatgtggctgggagctgcaaggccccagtgcgtgaggggccccagcagttccataggcggtgattttgatttggcagaggaggagccagagagaactgctctttctgcactggtggaaactaggtacttatgccatgtggagggccag

SEQ ID NO: 30030 - DNA, 762 bp, Macaca Mulatta
tgaattcccaccttaaatcattatctttcagtttcctcagtaaaacagaatgaaatgattcatataacttctctgtacttttacagctcctgttctaaatcaaaaggctatggaggcccaggaaatcagacaaaaggtaaacaaaagctgcgttaggtattcagtgttcctttgtatgtgtttcaaatgatgagttatttcctatttatgaatttgataaattctaacagtttatatgtggcattttagattcatctaaaaccaccattgtcaaaacagttgttgaagaaatagatcctcgtggcaaagttctctcatccagagttcacaccgtggaagagaaagccaccaaagtcaacaacaagaatgaacagagggtgccttcctgaactcccgcctctgagaaacaatggcccccaaattaaaataccaaaatgaaactcgtttcctaaataagggtccccttatttttctgcttttcttccaatgaattaagacaagttatttttagaatagtaccatttctttggctttttctctatggtggtgtttcaataaaagttcttcctgttgcaagtcatcttccctggttctagccaatctttgcattttagatacaccttccaatgggagctgaattttgtctttaatttcttctgtttaattcaatggtcttcacaagttggaagtaagtttaacatgaaaactagttggagtctttttcacttctctgtaaaattttgtctcccttgtctcagtaca

SEQ ID NO: 30031 - DNA, 896 bp, Macaca Mulatta
acatgctgcaggcagtgtacgggctggacggcatccgcctgcgccgccgccagtactacaccatgcccaacttcaggcagtacgagaaccgcaccggccacatcctggtgcagtggtcgctgggcagccccctgcacttcgccggctggcactgctcctggtgcttcacgcccgagggcatctacttcaagctcgtgtctgcccagaatggtgacttcccgcgctggggtgactacgaggacaagcgggacctgaactacatccgcggcctgatccgcaccgggggctggttcgacggcacgcagcaggagtacccgcccgcggaccccagcgagcacatgtatgcgcccaagtacctgctgaagaactacgaccagttccgctacctgctggacaacccctaccaggagcccaggagcacggcggcgggagggcggcgccacaggggtcccgagggaaggctgcccgcccggggcaaactggatgaggctgaaggctagggctgcatgatctgatagggctcgtggcagggcgggggtggcgacggcccctagcgctatctccctgcctcctgccagctccgtggttcttgagaggaccaggagtgggtggggagtgggagtgggggtagggtttccctacttcacccttgtgaatcaagggtcaggtctttgagctcagaaaacatgcctcctgttgggagagggcgcaggccgtgatggctgggtggcccttctgactgccaagactgctgtggctgtggccaggaggtgccactggagtgtgtgtggtggtccctgggtagcgggggacggcaggcagggctggggaagacagcctgcagggtcccaccaggcagcctctggggcgtggccagaccaggaaaaaagcccacc

SEQ ID NO: 30032 - DNA, 844 bp, Macaca Mulatta
tctccaccaatgggagctgcaggggaaaggctgcctggtccaatcagaacagggctgcctttatatatacgggtagaaaagcctaggctttcggtttttcgtcatttagcagggtttagaagttcgcaatggctcgtaccaagcagacagctcgcaagtccacgggtgggaaggcgccacgcaagcagttggccaccaaggctgctagaaagagcgctccggctaccggcggcgtgaagaagccccaccgctaccggcccggcaccgtggctctgcgtgagatccgccgctaccagaagtcgaccgagttactgattcgcaaactgccattccagcgtctggtccgtgagatcgcgcaggatttcaagaccgatctgcgcttccagagctcggcggtgatggcgctgcaggaggcctgcgaggcctacctggtggggctctttgaggacaccaacctatgcgccattcacgccaagcgagtgactatcatgcccaaggacatccagcttgctcgccgcattcgtggggagagggcgtaaattttgttgtgaatgtgtgctaaccaaaacccaaaggctcttttcagagccaaccaccttttctataaaagttgctgtgtactgttgctgtccgtaaactggaatctctgttcagtcaaggtaagtaagcattcttacctctatccctctcccctcccttcacggaattggtgtaaaaaatttaataattgggcagttattaaaacagcctttaaggtactctagtttttaatttctgtttttggggggccgctttctggggcttgggtacctccggcttgggaactttcttggccacctttgac

SEQ ID NO: 30033 - DNA, 1293 bp, Macaca Mulatta
ggacttagccaggtgcttggcctggtgggagcatggcttcacagaggccacaaaatgttacaagtcatgatggatggaaatatgttctaacagcatctgcctctattcaatttaattcttatttctgtgttactcatgtgcattggtctttctacatagttattttatcactggcaatatttgttctgatttagtgttctgtattttaaggtgtatgtatcatttctaattttaagttattttaaaaaaattcatcgtatgaatgttcgtggttcccatcgtgacaattatgtatttgtgtaaaatttgtttagaagtacatttttgcattattcatatgcttcccagagaagctcatttacttagaaaataaggcaagttttgaagcctgcctaaatgaagagatttaagaaagcttaaggtaggtttgcttgtcttgaaatcttcaatatgaaggactattaattccaagattaaaagttcatatatgggctacagatataactagcccatttgtatttgcattcccttttatttccaaaataaaatgagaaatcttttttgaataatttcatccctatatatagtttttatattaatttgtttttcttatccaaataaagatgtcaataggaattgcatttagtccaaggcctttttcataaactgagcctctttttaaattatttcaatttcaatggggacaggaactaggatagatgtgattcctgcattttttttaccttaaatctgtctttgtttctaaaggtagatcatcttgaatatttgcttaaaattgctagtgatttcattaccaagttacttgaaaaaaatgttctgtatgcatttaattctgaaattagtctacgaaggggctgctagtatatgtcagacatgaaaactattttaaagctgactttgttgccttatcttgaaaagaatctagataggtgcttttaactgggatattaactttttttagaatgacacagctgaacggtgttaataatagtgtgtccagattgcaaaattgacgtacttatttggtttaagcaggaatcctagaagcagatggatgaggataagaataggtcattttctattcactgtcccttacaatttaagggaaaggaaaagaacactagctaaggaagggaaaaggggaagtggtatcctaaaaagtagcaaccctccattttataattttggttttttgggtttggctttgggtttggtttggggccaaatttggggaaatggtggaactcctaaacaaagtaccaaaaagggctg

SEQ ID NO: 30034 - DNA, 3573 bp, Macaca Mulatta
  misc_feature (1)...(3573): n = A,T,C or G
gctcgtggaagggaggaggaggaatgtggaaggcggcggcgcgcgagctgacaggcggttcctcgggcgggctgcggcgacggcccgagcgctcctccttcgccgaggttgcgcgccccctcctcgccgtgccccgggcccgcgcgggatcgtgcgtcgtcccgccgcgtccctgaagggaaggaagcgaggnaggcggcggcggcggcgcccgggagccggagccttcgcggcgcccacgtccctcccccgccgcaccccgccccggcgcgagaggagagcgcgagagccccagccgcgggcgggcggcgaagatggcagaggcaccggcctccccggccccgctctctccgctggaagtggagctggacccggagttcgagccccagagccgtccgcgctcctgtacgtggcccctgcaaaggccggagctccaagcgagccctgctaagccctcgggggagacggccgccgactccatgatccccgaggaggaggacgatgaagacgacgannnnnnnnnnnnnnnnnnnnnnnnnnnnnnnnnnnnnnnnnnnnnnnnnnnnnnnnnnnnnnnnnnnnnnnnnnnnnnnnnnnnnnnnnnnnnnnnnnnnnnnnnnnnnnnnnnnnnnnnnnnnnnnnnnnnnnnnnnnnnnnnccgctgccccgccgcagccgggggcggctgggggctccgggcagccgaggaaatgctcgtcgcggcggaacgcctggggaaacctgtcctacgcggacctgatcacccgcgccatcgaaagctccccggacaaacggctcactctgtcccagatctacgagtggatggtgcgttgcgtgccctacttcaaggataagggcgacagcaacagctctgccggctggaagnagagctcttggtggatcatcaacccggatggggggaagagcggaaaagccccccggcggcgggctgtctccatggacaacagcaacaagtataccaagagccgtggccgcgcagccaagaagaaggcagccctgcagacagcccctgaatcagctgacgacagtccctcccagctctccaagtggcctggcagccccacgtcacgcagcagtgatgagctggatgcgtggacggacttccgttcacgcaccaattctaacgccagcacagtcagtggccgcctgtcgcccatcatggcaagcacagagttggatgaagtccaggacgacgatgcacctctctcgcccatgctctacagcagctcagccagcctgtcaccttcagtgaacaagccatgcacggtggaactgccacggctgactgatatggcaggcaccatgaatctgaatgatgggctgactgagaacctcatggacgacctgctggataacatcacgctcccgccatcccagccatcacccactgggggacttatgcagcggagctctagcttcccatacaccaccaagggctcgggcctgggctccccaaccagctccttcaacagcacggtgtttggaccttcatctctgaactccctacgccagtctcccatgcagaccatccaagagaacaagccagctaccttctcttccatgtcacactatggtaaccagacactccaggacctgctcacttcggactcacttagccacagcgatgtcatgatgacacagtcggaccccttgatgtctcaagccagcaccgctgtgtctgcccagaattcccgccggaacgtgatgcttcgcaatgacccaatgatgtcctttgctgcccagcctaaccagggaagtttggtcaatcagaacttgctccaccaccagcaccaaacccagggcgctcttggtggcagccgtgccttgtcgaattctgtcagcaacatgggcttgagtgagtccagcagccttgggtcagccaaacaccagcagcagtctcctgtcagccagtctatgcaaaccctctcggactctctctcaggctcctccttgtactcaactagtgcaaacctgcccgtcatgggccatgagaagttccccagcgacttggacctggacatgttcaatgggagcttggaatgtgacatggagtccattatccgtagcgaactcatggatgctgatgggttggattttaactttgattccctcatctccacacagaatgttgttggtttgaacgtggggaacttcactggtgctaagcaggcttcatctcagagctgggtgccaggctgaaggatcactgaggaaggggaagtgggcaaagcagnagaccctcaaactgacacaagacctacagagaaaaccctttgccaaatctgctctcagcaagtggacagtgataccgtttacagcttaacacctttgtgaatcccacgccattttcctaacccagcagagactgttaatggccccttaccctgggtgaagcacttacccttggaacagaactctaaaaagtatgcaaaatcttccttgtacggggtggtgagccgcctgccagtggaggacagcacccctcagcaccacccaccctcgttcagagcacaccgtgagcccccgtcggccattctgtggtgttttaatattgcgatggtttatgggatgttttaagtgttgttcttgtgtttgttttcctttgactttctgagtttttcacatgcattaacttgcggtatttttctgttaaaatgttaaccgtccatcccctagcaaatttaaaaacagaaggaaaatgttgtaccagttaccattccgggttcgagcatcacaagcttttgagcccatggaactccataaactaacaaattacataaactaaagggggattttctttcttctttcgtttggtagaaaattatccttttctaaaaactgaacaatggcacaattgtttgctatgcgcacccgtccaggactgaaccatgcataggcaaaacgagtggagcacagcatccggcccagtgtgtttccagttctgagtcagggtgatctgtgnnnnnnnnnnnnnnnnnnnnnnnnnnnnnnnnnnnnnnnnnnnnnnnnnnnnnnnnnnnnnnnnnnnnnnnnnnnnnnnnnnnnnnnnnnnnnnnnnnnnnnnnnnnnnnnnnnnnnnnnnnnnnnnnnnnnnnnnnnnnnnnnnnnnnnnnnnnnnnnnnnnnnnnnnnnnnnnnnnnnnnnnnnnnnnnnnnnnnnnnnnnnnnnnnnnnnnnnnnnnnnnnnnnnnnnnnnnnnnnnnnnnnnnnnnnnnnnnnnnnnnnnnnnnnnnnnnnnnnnnnnnnnnnnnnnnnnnnnnnnnnnnnnnnnnnnnnnnnnnnnnnnnnnnnnnnnnnnnnnnnnnnnnnnnnnnnnnnnnnnnnnnnnnnnnnnnnnnnnnnnnnnnnnnnnnnnnnnnnnnnnnnnnnnnnnnnnnnnnnnnnnnnnnnnnnnnnnnnctgtgatctcctgtcagtgtcttcagctaatgtgaccagtgttgttctgctggttagaaactaggatattgatatttcaggaaagaaatcagctcagctctccactcattgccaaatgccactaaagggtttagttttaaggagaaagaaaagg

SEQ ID NO: 30035 - DNA, 1219 bp, Macaca Mulatta
  misc_feature (1)...(1219): n = A,T,C or G
gcccggctaatttttgcatttttagtagagacggggtttcaccatattggccaggatggtctcaatcttgtgacttgcccacctcggcctcccagagtgctgggattataggtgtgagccaccgcgcccggccnnnnnnnnnnnnnnnnnnnnnnnnnnnnnnnnnnnnnnnnnnnnnnnnnnnnnnnnnnnnnnnnnnnnnnnnnnnnnnnnnnnnnnnnnnnnnnnnnnnnnnnnnnnnnnnnnnnnnnnnnnnnnnnnnnnnnnnnnnnnnnnnnnnnnnnnnnnnnnnnnnnnnnnnnnnnnnnnnnnnnnnnnnnnnnnnnnnnnnnnnnnnnnnnnnnnnnnnnnnnnnnnnnnnnnnnnnnnnnnnnnnnnnnnnnnnnnnnnnnnnnnnnnnnnnnnnnnnnnnnnnnnnnnnnnnnnnnnnnnnnnnnnnnnnnnnnnnnnnnnnnnnnnnnnnnnnnnnnnnnnnnnnnnnnnnnnnnnnnnnnnnnnnnnnnnnnnnnnnnnnnnnnnnnnnnnnnnnnnnnnnnnnnnnnnnnnnnnnnnnnnnnnnnnnnnnnnnnnnnnnnnnnnnnnnnnnnnnnnnnnnnnnnnnnnnnnnnnnnnnnnnnnnnnnnnnnnnnnnnnnnnnnnnnnnnnnnnnnnnnnnnnnnnnnnnnnnnnnnnnnnnnnnnnnnnnnnnnnnnnagtgctttctcgaactcgcatttactaaaatattttcatgactgccaagtttgaatagcctgctgtgttcatagaggctcacactggcgatctctagtggctggctaaagcttgcattgcaaaggatacaatctctggtctaatgtatatatgccttaaatgtagttgcgttcaaacttgggagctacaggtgcaacttgattttatgacaaatgtctgccacatcatttgcacaagcagtgctcgtctaggacagctaaatcaggcgagctttcaattaaatgtactactagaccctacttagcggctaactagcccaagagcagacagcccagggacggactgcaagtcgaaagcgcgggcggaagctccgcagctcccgcctggtggctccatcggctgctttcatcagtcagcaggacccaaccgcagtggcgtccctacaacacagaccgcagcttgggtctcaggtcggcccctgagagccacttccggtgactagcttctacttccggagatgatgact

SEQ ID NO: 30036 - DNA, 603 bp, Macaca Mulatta
cacactcacttctcgctgtggcccaggcccctgaggccactgtcctggaggcagagacccgcaggctggatgagtccctgactcaaagtctgacatccccagggccagtcctgctacaccccagccccagcactacccaagccacttccaggtagcagccacagccaggagcacacagacagaagactgtaccgtggggtcacggcccctctgcacacctacaggcttgccaaaggaaaagcctggctctgttaggcacccaggcgccccaggtcagcaggtgttcccaggaagaggaagtaaatctgcaacacttgggagggccccaactcacctgggaataaggcagattgcatttgcttgctccctaatggaatcacccagaggagtgccttgccctggctgagggacatccactgcctctcgtctagaatttattttcctagcatttcaccacctccttcaacttccccttcaacaataaaccctgggatctttgcattagttttctgctgctgtctccacttgtgcagctgtgcagcagcaccacatcaagggagtttatcagggaagaacttgccaaagattcctgtcgaggtagca

SEQ ID NO: 30037 - DNA, 779 bp, Macaca Mulatta
  misc_feature (1)...(779): n = A,T,C or G
ggggtctcttttccggttagcgcggcgtgagaagccatgagcagcaaagtctctcgcgacaccctgtacgaggcggtgcgggaagtcctgcacgggaaccagcgcaagcgccgcaagttcctggagacggtggagttgcagatcagcttgaagaactatgacccccagaaggacaagcgcttctcaggcaccgtcaggcttaagtccactccccgccccaagttctctgtgtgtgtcctgggggaccagcagcactgtgacgaggccaaggccgtggatatcccccacatggacatcgaggcgctgaaaaaactcaacaagaataaaaaactggtcaagaaactagccaagaagtatgatgcgtttttggcctcagagtctctgatcaagcagattccacgaatcctcggcccaggcctaaataaggcaggaaagttcccttccctgctcacacacaacgaaaacatggtggccaaagtggatgaggtgaagtccacaatcaagttccaaatgaagaaggtgttatgtctggctgtagctgttggtcacgtgaagatgacagacgatgagcttgtgtataacattcacctggctgtcaacttcttggtgtcattgctcaagaaaaactggcagaatgtccgggccttatatatcaagagcaccatggggcaaaccccagcgccctatattaaggcacattttgaaataaattctggttacccgcccaaacataaactttaataanactaaannanttaacatgttcggcccccctttga

SEQ ID NO: 30038 - DNA, 200 bp, Macaca Mulatta
acaggtataaaaatcttcccacagcttcccgaaagctacagttcctggagttacagaaggacttagtagatgattttaggatacgattaacacaggtgatgaaagaagagactagagcttcccttggctttcgatactgtgcaattcttaatgctgtgaactacatctcaacagtactagcagattgggctgacgatgtt

SEQ ID NO: 30039 - DNA, 1796 bp, Macaca Mulatta
  misc_feature (1)...(1796): n = A,T,C or G
ngacaacagtgaaatactccaaaatacgttcttttcatggtcagtgtcagcttgatttatgtcgacatgaggttcggtatggctgtttaagggaagatgagtgcttttatgcccatagtcttgtggaactgaaagtgtggataatgcaaaatgaaacaggtnnnnnnnnnnnnnnnnnnnnnnnnnnnnnnnnnnnnnnnnnnnnnnnnnnnnnnnnnnnnnnnnnnnnnnnnnnnnnnnnnnnnnnnnnnnnnnnnnnnnnnnnnnnnnnnnnnnnnnnnnnnnnnnnnnnnnnnnnnnnnnnnnnnnnnnnnnnnnnnnnnnnnnnnnnnnnnnnnnnnnnnnnnnnnnnnnnnnnnnnnnnnnnnnnnnnnnnnnnnnnnnnnnnnnnnnnnnnnnnnnnnnnnnnnnnnnnnnnnnnnnnnnnnnnnnnnnnnnnnnnnnnnnnnnnnnnnnnnnnnnnnnnnnnnnnnnnnnnnnnnnnnnnnnnnnnnnnnnnnnnnnnnnnnnnnnnnnnnnnnnnnnnnnnnnnnnnnnnnnnnnnnnnnnnnnnnnnnnnnnnnnnnnnnnnnnnnnnnnnnnnnnnnnnnnnnnnnnnnnnnnnnnnnnnnnnnnnnnnnnnnnnnnnnnnnnnnnnnnnnnnnnnnnnnnnnnnnnnnnnnnnnnnnnnnnnnnnnnnnnnnnnnnnnnnnnnnnnnnnnnnnnnnnnnnnnnnnnnnnnnnnnnnnnnnnnnnnnnnnnnnnnnnnnnnnnnnnnnnnnnnnnnnnnnnnnnnnnnnnnnnnnnnnnnnnnnnnnnnnnnnnnnnnnnnnnnnnnnnnnnnnnnnnnnnnnnnnnnnnnnnnnnnnnnnnnnnnnnnnnnnnnnnnnnnnnnnnnnnnnnnnnnnnnnnnnnnnnnnnnnnnnnnnnnnnnnnnnnnnnnnnnnnnnnnnnnnnnnnnnnnnnnnnnnnnnnnnnnnnnnnnnnnnnnnnnnnnnnnnnnnnnnnnnnnnnnnnnnnnnnnnnnnnnnnnnnnnnnnnnnnnnnnnnnnnnnnnnnnnnnnnnnnnnnnnnnnnnnnnnnnnnnnnnnnnnnnnnnnnnnnnnnnnnnnnnnnnnnnnnnnnnnnnnnnnnnnnnnnnnnnnnnnnnnnnnnnnnnnnnnnnnnnnnnnnnnnnnnnnnnnnnnnnnnnnnnnnnnnnnnnnnnnnnnnnnnnnnnnnnnnnnnnnnnnnnnnnnnnnnnnnnnnnnnnnnnnnnnnnnnnnnnnnnnnnnnnnnnnnnnnnnnnnnnnnnnnnnnnnnnnnnnnnnnnnnnnnnnnnnnnnnnnnnnnnnnnnnnnnnnnnnnnnnnnnnnnnnnnnnnnnnnnnnnnnnnnnnnnnnnnnnnnnnnnnnnnnnnnnnnnnnnnnnnnnnnnnnnnnnnnnnnnnnnnnnnnnnnnnnnnnnnnnnnnnnnnnnnnnnnnnnnnnnnnnnnncatgttttagcagaatgaatttgtttaatataataaagtttgctacttatctgtatgtaggttgctaaaaaggattttcttaactcagattttaagccaaataaccatttaacactagtatttgttaaatggggtatttttctgtatttgtatgtttcactataataagggaattaaggataatgtgcattgagaatattttgaaaaataattaattgactcaaattttatttcttggtcttttgctgttaaatgatgattttgaaagattaaacttgtactgttggtattgtgttagtgtatggaccaatactgcctgtaataaagattttatatataga

SEQ ID NO: 30040 - DNA, 8139 bp, Macaca Mulatta
  misc_feature (1)...(8139): n = A,T,C or G
cgcagcttttcccggtcagatcatttggccctgcacctccggaggcatatgctggtgtgaggaatgctacctgtccagctgagcgtaagagctggatctcttagcggcacccaattcagcagggctgaatccccttcacagtgttaacacaaaagggcatcaccatcccacgatgtctgaaaccagaggaggaaaaagaaggcacacttcttttggtctgaaggtaacccccatcctgactacacgagaaccgtctttacgcgggcctgggagctcagtgacataaatgttgaagagacaggcattgttttccgtgctgtgtcctctgccatttaaagatgtttgtagcttgtacattttctgagctgtcagacattttgttattgataccttaaaggtcacctaccacaaattgatggctagagcaagaccttttaaatttggatgaatctcccgtcatcccaccccttaacccctttttacagaaattttagttacgatctgagtaagctagaacacacatccaatctgttaccagcaagcagcatgaaagtagaaacgaagaagcagatggagaggtcccattacctgcaaagaaagggcactcaggcagccctttgcaatcgcgatggcggccactagatatcactcgcaacttgtcattctgccatgccctgaagaaaaccaacattgaatctttcannnnnnnnnnnnnnnnnnnnnnnnnnnnnnnnnnnnnnnnnnnnnnnatctgttcgagcagaggggcagttgaannnnnnnnnnnnnnnnnnnnnnnnnnnnnnnnnnnnnnnnnnnnnnnnnnnnnnnnnnnnnnnnnnnnnnnnnnnnnnnnnnnnnnnnnnnnnnnnnnnnnnnnnnnnnnnnnnnnnnnnnnnnnnnnnnnnnnnnnnnnnnnnnnnnnnnnnnnnnnnnnnnnnnnnnnnnnnnnnnnnnnnnnnnnnnnnnnnnnnnnnnnnnnnnnnnnnnnnnnnnnnnnnnnnnnnnnnnnnnnnnnnnnnnnnnnnnnnnnnnnnnnnnnnnnnnnnnnnnnnnnnnnnnnnnnnnnnnnnnnnnnnnnnnnnnnnnnnnnnnnnnnnnnnnnnnnnnnnnnnnnnnnnnnnnnnnnnnnnnnnnnnnnnnnnnnnnnnnnnnnnnnnnnnnnnnnnnnnnnnnnnnnnnnnnnnnnnnnnnnnnnnnnnnnnnnnnnnnnnnnnnnnnnnnnnnnnnnnnnnnnnnnnnnnnnnnnnnnnnnnnnnnnnnnnnnnnnnnnnnnnnnnnnnnnnnnnnnnnnnnnnnnnnnnnnnnnnnnnnnnnnnnnnnnnnnnnnnnnnnnnnnnnnnnnnnnnnnnnnnnnnnnnnnnnnnnnnnnnnnnnnnnnnnnnnnnnnnnnnnnnnnnnnnnnnnnnnnnnnnnnnnnnnnnnnnnnnnnnnnnnnnnnnnnnnnnnnnnnnnnnnnnnnnnnnnnnnnnnnnnnnnnnnnnnnnnnnnnnnnnnnnnnnnnnnnnnnnnnnnnnnnnnnnnnnnnnnnnnnnnnnnnnnnnnnnnnnnnnnnnnnnnnnnnnnnnnnnnnnnnnnnnnnnnnnnnnnnnnnnnnnnnnnnnnnnnnnnnnnnnnnnnnnnnnnnnnnnnnnnnnnnnnnnnnnnnnnnnnnnnnnnnnnnnnnnnnnnnnnnnnnnnnnnnnnnnnnnnnntttttccagctttctgtggctgaggggcttggtgagattnnnnnnnnnnnnnnnnnnnnnnctagaattttttatagcttagatataaaaggtctccaacaaagacctttgcaatatattttaattacaaacacttgattttgggaattgcacatattaacctcacaatattactagctcatttttaaatgtctggacattctgaaataatttccggttacagaattatcctttttaggatcatcttctaattcagataatcttattctgatgaagcgagaactatgaacattgaaacaaggacaatttgtgttggatggtattcaaaggaattttttaaaacattaagcaacagtgtaatgattttcaggtcaaattatggcttcacaaatatgtgctctatattgtctgccaggtctcaaaaattcatcaggcaatttccctccaacaagggctgcagttctagtgataaatagcatcttgagctacacaatctactactcatcaaccagtggnnnnnnnnnnnnnnnnnnnnnnnnnnnnnnnnnnnnnnnnnnnnnnnnnnnnnnnnnnnnnnnnnnnnnnnnnnnnnnnnnnnnnnnnnnnnnnnnnnnnnnnnnnnnnnnnnnnnnnnnnnnnnnnnnnnnnnnnnnnnnnnnnnnnnnnnnnnnnnnnnnnnnnnnnnnnnnnnnnnnnnnnnnnnnnnnnnnnnnnnnnnnnnnnnnnnnnnnnnnnnnnnnnnnnnnnnnnnnnnnnnnnnnnnnnnnnnnnnnnnnnnnnnnnnnnnnnnnnnnnnnnnnnnnnnnnnnnnnnnnnnnnnnnnnnnnnnnnnnnnnnnnnnnnnnnnnnnnnnnnnnnnnnnnnnnnnnnnnnnnnnnnnnnnnnnnnnnnnnnnnnnnnnnnnnnnnnnnnnnnnnnnnnnnnnnnnnnnnnnnnnnnnnnnnnnnnnnnnnnnnnnnnnnnnnnnnnnnnnnnnnnnnnnnnnnnnnnnnnnnnnnnnnnnnnnnnnnnnnnnnnnnnnnnnnnnnnnnnnnnnnnnnnnnnnnnnnnnnnnnnnnnnnnnnnnnnnnnnnnnnnnnnnnnnnnnnnnnnnnnnnnnnnnnnnnnnnnnnnnnnnnnnnnnnnnnnnnnnnnnnnnnnnnnnnnnnnnnnnnnnnnnnnnnnnnnnnnnnnnnnnnnnnnnnnnnnnnnnnnnnnnnnnnnnnnnnnnnnnnnnnnnnnnnnnnnnnnnnnnnnnnnnnnnnnnnnnnnnnnnnnnnnnnnnnnnnnnnnnnnnnnnnnnnnnnnnnnnnnnnnnnnnnnnnnnnnnnnnnnnnnnnnnntcctaaaggacttatcagttgttccataactagaagcattctttgattttaaatttgaagctgttcagtttgcagctggggatatgtgcacggttgggaacttatacacatagagccgttaacagcttaagcagctgcagtagacctgattttctgtttgcagtatagggattgatttcaagggagttacagtatttgaaaagttacgacgttcagcctttgaggtttgaagaatcccttttcctgctctgatcttaagttgtttggaaaaagattcatgcttctgcatccacctctgccctcattctgtcaattgtgtgtggactctgagaagcctgcttgataacttgtcttaagttctattaaggcagttagactgagatttctaatgactttaccataaagattatacttctgcctggcatcatttctccaaaacactataggacatttgttttcaaaagcagttgagtaacagcaacataaaccacacttttttaaaaaatgagcacttttcattcacttgaaagcttaagtgggcaaaaggaggaagattgtcaggagaagaacttacaaaatgctacagtgtttacaaatgccagttccaggtgattaaagaggccattttcattatggttcaaatttggaatagtttatgcaaagattgcgttcattttttacaattctttttaactttaaattgccatttgtgttttaaacataattctgcactgtgaaatcagttcattagaatgataacatttatatggataaggatgcagtattccttattctgtacttgatttattatacnnnnnnnnnnnnnnnnnnnnnnnnnnnnnnnnnnnnnnnnnnnnnnnnnnnnnnnnnnnnnnnnnnnnnnnnnnnnnnnnnnnnnnnnnnnnnnnnnnnnnnnnnnnnnnnnnnnnnnnnnnnnnnnnnnnnnnnnnnnnnnnnnnnnnnnnnnnnnnnnnnnnnnnnnnnnnnnnnnnnnnnnnnnnnnnnnnnnnnnnnnnnnnnnnnnnnnnnnnnnnnnnnnnnnnnnnnnnnnnnnnnnnnnnnnnnnnnnnnnnnnnnnnnnnnnnnnnnnnnnnnnnnnnnnnnnnnnnnnnnnnnnnnnnnnnnnnnnnnnnnnnnnnnnnnnnnnnnnnnnnnnnnnnnnnnnnnnnnnnnnnnnnnnnnnnnnnnnnnnnnnnnnnnnnnnnnnnnnnnnnnnnnnnnnnnnnnnnnnnnnnnnnnnnnnnnnnnnnnnnnnnnnnnnnnnnnnnnnnnnnnnnnnnnnnnnnnnnnnnnnnnnnnnnnnnnnnnnnnnnnnnnnnnnnnnnnnnnnnnnnnnnnnnnnnnnnnnnnnnnnnnnnnnnnnnnnnnnnnnnnnnnnnnnnnnnnnnnnnnnnnnnnnnnnnnnnnnnnnnnnnnnnnnnnnnnnnnnnnnnnnnnnnnnnnnnnnnnnnnnnnnnnnnnnnnnnnnnnnnnnnnnnnnnnnnnnnnnnnnnnnnnnnnnnnnnnnnnnnnnnnnnnnnnnnnnnnnnnnnnnnnnnnnnnnnnnnnnnnnnnnnnnnnnnnnnnnnnnnnnnnnnnnnnnnnnnnnnnnnnnnnnnnnnnnnnnnnnnnnnnnnnnnnnnnnnnnnnnnnnnnnnnnnnnnnnnnnnnnnnnnnnnnnnnnnnnnnnnnnnnnnnnnnnnnnnnnnnnnnnnnnnnnnnnnnnnnnnnnnnnnnnnnnnnnnnnnnnnnnnnnnnnnnnnnnnnnnnnnnnnnnnnnnnnnnnnnnnnnnnnnnnnnnnnnnnnnnnnnnnnnnnnnnnnnnnnnnnnnnnnnnnnnnnnnnnnnnnnnnnnnnnnnnnnnnnnnnnnnnnnnnnnnnnnnnnnnnnnnnnnnnnnnnnnnnnnnnnnnnnnnnnnnnnnnnnnnnnnnnnnnnnnnnnnnnnnnnnnnnnnnnnnnnnnnnnnnnnnnnnnnnnnnnnnnnnnnnnnnnnnnnnnnnnnnnnnnnnnnnnnnnnnnnnnnnnnnnnnnnnnnnnnnnnnnnnnnnnnnnnnnnnnnnnnnnnnnnnnnnnnnnnnnnnnnnnnnnnnnnnnnnnnnnnnnnnnnnnnnnnnnnnnnnnnnnnnnnnnnnnnnnnnnnnnnnnnnnnnnnnnnnnnnnnnnnnnnnnnnnnnnnnnnnnnnnnnnnnnnnnnnnnnnnnnnnnnnnnnnnnnnnnnnnnnnnnnnnnnnnnnnnnnnnnnnnnnnnnnnnnnnnnnnnnnnnnnnnnnnnnnnnnnnnnnnnnnnnnnnnnnnnnnnnnnnnnnnnnnnnnnnnnnnnnnnnnnnnnnnnnnnnnnnnnnnnnnnnnnnnnnnnnnnnnnnnnnnnnnnnnnnnnnnnnnnnnnnnnnnnnnnnnnnnnnnnnnnnnnnnnnnnnnnnnnnnnnnnnnnnnnnnnnnnnnnnnnnnnnnnnnnnnnnnnnnnnnnnnnnnnnnnnnnnnnnnnnnnnnnnnnnnnnnnnnnnnnnnnnnnnnnnnnnnnnnnnnnnnnnnnnnnnnnnnnnnnnnnnnnnnnnnnnnnnnnnnnnnnnnnnnnnnnnnnnnnnnnnnnnnnnnnnnnnnnnnnnnnnnnnnnnnnnnnnnnnnnnnnnnnnnnnnnnnnnnnnnnnnnnnnnnnnnnnnnnnnnnnnnnnnnnnnnnnnnnnnnnnnnnnnnnnnnnnnnnnnnnnnnnnnnnnnnnnnnnnnnnnnnnnnnnnnnnnnnnnnnnnnnnnnnnnnnnnnnnnnnnnnnnnnnnnnnnnnnnnnnnnnnnnnnnnnnnnnnnnnnnnnnnnnnnnnnnnnnnnnnnnnnnnnnnnnnnnnnnnnnnnnnnnnnnnnnnnnnnnnnnnnnnnnnnnnnnnnnnnnnnnnnnnnnnnnnnnnnnnnnnnnnnnnnnnnnnnnnnnnnnnnnnnnnnnnnnnnnnngtcctaaaaattaccagatatacattcagacgctcaaggtttctttcctgtaattactgtactgctaaaagtggagtcatggatagaaatatgcaatgagactcatgtgaatagaccatgaaccctggaaattctccaaccccgccatctcagagcacaaattcacccaaacaagctactgaggctatcagtaaaattatactcatggagagtcacacatcgggtaagggcaattttaaaagtaggactgtgattaaacattcaggctttagacttccacgatgaactcagaccacaggcctcaaaaaacatccactgttttctcctcccaatgttagaaagaagagggagaaggaaatgtaccaggatgagggggtaaaataaccaattgagtgtcaaaggaaagctgccgggttccttaatctcactgaagtcaagtcttctgactgggcttctttccatgtgttgtctgaaaaaaactgaagtaccgtgaaaggttacacattcagcaaacgatgaaaataatagctattctttattaaacactatgtgccaagcgataggctaggcaatttttagatacgttatctccaacctgtacaacatttctatactttatgcatgggaaacgaaggcatgggaagtgtggcttagttgtttgtggatggagaaatagtaaatggcagagtaggaaagtgaaaccgtctgtctgtgacctggnnnnnnnnnnnnnnnnnnnnnnnnnnnnnnnnnnnnnnnnnnnnnnnnnnnnnnnnnnnnnnnnnnnnnnnnnnnnnnnnnnnnnnnnnnnnnnnnnnnnnnnnnnnnnnnnnnnnnnnnnnnnnnnnnnnnnnnnnnnnnnnnnnnnnnnnnnnnnnnnnnnnnnnnnnnnnnnnnnnnnnnnnnnnnnnnnnnnnnnnnnnnnnnnnnnnnnnnnnnnnnnnnnnnnnnnnnnnnnnnnnnnnnnnnnnnnnnnnnnnnnnnnnnnnnnnnnnnnnnnnnnnnnnnnnnnnnnnnnnnnnnnnnnnnnnnnnnnnnnnnnnnnnnnnnnnnnnnnnnnnnnnnnnnnnnnnnnnnnnnnnnnnnnnnnnnnnnnnnnnnnnnnnnnnnnnnnnnnnnnnnnnnnnnnnnnnnnnnnnnnnnnnnnnnnnnnnnnnnnnnnnnnnnnnnnnnnnnnnnnnnnnnnnnnnnnnnnnnnnnnnnnnnnnnnnnnnnnnnnnnnnnnnnnnnnnnnnnnnnnnnnnnnnnnnnnnnnnnnnnnnnnnnnnnnnnnnnnnnnnnnnnnnnnnnnnnnnnnnnnnnnnnnnnnnnnnnnnnnnnnnnnnnnnnnnnnnnnnnnnnnnnnnnnnnnnnnnnnnnnnnnnnnnnnnnnnnnnnnnnnnnnnnnnnnnnnnnnnnnnnnnnnnnnnnnnnnnnnnnnnnnnnnnnnnnnnnnnnnnnnnnnnnnnnnnnnnnnnnnnnnnnnnnnnnnnnnnnnnnnnnnnnnnnnnnnnnnnnnnnnnnnnnnnnnnnnnnnnnnnnnnnnnnnnnnnnnnnnnnnnnnnnnnnnnnnnnnnnnnnnnnnnnnnnnnnnnnnnnnnnnnnnnnnnnnnnnnnnnnnnnnnnnnnnnnnnnnnnnnnnnnnnnnnnnnnnnnnnnnnnnnnnnnnnnnnnnnnnnnnnnnnnnnnnnnnnnnnnnnnnnnnnnnnnnnnnnnnnnnnnnnnnnnnnnnnncagtcgcctcagtactttttctttctggatttcatctctagaaatttgaagtgtttaagacaagagtccaccctttgtgcaaggcaagaaccaatgaatggactccttgtgtgaattattgcgtcttcttccaaagcaggttcaccaagactttcacagagattcatttttgttgagaagtaagggtcaataggaggatagaatttggatccaaatctagtgataaaagtgtccaagcaatcaaaaagtaagatattctagggacatgccaacatcttccctttctgctaatttcatgctccaaagatatggnnnnnnnnnnnnnnnnnnnnnnnnnnnnnnnnnnnntgtgttctagttttcccatggcagaattttgtaattacatccagactgtagtgtatatttttttcctcaaactttattacattggatggatattgttgaactggggcactggtgccaatagtcaaggctctttcctat

SEQ ID NO: 30041 - DNA, 367 bp, Macaca Mulatta
  misc_feature (1)...(367): n = A,T,C or G
tggtgttgctttccaccgtcctccatcctggaggaagtcaccttccacctctacctgatcccaagtgactgctccattcggaaggnaggccatagatgatgaagaaacgaaattccagtttgtgcgaatccacaagccacccccgctgaccccactttatatgggctgtcgttacaccgtgtctgggtctggttcagggatgctggagatactccccaaggnaggaactggagctctgctatcgaagccctggagaagcccagctgttctcggagttctacgttggccacttgggatcagggatcaggctgcaaatgaaagacaagaaagatgagactctggtgtgggaggccttggtgaaaccagg

SEQ ID NO: 30042 - DNA, 712 bp, Macaca Mulatta
  misc_feature (1)...(712): n = A,T,C or G
tctccaactcctggtcaggttctgcctctactctangctgggctcnntaatcgaggagatcgccttccaccaccagtctttntcctggacaactttgggcagccctccattgggtccacttcctctnggtcctccacctccagttccaggctacggcccccctcctggcncaccacctccacaacagggaccacctccacctccaggcccctttccacctcgtccacccggtccacttgggccaccccttacactagctcctcctccgcatcttcctggaccacctccaggtgccccaccaccagctccgcatgtgaacccagctttctttcctccaccaactaacagcggcatgcctacatcagatagccgaggtccaccaccaacagacccatatggtcgacctccaccatatgataggggtgactatggcccccctggaagnnnnnnnnnnnnnnnnnnnnnnnnnnnnnnnnnnnnnnnnnnnnnnnnnnnnnnnnnnnnnnnnnnnnnnnnnnnnnnnnnnnnnnnnnnnnnnnnnnnnnnnnnnnnnnnnnnggtgattatgggagtgctattgagacattggtaactgcaatttctttaattaaacaatccaaagtgtccgctgatgatcgttgcaaagttcttattagttctttgcaagattgccttcatggaattgagtccaagtcttacggttctggatcaa

SEQ ID NO: 30043 - DNA, 5957 bp, Macaca Mulatta
  misc_feature (1)...(5957): n = A,T,C or G
gtagcagcgttggcggcaggaggcggcggccgcgtcgacgtcgacccagactggagcgacgtttaaagaaggggcagaatcgccggggagtgcggcttcttcttgttgggggactcccagccttccgcgcgtcccgaggtggagaagcggcggcgccgcgaagcaggnaggcatggagagtagaaaactgatttctgctacagacattcagtactctggcagtctgctgaactccttgaatgagcaacgtggccatggactcttctgtgatgttaccgttattgtggaagaccgaaaattccgggcccacaagaatattctttcagcttctagtacctacttccatcagctcttctctgttgctgggcaagttgttgaactgagctttataagagcagagatctttgcagaaattctcaattatatctatagttctaaaattgttcgtgttagatcagatttgcttgatgaattaattaaatcagggcagttattaggagtgaaatttatagcagagcttggtgtcccattgtcacaggttaaaagcatctcaggtacagctcaggatggtaatactgaacctttacctcctgattctggtgacaagaaccttgtaatacagaagtcaaaagatgaagcccaagataacggggctactataatgcctattataacagagtctttttcattatctgccgaagattatgaaatgaaaaagatcattgttaccgattcnnnnnnnnnnnnnnnnnnnntcattttttgctccgagattctgcccacaaaggagactttgccaagtaataacacagtggcacaggtccagtctaacccaggccctgttgctatttcagatgttgcacctagtgctagcaataactctccccctttaacaaatatcacacctactcagaaacttcctactcctgtgaatcaggcaactctgagccaaacacaaggaagtgaaaaattgttggtatcttcagctccaacacatctgactcctaatattattttgttaaatcagacaccactttctacaccaccaaatgtcagttcttcacttccaaatcatataccttcttcaatcaatttacttgtgcagaatcagcagacaccaaacagtgctattttaacaggaaacaaggccaatgaagaggaggaggaggaaattatagatgatgatgatgacactattagctccagtcctgactcggccgtcagtaatacatctttggtcccacaggctgatacctcccaaaataccagttttgatggatcattaatacagaagatgcagattcctacacttcttcaagaaccactttccaattccttaaaaatttcagatataattactagaaataccaatgatccaggcttaggatcaaaacatctaatggagggtcagaagatcattactttagatacagctactgaaattgaaggcttatcgactggttgcaagggttatgcaaatatcggtgaagatacttatgatatagtgatccctgtcaaagatgaccctgatgaaggggacgccagacttgagaatgaaataacaaaaacgtctgggcagcgagatgccaaacaaacgtatgaaagtaaaacatgatggtccctatgagttaatagtagannnnnnnnnnnnnnnnnnnnnnnnnnnnnnnnnnnnnnnnnnnnnnnnnnnnnnnnnnnnnnnnnnnnnnnnnnnnnnnnnnnnnnnnnnnnnnnnnnnnnnnnnnnnnnnnnnnnnnnnnnnnnnnnnnnnnnnnnnnnnnnnnnnnnnnnnnnnnnnnnnnnnnnnnnnnnnnnnnnnnnnnnnnnnnnnnnnnnnnnnnnnnnnnnnnnnnnnnnnnnnnnnnnnnnnnnnnnnnnnnnnnnnnnnnnnnnnnnnnnnnnnnnnnnnnnnnnnnnnnnnnnnnnnnnnnnnnnnnnnnnnnnnnnnnnnnnnnnnnnnnnnnnnnnnnnnnnnnnnnnnnnnnnnnnnnnnnnnnnnnnnnnnnnnnnnnnnnnnnnnnnnnnnnnnnnnnnnnnnnnnnnnnnnnnnnnnnnnnnnnnnnnnnnnnnnnnnnnnnnnnnnnnnnnnnnnnnnnnnnnnnnnnnnnnnnnnnnnnnnnnnnnnnnnnnnnnnnnnnnnnnnnnnnnnnnnnnnnnnnnnnnnnnnnnnnnnnnnnnnnnnnnnnnnnnnnnnnnnnnnnnnnnnnnntattgtatgcaaaaggtcatatgtctgtctgacaagcttgcggagacattttaacattcatcttgggagaagaagtatccgtgccgttactgtgagaaggtatttcctcttgcagaatatcgcacaaagcatgaaattcatcacacaggggagcgaaggtatcagtgtttggcctgtggcaaatctttcatcaactatcagtttatgtcttcacatataaagtcagttcatagtcaagatccttctggggactcaaagctttatcgtttacatccatgcaggtctttacaaattagacaatatgcatatctttccgatagatcaagcactatgcctgcaatgaagggtgatggtattgggtataaggttgacactggaaaagaaacctcccagtagggaccactacattctactcagaacaagccaatgacctgggaagatatttttattcagcaggaaaatgattcaatttttaaacaaaatgtaacagatggcagtactgagtttgaatttataataccagaatcttactaaactcctttgaaatactagaaagttgtgttttggatgatggggcaggggtttcagaagatctgtaaaacaaggtgcaaataagttaatttgatctgccacattatctgaaagaagtgtagtgggatttttgttcataatttttagaagcaaatttttctgaaagttttgactagaggtgagaccccctccccaagtatctgtttatatagttagttttcagctcatttaaaaggcaaaaattaaaagcttggagagatagttttctgaatagaatttgaagcagtctgaatgttctttgaaaataactggagttattagcataccctagtacgtcttacaactttccccttccatgttagcactttactgctgaattctcaattttcttaacattgagacaataaatgtgtgttttgtcttgtatatggcataaagagtaaagttttagagttgttctggaaaatgtcagaataagtctctgcttgggttgtgtcatctgctagtccaagcggacagcaacctcctgctaccctctctccatgaaaatagccatgcagacaagtctctcatctgaagaacaaattagatttagctaatcagaattaatccttgctttcattgcnnnnnnnnnnnnnnnnnnnnnnnnnnnnnnnnnnnnnnnnnnnnnnnnnnnnnnnnnnnnnnnnnnnnnnnnnnnnnnnnnnnnnnnnnnnnatggcggataggaggacatgaaaagttctgttgcatgtatttttaattctctggctaccacgttgtagagaatggaatgaagatttcctttttgcttcttatggttaaaaatattcccatgaaaattttcaaattttgaatctgaaagccaccaaatgaatctttatgtataaatccttgtaaatgatagattccatgggtgagactttacatattttgggtgggaggctactggcatatatttttaaatgttcatattatgtagaatctccaataggaagtctttatttgaaatagttgaatcagtgatctagtattttcctttcagcaagatttgttaggtttttaccccttctaaaataagttttattccatccgcaaattgctgcaatattatagcaatcagaaactacataaggaatgttatataggcttgtcagttcccatttttcttgacaacaataaataccacttttcttctttttaaaatgacacatatttaaacacttagaaaataaagttaacacttactgaagtgctagtactaaactgtgctagtactaaaaggaagcaggttggaacatacatatagcctagcatttataacagaattgttgaacgtctgtaaatgannnnnnnnnnnnnngcaaaggaaaaaattgatactggaaaagattgttgtgcatagttattagtcatttgtaaccttgcttaagtatttcttagtccaacatagatattttctttctccttaccatgtattttaaaaaatagcctatttcttgactttgaacttaaagctttaatcataatttctcatgtatacatcgttcttctgatggtaagctggatttgaaggtagtggtttcagtgtttcttaagttggtagctgagggtatcaggcatcagtacatgcaataatacaagaaaaaaaatcctttgcttgccaaggggtagagtgatgtgcatttatctgttttctgttctgtaagtctagaccttcaaaccatttgtaaactaacccctgggaaatttgaaattaccttataacttaagactttgtgatctctggaatcaccatatctgtttcttttttgtgtagatattgataacatcactctttgactatagtgtgcagtctgaaatggtctcagtgaaaatttgtttgagttnncataatgctatttcaccnnnnnnnnnnnnnnnnnnnnnnnnnnnnnnnnnnnnnnnnnnnnnnnnnnnnnnnnnnnnnnnnnnnnnnnnnnnnnnnnnnnnnnnnnnnnnnnnnnnnnnnnnnnnnnnnnnnnnnnnnnnnnnnnnnnnnnnnnnnnnnnnnnnnnnnnnnnnnnnnnnnnnnnnnnnnnnnnnnnnnnnnnnnnnnnnnnnnnnnnnnnnnnnnnnnnnnnnnnnnnnnnnnnnnnnnnnnnnnnnnnnnnnnnnnnnnnnnnnnnnnnnnnnnnnnnnnnnnnnnnnnnnnnnnnnnnatgatacgggtgccggcagagcttccagatctttcagactcaactgctaggtcaattagtttgtcataataaaacttggcagtttctacaagcctattatgacaaaccaggaactaattctataatggaaaactatgtgttctgaataatagggatgtaattatttgctgctgctgtgctctgtaaattctgaatatgacatttaaactgtgcctactaaaggtatcttctggagttttttgggaggagagaaactggaaaattaaattgtatttttgccagaagactcttacttgcatgcgtctcagggtcttcagtttttctataagtttccatatccaaagttcgcagttcatgtgaaatacttctttggggcaaaagtccttcattcctggtatttattggattggaaatctgtagcaagatgctgtttaaaattatcatgtggtttttctatcttatacttagctctctggctcttgaacttccttttcgtctttgaagttagcttcagatttgctcctatgctaaattacctgtaaatattctggataggaactacttgaaatagtaatttgttaagagatacgacaaaatgaaaatgcttaaactacagaagttttaaaatgccataacaatcttgcaagactaactttaaaatatactttaaatgattattatgattttggtggtaacgatcccccacacacaactactatgaagaaataatgccacatttttccccattgtaccaaaaagataaaaaatggtaaacattgctcaaggtattttgtattgtcaaggcatgcatattctaaagaattaaatgctaacttaacagcactggctttctggctggtcaaccatatgaaaccttgttcattcctcccagtactgtaatgttcacacttgtacaatcttccctgtcatgactttaagttctacttttcattaaccatggcctgatattagttcttagagcttcttgtggcaaaaataaaatgatttaattctga

SEQ ID NO: 30044 - DNA, 105 bp, Macaca Mulatta
agatgggcagtgatgacaccaaatataagcataaaaagatgttttaaaactacacatcctgaaactcagcacagcaggcacctgcagcttccagtactgtaacag

SEQ ID NO: 30045 - DNA, 771 bp, Macaca Mulatta
ggggttatgggagggctctggtatccgggatggaggggtgtcgctttctgtggctggcgttggatccaccctgggtctccagccagggctgcagagagggtagagccgtttcttaggccagcgtggagtgggacaggaggtgccgagagaggactgaggtggcttgggacatggaagcactgcagccttccagcccggcatccagcactgcagccgccgcggcggcccaagagctccgaccctttcacgcgcgcgcatgtggaggaatggcggcggcggaacaaaacgaccctcacttacgtggccgctgtcgccgtggccatgctgggggcgtcctacgctgccgtacccctttatcggctctattgtcagactactggacttggaggatcagcagttgcaggtcatgcctcagaccagattgaaaacatggtgcctgttaaggatcgaatccttaaaattagctttaatgcagatgtgcatgcaagtctccagtggaactttagacctcagcaaacagaaatatatgtggtgccaggagagactgcactggcgttttacagagctaagaatcctactgacaaaccaataattggaatttctacatacaatgttgttccatttgaagctggacagtatttcaataaaatacaggtaaaacaaagtgtaagctttacagaatatgataaaggtacatgaaactgtttactatgaaacttagtgtttttagtagatcttgtgatttctgaaaaactattttctttctaattt

SEQ ID NO: 30046 - DNA, 411 bp, Macaca Mulatta
aggcccgtctactggcatgccaacgacacccccctgacgtgggagagtcagctctccggccgggacttcaccaccttcctggacccctccaccggcggcaggcagctgcaggtcttccagccggccatctacaagtgcttcgtgcagcaggagctcgtggcccagttcaaccccgccaccagtccggagacgctggaggctcagtggagagagaacgatgcccagtggcgggaggcaaggaaggccctgccgggcagagcggactccgtgctcaaggggttgaagctggtgctgcttgtcggcaccgtcctggtcctgctgggggcgctgctcaagttcatccgcccttccccgggcaagagaagcaaacaggtgctgatggtgaaataaagcgaacccccgatgcacaag

SEQ ID NO: 30047 - DNA, 745 bp, Macaca Mulatta
  misc_feature (1)...(745): n = A,T,C or G
gggattacttcccgttttctcgatctgctgttagtccgcctcgactcgtagttcgccctcgacatgccggagccagcgaagtccgctcctgcgcccaagaagggctcgaagaaggcagtgactaaggcccagaagaaagacggcaagaagcgcaagcgcagccgcaaggagagctactccgtgtacgtgtacaaggtgctgaagcaggtccaccccgacaccggcatctcctctaaggccatgggaatcatgaactccttcgtcaacgacatctttgagcgcattgcgggtgaggcttcccgtctggcgcattacaacaagcgctcgaccatcacctccagggagatccagacggctgtgcgcctgctgctgcccggggagttggccaagcacgcggtgtcggagggcaccaaggccgtcaccaagtacaccagcgctaagtaaacctgccaaggagggactttctctggaatttcctgatatgaccaagaaagcttcttaccaaaagaagcacaattgccttcggttacctcattatctactgcatgcagaaaagaagactgaagaatgcaactatacctagatgaactttcccacaagataaagctggcctcttgatctcattcagattccaaagagaatcatttacaagttaattttctttctccttggtgcattccttcctcctaataaatcatttactgttccctcaaaaaattggtctacattaacccatnctcctctt

SEQ ID NO: 30048 - DNA, 231 bp, Macaca Mulatta
ttgcagctcagcagcaggagtcagctacgacccagaaagctgaacgggaggtgagccgcatggtggttgtgatggtaggatccttctgtgtctgctacgtgccctatgcagcctttgccatgtacatggtcaacaacgtaaccatgggctggaactacggcctgtcaccattcctgcattcttcttcaagagtgcttgcatctacaatcccatcatctactggctcatgaa

SEQ ID NO: 30049 - DNA, 660 bp, Macaca Mulatta
gggggcgcgctggcggccattgggccgcgcaggcactgtcaaggacagttttcgggacggggcccgcggctccaggcacccaacagcactgacggtgaacccttcacggccgcgcgatgcctcgacgcggcggccgccgccgccaccacctcagctgccctcgcgggcagcacgccgcgacaaaagcgcacgtcgcctagcgatggtgcggggcggggacatgggctgtatcggcccgtcggagacttccgcttccggggccgcggccatcgctctcccgggcgtagaaggcccgcctggcaacgcgcagtttcagaccttggccctcacagtccataagtctcggtcgccctcgcctcgcagcctgccacccgcggtcggctgcccgcctcctcagccagccatgctggagcatctgagctcgctgcccacgcagatggattacaagggccagaagctagctgaacagatgtttcagggaattattcttttttctgcaatagttggatttatctacggatacgtggctgaacagttcgggtggactgtctatatagttatggccgggatttgctttttcatggttgctgacacttcctcccaggggccaattttcccgggatccctctcaaggggttcctgttatagactcaagaaaaa

SEQ ID NO: 30050 - DNA, 588 bp, Macaca Mulatta
  misc_feature (1)...(588): n = A,T,C or G
caatgtgcctggtccactgggccgtgagcagccaccgagtgggggcaacttggcacttagaacccgcagcagggacgtcggtttgcgatcgggactcggcgaggannnnnnnnnnnnnnnnnnnnnnnnnnnnnnnnnnnnnnnnnnnnnnnnnnnnnnnnnnatgacaaccagccgctgcagtcacctgcccgaagtcctgccagactgcaccagctcagctgcgcccgtggtgaagacggtggaggattgtggcagcctagtgaatgggcagccgcagtatgtcatgcaagtttcagccaaggacgggcagctgctgtcaacagtagtgcggactcttgccacccagannnnnnnnnnnnnnnnnnnnnnnnnnnnnnnnnnnnnnnnnnnnnnnnnnnnnnnnnnnnnnnnnnnnnnnnnnnnnnnnnnnnnnnnnnnnnnnnnnnnnnnnnnnnnnnnnnnnnnnnnnnnnnnnnnnnnnnnnnnnnnnnnnnnnnnnnnnnnnnnnnnnnnnnnnnnnnnnnnnnnnnnnnnnnnnnnnnnnnnnnnnagtggctgagaaatcctggcccccagcatgagaag

SEQ ID NO: 30051 - DNA, 108 bp, Macaca Mulatta
cagagtacactaaatctgtgatagatcttcgcccagaagatgtgggacatgaaagtggctccttgggagacagaagcaaatccgtcccaggcctcaatgtggatatgg

SEQ ID NO: 30052 - DNA, 910 bp, Macaca Mulatta
tgctcatttggatgctgtaaacttaacgttgtgaaaaatataaagacttatgttatccagtctctcttgggaaaatatgtaggtttaatcattcctgaattttccttagttcacacagatttatgtcctaaaaattggcattgggtaggtgtgtcaagttatcattttaaaaacatagaagcttgaacaagacatatcactccagtctagaatgtctatatgcagagtatccacaaaagaacccaacttcaaaattccttcatgtctatatgccttcaacattctttgtcttcaacgttctttcatgtctagaatatctatatgcagagtatccacaaaagaccccaaacttctttcatttaaagaaccaaacttctttaaataaaaatgactagcaataatgtagtattttaccatttacgaagagtttaacgataacaatattcatcttgagttaatttctcatgaataacattctcatttcttaaaatttgctgagtggaaagccagaaagtagagtgaagcaagtcatgtgtgtgtgagtagtcattggatacacgcgtaacagtgagcaggtttatcagctcctgccatggcgcagtgttctgattatcttttgctgcataagaactactccccaaattagtggcttcaagtaaaaacttactattgtgtaggatgattctgctgagccgggatttggaaagggcacgcaggaggtctcatctcttctcatctctgcttcacaatgcctgtaatttagctgggaggacccaaaaggctggaaaagctgatgggtgctgtgtctctccagtcttttcaggcaggcagcttggggtttcttacagcatggcggcctcagtgcaatctgacattgtatggcagcgcagagcagccacggtgaatgttc

SEQ ID NO: 30053 - DNA, 90 bp, Macaca Mulatta
agaaaactaaatccatctcagaatgctgcaggcaccagccattcagaatctcctgtgtgttctagtagagacgctgtatcttctcctcag

SEQ ID NO: 30054 - DNA, 655 bp, Macaca Mulatta
  misc_feature (1)...(655): n = A,T,C or G
tgaatggagacaacgcctttgcaaagagacccagggataatgctaaaacatcaaagaacagaagcaaggtgagnagcctcccaccctcgctctgtcatcacctagcatccctggagacaagtctgtgaccgtgcactacatttggtgactctcagtccattctggaaggtgggaagggagccagccagcagcattaaagccctactgtgtggcaggggagaagctagggaagatcccccatgttctgtcagngccttcaatgatattgcccaatacttctctaagaaagaatgggaaaagatgaaattctcggagaaaatcagctatgtgtatatgaagataaactatgaggccatgactaaactaggtnctaggtttcaatgtcaccctcccacctttcatgcgtaataaacaggccacagacttccaggggaatgattctgataatgaccgtaactgcgggaatnnnnnnnnnnnnnnnnnnnnnnnnnnnnnnnnnnnnnnnnnnnnnnnnnnnaagatcatgctcaagaagccagcagaggaaggcaacaattcgaagggagtgccagaagcatctggcccacagaacgatgggaaacagccgtgccccccgggaaaaccaagtacctctaagaagattaacaagagatct

SEQ ID NO: 30055 - DNA, 350 bp, Macaca Mulatta
ggagcaccgctgtgcagccgctgctgcccaggccccacggcgctttgagtgtggcacctgtggcaagaaagtgggctcagctgctcggctgcaggcacatgaggcggcccatgcggctgctgggcctggagaggtcctggctaaggagcctcctgcccctcgagccccacgggccactcgtgcaccagttgcctctccagcaggccttggaggcactgctacagcatcccctgcagcccctgcccgccgccggggtctagagtgcagcgagtgcaagaagctgttcagcacagagacatcactgcaggtgcaccggcgtatccacacaggtgagcggccgtacccatgtc

SEQ ID NO: 30056 - DNA, 1335 bp, Macaca Mulatta
  misc_feature (1)...(1335): n = A,T,C or G
ggaagcagtggnnnnnnnnnnnnncgnnnnnnnnnnnnnnngaagtagacttgccgtagcctcgggagaggggcggaggctcagaggcacaccacgtggggtttgctatcggagctgagtctccggccggcgtccaatttgagtctaggttggagttggaaccgtggagatgcggaaggaaaccccgccccccctagtgcccccggcggcccgggagtggaatcttccccctaatgcgcccgcctgcatggaacgacagttggaggctgcgcggtaccggtccgatggggcgcttctcctcggggcctccagcctgagtggccgctgctgggccggctccctctggctttttaaggacccttgtgccgcccccaacgaaggcttctgctccgctggagtccaaacggaggctggagtggctgacctcacttgggttggagagagaggtattctggtggcctctgattcaagtgctgttgaattgtgggaactagatgagaatgaaacacttattgtcagcaagttcttgcaagtatgagcatgatgacattgtgtctacagtctgtgtcctgagctctggcacacaagctgtcagtggtagcaaagacttctgcatcaaaggtttgggaaccttgctcagcaggtggtacgtgaattcatacccgagctcatgctgcaccgggtcaccttgtggttgctgccctctccttacaaggaaactctgtgttttctttcatgccagcgaggacaacagaattttactctgggatacccgctgtcccaagccagcatcacagattggctgcagtgcgcctggctaccttcctacctcactggcttggcatcctcagcaacagtgaagtctttgtctttggtgcatgagaatgggacagtctcccttgtggataccaagagtaccagctgtgtcctgagctcagctgtacattcccagcgtgtcacctggggctggtgttctccccaccccgggtttcccttcctggcctctctcagtgaaaaactgctcacttgctgctgctggactccagcccttttttgaagggttttacaaaccccaacccccccgaagactcttgtgaaaaaattgcaactttgggcccccggcttccatatacttcccctgggttcacacaaagctgggggctgggggaaacacccacgggtctctccacccaatcttcatttgcccccactaaaaccctctgccccgtgccccctgggaacctgtgcgcagacgtggctccctgagacgcgaaaccgggatttctccccacacccccgcgagccgtgcgccccctcacggggatgtggtgccag

SEQ ID NO: 30057 - DNA, 300 bp, Macaca Mulatta
gacctttgacttctgtgacctttctcctgcagaaggagctggaggaccttgtccttaaggagcacgccagcatagatgcccagtcgggggcggaggcccctaaccccagcacttcagcttcccccatttagtccccgccacctgccaaggacgaggccgggacaacagagagggagaaaccacagtgacagctgcatctcccacacgcgacaccaagctcctcaaggacagctgagccccaaccaggcctggacccggcttaaccggcagttcttatctggggagcttagaacatcccca

SEQ ID NO: 30058 - DNA, 393 bp, Macaca Mulatta
gtcagggttctggatataaggcttgactctcagaatggttcctgtgccgaagatcagcttgttggcgtcccctacagcacagaagtaaggggcagagtctttcatctggagctccttcaaaaggaggtaactgtaccttttcgagttactaaggaatgaagaaaaacgacctttctcctccaaaccatccagagcattgtaagagagaagtgtgggtgcttcgccatcatgttgctggtaccaggacagcccattgaacccagacgtctggtacgtgcagttgatctggacaatgactccttccatagctgtcatctcagtgggctggtcaatgttttgtcctgtagtgactcccatcttcatggaaatgtaaagaaggaaagctccccacat

SEQ ID NO: 30059 - DNA, 665 bp, Macaca Mulatta
  misc_feature (1)...(665): n = A,T,C or G
aacttgtacaaattggtttaaaatacattgctgccacnnnnnnnnnnnnnnnnnnnnnnnnnnnnnnnnnnnnnnnnnnnnnnnnnnnnnnnnnnnnnnnnnnnnnnnnnnnnnnnnnnnnnnnnnnnnnnnnnnnnnnnnnnnnnnnnnnnnnnnnnnnnnnnnnnnnnnnnnnnnnnnnnnnnnnnnnnnnnnnnnnnnnnnnnnnnnnnnnnnnnnnnnnnnnnnnnnnnnnnnnnnnnnnnnnnnnnnnnnnnnnnnnnnnnnnnnnnnnnnnnnnnnnnnnnnnnnnnnnnnnnnnnnnnnnnnnnnnnnnnnnnnnnnnnnnnnnnnnnnnnnnnnnnnnnnnnnnnnnnnnnnnnnnnnnnnnnnnnnnnnnnnnnnnnnnnnnnnnnnnnnnnnnnnnnnnnnnnnnnnnnnnnnnnnnnnnnnnnnnnnnnnnnnnnnnnnnnnnnnnnnnnnnnnnnnnnnnnnnnnnnnnnnnnnnntatgtacagatgataatagtggtgtggaatgtcgtcagtggcaaacatttcacagatttttattttgtttctgtcttcaacattttgacactgtgctaatagttatattcagtacatgaaaagatactactgtgttgaaagctttttaggaaattttgacagtatttttgtacaaaa

SEQ ID NO: 30060 - DNA, 3456 bp, Macaca Mulatta
  misc_feature (1)...(3456): n = A,T,C or G
atgagtagcaatatccacgcgaaccatctcagcctagacgcgtcctcctcctcctcttccnnnnnnnnnnnnnnnnnnnnnnnttcctcctcgtcctcggtccacgagcccaagatggatgcgctcatcatcccggtgaccatggaggtgccgtgcgacagccggggccaacgcatgtggtgggctttcctggcctcctccatggttactttcttcgggggcctcttcatcatcttgctctggcggacgctcaagtacctgtggaccgtgtgctgccactgcgggggcaagaccaaggaggcccagaagattaacaatggctcaagccaggcggatggcactctgaaaccagtggatgaaaaagaggaggcagtggccgccgaggtcggctggatgacctccgtgaaggactgggcgggggtgatgatatccgcccagacactgactggcagagtcctggttgtcttagtctttgctctcagcatcggtgcacttgtaatatacttcatagattcgtcaaacccaatagaatcctgccagaatttctacaaagatttcacattacagatcgacatggctttcaacgtgttcttccttctctactttggcttgcggtttattgcagccaatgataagctgtggttctggctggaagtgaactctgtagtggatttcttcacggtgcctcccgtgtttgtgtctgtgtacttaaacagaagttggcttggtttgagatttttaagagctctgagactgatacagttttcagaaattttgcagtttctgaatattcttaaaacaagtaattccatcaagctggtgaatctgctctccatatttatcagcacgtggctgactgcagccgggttcatccatttggtggagaattcaggggacccatgggaaaatttccaaaacaaccaggctctcacctactgggaatgtgtctatttactcatggtcacaatgtccaccgttggttatggggatgtttatgcaaaaaccacgcttgggcgcctcttcatggtcttcttcatcctcgggggactggccatgtttgccagctacgtccctgaaatcatagagttaataggaaaccgcaagaaatacgggggctcctatagtgcggttagtggaagaaagcacattgtggtctgcggacacatcactctggagagtgtttccaacttcctgaaggactttctgcataaggaccgggatgacgtcaatgtggagatcgtttttcttcacaacatctcccccaacctggagcttgaagctctgttcaaacgacattttactcaggtggaattttatcagggttcagtcctcaatccacatgatcttgcaagagtcaagatagagtcagcagatgcctgcctgatccttgccaacaagtactgcgctgacccggatgcggaggatgcctcgaacatcatgagagtaatctccataaagaactaccatccgaagataagaatcatcactcaaatgctgcagtatcacaacaaggcccatctgctaaacatcccgagctggaattggaaagaaggtgatgacgcaatctgcctcgcagagctgaagttgggcttcatagcccagagctgcctggctcaaggcctctccaccatgcttgccaacctcttctccatgaggtcattcataaagattgaggaagacacgtggcagaaatactacttggaaggagtctcaaatgaaatgtacacagaatatctctccagtgccttcgtgggtctgtccttccctactgtttgtgagctgtgttttgtgaagctcaagctcctaatgatagccattgagtacaagtctgccaaccgagagagccgtatattaattaatcctggaaaccatcttaagatccaagaaggtactttaggatttttcatcgcaagtgatgccaaagaagttaaaagggcatttttttactgcaaggcctgtcatgatgacatcacagatcccaaaagaataaaaaaatgtggctgcaaacggcttgaagatgagcagccgtcaacgctatcaccaaaaaaaaagcaacggaatggaggcatgcggaactcacccaactcctcgcctaagctgatgaggcatgaccccttgttaattcctggcaatgaccagattgacaacatggactccaatgtgaagaagtacgactctactgggatgtttcactggtgcgcgcccaaggagatagagaaggtcatcctgactcgaagtgaagccgccatgaccgtcctgagtggccatgtcgtggtctgcatctttggcgatgtcagctcagccctgatcggccttcggaacctggtgatgccgctccgtgccagcaactttcattaccatgagctcaagcacattgtgtttgtgggttctattgagtacctcaagcgggaatgggagacgcttcataacttccccaaagtgtccatattgcctggtacaccattaagtcgggctgatttaagggctgtcaacatcaacctctgtgacatgtgcgttatcctgtcagccaatcagaataatattgatgatacttcgctgcaggacaaggaatgcatcttggcgtcactcaacatcaaatctatgcagtttgatgacagcatcggggtcttgcaggctaattcccaagggttcacacctccaggaatggatagatcctctccagataacagcccagtgcacgggatgttacgtcaaccatccatcacaactggggtcaacatccccatcatcactgaactagtgaatgatactaatgttcagtttttggaccaagacgatgatgatgaccccgatacagaactgtacctcacgcagccctttgcctgcgggacagcgtttgccgtcagtgtcctggactcgctcatgagcgcgacatacttcaatgacaatatcctcaccctgatacggaccctggtgaccggaggagccacaccggaactggaggctctgattgctgaagagaacgcccttagaggtggctacagcaccccgcagacactggccaatagggaccgctgccgcgtggcccagttagctctgctcgatgggccatttgcagacttaggggatggtggttgttatggtgatctgttctgcaaagctctgaaaacatataatatgctttgttttggaatttaccggttgagagatgcccacctcagcacccccagtcagtgcacaaagaggtatgtcatcaccaaccccccctacgagtttgagctcgtgccgacggacctgatcttctgcttaatgcagtttgaccacaacgccggccagtcccgggccagcctgtcccattcctcccactcgtcgcagtcctccagcaagaagagctcctctgttcactccatcccatccacggcaaaccgacagaaccggcccaagtccagggagtcccgggacaaacagaagtacgtgcaggaagagcggctttga

SEQ ID NO: 30061 - DNA, 904 bp, Macaca Mulatta
gggggcagttcggcggtcccgcgggtctgtctcttgcttcaacagtgtttggacggaacagatccggggactctttcttccagcctccgagcgccctccgatttcctctccacttgcaacctccgggaccatcttctcggccatctcctgcttctgggacctgccagcaccgtttttgtggttagctccgtcttgccgaccaaccatgagctcccagattcgtcagaattattccaccgacgtggaggcagccgtcaacagcctggtcaatatgtacctgcaggcctcctacacctacctctctctgggcttctatttcgaccgcgatgatgtggctctggaaggcgtgagccacttcttccgcgaattggccgaggagaagcgcgagggctacgagcgtctcctgaagatgcaaaaccagcgtggcggccgcgctctttttcaggacgtcaagaagccagctgaagatgagtggggtaaaaccccggatgccatgaaagccgccatggccctggagaaaaaactgaatcaggcccttttggatcttcatgccctgggttctgcccacacggatccccatctctgtgacttcctggagactcacttcctaggatgagggaagtgaagctcatcaaaaagatgggtgaccaccctgaccaaccctcaaccaggctggcccggccccggaaggctggggctggggccaaagtatctcctttcgaaaagggcttcactcctcaagccacgacctaaaaagcttttctggaagcccaagcgaactttctgaaaaggggcccccttggcaaaaaataaataggggcttctggccaaacctctcccctccacccaaaaggggctttttttaaaaacctataaacctttggacaaaagggaaataaacttt

SEQ ID NO: 30062 - DNA, 130 bp, Macaca Mulatta
gcactggatccagcatcctctccgccctccaggacctcttctccgtcacctggctcaataggtccaaggtggaaaagcagctacaggtcatctcagtgctccagtgggtcctgtccttccttgtactggg

SEQ ID NO: 30063 - DNA, 3210 bp, Macaca Mulatta
  misc_feature (1)...(3210): n = A,T,C or G
cgggaagttgttcccgccaagacgctaaagnnnnnnnnnntgctgctggaggaagatcatggactgtcccgggaannnnnnnnnnnnnnnnnnnnnnnnnnnnnnnnnnnnnnnnnnnnnnnnnnnnnnnnnnnnnnnnnnnnnnnnnnnnnnnnnnnnnnnnnnnnnnnnnnnnnnnnnnnnnnnnnnnnnnnnnnnnnnnnnnnnnnnnnnnnnnnnnnnnnnnnnnnnnnnnnnnnnnnnnnnnnnnnnnnnnnnnnnnnnnnnnnnnnnnnnnnnnnnnnnnnnnnnnnnnnnnnnnnnnnnnnnnnnnnnnnnnnnnnnnnnnnnnnnnnnnnnnnnnnnnnnnnnnnnnnnnnnnnnnnnnnnnnnnnnnnnnnnnnnnnnnnnnnnnnnnnnnnnnnnnnnnnnnnnnnnnnnnnnnnnnnnnnnnnnnnnnnnnnnnnnnnnnnnnnnnnnnnnnnnnnnnnnnnnnnnnnnnnnnnnnnnnnnnnnnnnnnnnnnnnnnnnnnnnnnnnnnnnnnnnnnnnnnnnnnnnnnnnnnnnnnnnnnnnnnnnnnnnnnnnnnnnnnnnnnnnnnnnnnnnnnnnnnnnnnnnnnnnnnnnnnnnnnnnnnnnnnnnnnnnnnnnnnnnnnnnnnnnnnnnnnnnnnnnnnnnnnnnnnnnnnnnnnnnnnnnnnnnnnnnnnnnnnnnnnnnnnnnnnnnnnnnnnnnnnnnnnnnnnnnnnnnnnnnnnnnnnnnnnnnnnnnnnnnnnnnnnnnnnnnnnnnnnnnnnnnnnnnnnnnnnnnnnnnnnnnnnnnnnnnnnnnnnnnnnnnnnnnnnnnnnnnnnnnnnnnnnnnnnnnnnnnnnnnnnnnnnnnnnnnnnnnnnnnnnnnnnnnnnnnnnnnnnnnnnnnnnnnnnnnnnnnnnnnnnnnnnnnnnnnnnnnnnnnnnnnnnnnnnnnnnnnnnnnnnnnnnnnnnnnnnnnnnnnnnnnnnnnnnnnnnnnnnnnnnnnnnnnnnnnnnnnnnnnnnnnnnnnnnnnnnnnnnnnnnnnnnnnnnnnnnnnnnnnnnnnnnnnnnnnnnnnnnnnnnnnnnnnnnnnnnnnnnnnnnnnnnnnnnnnnnnnnnnnnnnnnnnnnnnnnnnnnnnnnnnnnnnnnnnnnnnnnnnnnnnnnnnnnnnnnnnnnnnnnnnnnnnnnnnnnnnnnnnnnnnnnnnnnnnnnnnnnnnnnnnnnnnnnnnnnnnnnnnnnnnnnnnnnnnntccttttagcagcccatcacctccttcaggtggcagtttcagtgagaccaagtcaggtgttccttgtagtcttgaggaaagatggtcttcgtatcagagccaaaccgataactcggtttcaagtgatcccttactgatgacacagtatttaaaaaagtctccatctccaaccaaagccagtgaaaagatttctgctaatatccaaacgtcccaacaagctctacaatttacagaatttgttgagaatgacaaactggtaggagttgctttgcgtcttgaaaacaactcagaacacataaatttaccattgccagaaaatgactttagcgactgtggaatctcctattctccacttcaaagtgatgaagacactcacgataccgatgaaaaactggatgattcacaacaacaactattttttaccgaaagctctaaagatggcagcctcgaagaagatgatgacagctgtgctttttttaaaaaacgacatggtcccttactgaaggaccaggatgagagctgccgcaaaatgaacagcttcttaactcaggataagtatgatgaaggattgtatagattcaatagtctaaatgatttgtctcaacctatttcccaaaataatgagagtactttgccttatgatctggcatgtactggtggtgattttgtgttgtttccacctgcgttggcaggaaagctcgctgcttctgttcatcaggtagctaaagcaaaacaagatgagccagaatttcactcagctcaatcaaataaacagaaacaggtaattgaagaatcagctgtttacaatcaggtttctcttccgttagttaannnnnnnnnnnnnnnnnnnnnnnnnnnnnnnnnnnnnnnnnnnnnnnnnnnnnnnnnnnnnnnnnnnnnnnnnnnnnnnnnnnnnnnnnnnnnnnnnnnnnnnnnnnnnnnnnnnnnnnnnnnnnnnnnnnnnnnnnnnnnnnnnnnnnnnnnnnnnnnnnnnnnnnnnnnnnnnnnnnnnnnnnnnnnnnnnnnnnnnnnnnnnnnnnnnnnnnnnnnnnnnnnnnnnnnnnnnnnnnnnnnnnnnnnnnnnnnnnnnnnnnnnnnnnnnnnnnnnnnnnnnnnnnnnnnnnnnnnnnnnnnnnnnnnnnnnnnnnnnnnnnnnnnnnnnnnnnnnnnnnnnnnnnnnnnnnnnnnnnnnnnnnnnnnnnnnnnnnnnnnnnnnnnnnnnnnnnnnnnnnnnnnnnnnnnnnnnnnnnnnnnnnnnnnnnnnnnnnnnnnnnnnnnnnnnnnnnnnnnnnnnnnnnnnnnnnnnnnnnnnnnnnnnnnnnnnnnnnnnnnnnnnnnnnnnnnnnnnnnnnnnnnnnnnnnnnnnnnnnnnnnnnnnnnnnnnnnnnnnnnnnnnnnnnnnnnnnnnnnnnnnnnnnnnnnnnnnnnnnnnnnnnnnnnnnnnnnnnnnnnnnnnnnnnnnnnnnnnnnnnnnnnnnnnnnnnnnnnnnnnnnnnnnnnnnnnnnnnnnnnnnnnnnnnnnnnnnnnnnnnnnnnnnnnnnnnnnnnnnnnnnnnnnnnnnnnnnnnnnnnnnnnnnnnnnnnnnnnnnnnnnnnnnnnnnnnnnnnnnnnnnnnnnnnnnnnnnnnnnnnnnnnnnnnnnnnnnnnnnnnnnnnnnnnnnnnnnnnnnnnnnnnnnnnnnnnnnnnnnnnnnnnnnnnnnnnnnnnnnnnnnnnnnnnnnnnnnnnnnnnnnnnnnnnnnnnnnnnnnnnnnnnnnnnnnnnnnnnnnnnnnnnnnnnnnnnnnnnnnnnnnnnnnnnnnnnnnnnnnnnnnnnnnnnnnnnctgtccaggtgctgtcatgatcctcttttatcttcctaatggtactgtcatattacacacgggagacttcagagcagatcccagcatggaacattctcttcttgcggaccagaaagtccatatgctgtacctagatacca

SEQ ID NO: 30064 - DNA, 5408 bp, Macaca Mulatta
  misc_feature (1)...(5408): n = A,T,C or G
tggactcggcgatggagctgctatttttagatacttttaaacacccgagcgctgagnnnnnnnnnnnnnnnnnnnnnnnnnnnnnnnnnnnnnnnnnnnnnnnnnnnnnnnnnnnnnnnnnnnnnnnnnnnnnnnnnnnnnnnnnnnnnnnnnnnnnnnnnnnnnnnnnnnnnnnnnnnnnnnnnnnnnnnnnnnnnnnnnnnnnnnnnnnnnnnnnnnnnnnnnnnnnnnnnnnnnnnnnnnnnnnnnnnnnnnnnnnnnnnnnnnnnnnnnnnnnnnnnnnnnnnnnnnnnnnnnnnnnnnnnnnnnnnnnnnnnnnnnnnnnnnnnnnnnnnnnnnnnnnnnnnnnnnnnnnnnnnnnnnnnnnnnnnnnnnnnnnnnnnnnnnnnnnnnnnnnnnnnnnnnnnnnnnnnnnnnnnnnnnnnnnnnnnnnnnnnnnnnnnnnnnnnnnnnnnnnnnnnnnnnnnnnnnnnnnnnnnnnnnnnnnnnnnnnnnnnnnnnnnnnnnnnnnnnnnnnnnnnnnnnnnnnnnnnnnnnnnnnnnnnnnnnnnnnnnnnnnnnnnnnnnnnnnnnnnnnnnnnnnnnnnnnnnnnnnnnnnnnnnnnnnnnnnnnnnnnnnnnnnnnnnnnnnnnnnnnnnnnnnnnnnnnnnnnnnnnnnnnnnnnnnnnnnnnnnnnnnnnnnnnnnnnnnnnnnnnnnnnnnnnnnnnnnnnnnnnnnnnnnnnnnnnnnnnnnnnnnnnnnnnnnnnnnnnnnnnnnnnnnnnnnnnnnnnnnnnnnnnnnnnnnnnnnnnnnnnnnnnnnnnnnnnnnnnnnnnnnnnnnnnnnnnnnnnnnnnnnnnnnnnnnnnnnnnnnnnnnnnnnnnnnnnnnnnnnnnnnnnnnnnnnnnnnnnnnnnnnnnnnnnnnnnnnnnnnnnnnnnnnnnnnnnnnnnnnnnnnnnnnnnnnnnnnnnnnnnnnnnnnnnnnnnnnnnnnnnnnnnnnnnnnnnnnnnnnnnnnnnnnnnnnnnnnnnnnnnnnnnnnnnnnnnnnnnnnnnnnnnnnnnnnnnnnnnnnnnnnnnnnnnnnnnnnnnnnnnnnnnnnnnnnnnnnnnnnnnnnnnnnnnnnnnnnnnnnnnnnnnnnnnnnnnnnnnnnnnnnnnnnnnnnnnnnnnnnnnnnnnnnnnnnnnnnnnnnnnnnnnnnnnnnnnnnnnnnnnnnnnnnnnnnnnnnnnnnnnnnnnnnnnnnnnnnnnnnnnnnnnnnnnnnnnnnnnnnnnnnnnnnnnnnnnnnnnnnnnnnnnnnnnnnnnnnnnnnnnnnnnnnnnnnnnnnnnnnnnnnnnnnnnnnnnnnnnnnnnnnnnnnnnnnnnnnnnnnnnnnnnnnnnnnnnnnnnnnnnnnnnnnnnnnnnnnnnnnnnnnnnnnnnnnnnnnnnnnnnnnnnnnnnnnnnnnnnnnnnnnnnnnnnnnnnnnnnnnnnnnnnnnnnnnnnnnnnnnnnnnnnnnnnnnnnnnnnnnnnnnnnnnnnnnnnnnnnnnnnnnnnnnnnnnnnnnnnnnnnnnnnnnnnnnnnnnnnnnnnnnnnnnnnnnnnnnnnnnnnnnnnnnnnnnnnnnnnnnnnnnnnnnnnnnnnnnnnnnnnnnnnnnnnnnnnnnnnnnnnnnnnnnnnnnnnnnnnnnnnnnnnnnnnnnnnnnnnnnnnnnnnnnnnnnnnnnnnnnnnnnnnnnnnnnnnnnnnnnnnnnnnnnnnnnnnnnnnnnnnnnnnnnnnnnnnnnnnnnnnnnnnnnnnnnnnnnnnnnnnnnnnnnnnnnnnnnnnnnnnnnnnnnnnnnnnnnnnnnnnnnnnnnnnnnnnnnnnnnnnnnnnnnnnnnnnnnnnnnnnnnnnnnnnnnnnnnnnnnnnnnnnnnnnnnnnnnnnnnnnnnnnnnnnnnnnnnnnnnnnnnnnnnnnnnnnnnnnnnnnnnnnnnnnnnnnnnnnnnnnnnnnnnnnnnnnnnnnnnnnnnnnnnnnnnnnnnnnnnnnnnnnnnnnnnnnnnnagatatcttcacagtcatcacttcttggagttggttaccttgcttctgtcaattccagtaacaagtgctcaccctggtgtgctgcaagccacaaaagatgttttgaagtttcttgcacagtcgcagaagggtcttcttttttttatgtcggaatatgaagcaacaaatttattgatccgagctctgtgtcacctttatgatcaagatgaggaggaaggtctccaatctgatggtgttattgatgatgcatttgccttgtggctacaggactcaacacagacattgcaatgtattacagaactgttcagccattttcagcgttgtacagccagtgaagaaactgaccattcggatctcttgggaaccctgcacaatctttatttgattacttttaatcctgtgggaagatcagctgttggccatgtttttagtctggagaaaaatctccaaagtcttattactttactcgaaagactattccaaagaagcctnnnnnnnnnnnnnnnnnnnnnnnnnnnnnnnnnnnnnnnnnnnnnnnnnnnnnnnnnnnnnnnnnnnnnnnnnnnnnnnnnnnnnnnnnnnnnnnnnnnnnnnnnnnnnnnnnnnnnnnnnnnnnnnnnnnnnnnnnnnnnnnnnnnnnnnnnnnnnnnnnnnnnnnnnnnnnnnnnnnnnnnnnnnnnnnnnnnnnnnnnnnnnnnnnnnnnnnnnnnnnnnnnnnnnnnnnnnnnnnagaatattgataacttgatgaccccagaaggagttggccttaccactgccttacgtgttctctgtaatgttgcatgcccaccacctcctgttgaaggnnnnnnnnnnnnnnnnnnnnnnnnnnnnnnnnnnnnnnnnnnnnnnnnnnnnnnnnnnnnnnnnnnnnnnnnnnnnnnnnnnnnnnnnnnnnnnnnnnnnnnnnnnnnnnnnnnnnnnnnnnnnnnnnnnnnnnnnnnnnnnnnnnnnnnnnnnnnnnnnnnnnnnnnnnnnnnnnnnnnnnnnnnnnnnnnnnnnnnnnnnnnnnnnnnnnnnnnnnnnnnnnnnnnnnnnnnnnnnnnnnnnnnnnnnnnnnnnnnnnnnnnnnnnnnnnnnnnnnnnnnnnnnnnnnnnnnnnnnnnnnnnnnnnnnnnnnnnnnnnnnnnnnnnnnnnnnnnnnnnnnnnnnnnnnnnnnnnnnnnnnnnnnnnnnnnnnnnnnnnnnnnnnnnnnnnnnnnnnnnnnnnnnnnnnnnnnnnnnnnnnnnnnnnnnnnnnnnnnnnnnnnnnnnnnnnnnnnnnnnnnnnnnnnnnnnnnnnnnnnnnnnnnnnnnnnnnnnnnnnnnnnnnnnnnnnnnnnnnnnnnnnnnnnnnnnnnnnnnnnnnnnnnnnnnnnnnnnnnnnnnnnnnnnnnnnnnnnnnnnnnnnnnnnnnnnnnnnnnnnnnnnnnnnnnnnnnnnnnnnnnnnnnnnnnnnnnnnnnnnnnnnnnnnnnnnnnnnnnnnnnnnnnnnnnnnnnnnnnnnnnnnnnnnnnnnnnnnnnnnnnnnnnnnnnnnnnnnnnnnnnnnnnnnnnnnnnnnnnnnnnnnnnnnnnnnnnnnnnnnnnnnnnnnnnnnnnnnnnnnnnnnnnnnnnnnnnnnnnnnnnnnnnnnnnnnnnnnnnnnnnnnnnnnnnnnnnnnnnnnnnnnnnnnnnnnnnnnnnnnnnnnnnnnnnnnnnnnnnnnnnnnnnnnnnnnnnnnnnnnnnnnnnnnnnnnnnnnnnnnnnnnnnnnnnnnnnnnnnnnnnnnnnnnnnnnnnnnnnnnnnnnnnnnnnnnnnnnnnnnnnnnnnnnnnnnnnnnnnnnnnnnnnnnnnnnnnnnnnnnnnnnnnnnnnnnnnnnnnnnnnnnnnnnnnnnnnnnnnnnnnnnnnnnnnnnnnnnnnnnnnnnnnnnnnnnnnnnnnnnnnnnnnnnnnnnnnnnnnnnnnnnnnnnnnnnnnnnnnnnnnnnnnnnnnnnnnnnnnnnnnnnnnnnnnnnnnnnnnnnnnnnnnnnnnnnnnnnnnnnnnnnnnnnnnnnnnnnnnnnnnnnnnnnnnnnnnnnnnnnnnnnnnnnnnnnnnnnnnnnnnnnnnnnnnnnnnnnnnnnnnnnnnnnnnnnnnnnnnnnnnnnnnnnnnnnnnnnnnnnnnnnnnnnnnnnnnnnnnnnnnnnnnnnnnnnnnnnnnnnnnnnnnnnnnnnnnnnnnnnnnnnnnnnnnnnnnnnnnnnnnnnnnnnnnnnnnnnnnnnnnnnnnnnnnnnnnnnnnnnnnnnnnnnnnnnnnnnnnnnnnnnnnnnnnnnnnnnnnnnnnnnnnnnnnnnnnnnnnnnnnnnnnnnnnnnnnnnnnnnnnnnnnnnnnnnnnnnnnnnnnnnnnnnnnnnnnnnnnnnnnnnnnnnnnnnnnnnnnnnnnnnnnnnnnnnnnnnnnnnnnnnnnnnnnnnnnnnnnnnnnnnnnnnnnnnnnnnnnnnnnnnnnnnnnnnnnnnnnnnnnnnnnnnnnnnnnnnnnnnnnnnnnnnnnnnnnnnnnnnnnnnnnnnnnnnnnnnnnnnnnnnnnnnnnnnnnnnnnnnnnnnnnnnnnnnnnnnnnnnnnnnnnnnnnnnnnnnnnnnnnnnnnnnnnnnnnnnnnnnnnnnnnnnnnnnnnnnnnnnnnnnnnnnnnnnnnnnnnnnnnnnnnnnnnnnnnnnnnnnnnnnnnnnnnnnnnnnnnnnnnnnnnnnnnnnnnnnnnnnnnnnnnnnnnnnnnnnnnnnnnnnnnnnnnnnnnnnnnnnnnnnnnnnnnnnnnnnnnnnnnnnnnnnnnnnnnnnnnnnnnnnnnnnnnnnnnnnnnnnnnnntgccaccaccaagaggaaggggcaggggacgatttggacagggtatacgacctcatgatatttttcgtcacagaaaacagaacacaagtagaccaccatctatgcatgtggatgactttgttgctgctgaaagtaaagaagtggttcctcaagatggaatacccccaccaaaacggccactcaaagtttcacagaagatttcatcccgtgnnnnnnnnnnnnnnnnnnnnnnnnnnnnnnnnnnnnnnnnnnnnnnnnnnnnnnnnnnnnnnnnnnnnnnnnnnnnnnnnnnnnnnnnnnnnnnnnnnnnnnnnnnnnnnnnnnnnnnnnnnnnnnnnnacaggttaccgcccaagtcctcgggaccgtgcttctagaggtcgtgggggacttggaccttcctgggctagtgcaaatagcggcagtggaggctcaagaggaaagtttgttagtggaggaagtggtagaggtcgtcatgtacgctcctttacacgataagaatccttttgggaacatcttaactgtatatgaacattttgtgaggacaataaaaataagacattga

SEQ ID NO: 30065 - DNA, 783 bp, Macaca Mulatta
atagagaaaatgtagatgtctaggaaagtgatagttttatgggcacagaggacaaatacggcagggtccaacaccaaggaagaggatactaatgatagctgacaagagaagagttaaggagaatagggtctgtgtcccagcatgaaactgtagtgctgtagcagaaagttattcatataagatgggaggctgcagcccatttacacctaggccactccagtcatagtggtgggtgtgggaagatttaagaaacaacaggcaggttttgggggataggccccagccccaataaaggatgggaagaggaaccaagaactttgacactgcacagcccatactctaaacactgagacaattgcttgttcacagacctcctcgtaacacctggacccaattcaactatcctcattcaatgggaagaattacttggacattcctaaagaaacagttcttcactcaatttctacaataacacatttggtcattaagtccttctttatcacacatattcatgaacaactctttcttatgggccactcattcacagaggcatacatcttcttttaaattgtctgtatatgtgtgtaacactgtctaccatttttctcttataggctcacttatatctttagagatggccaataactaccagaaaattgttctacttaaaggattggacgtcctccatgattatcactcttagcaatggttcagtccctacgaagcatgatttaaacttatcccaaaattgacgacagttgacaaatcagatgctgacttgat

SEQ ID NO: 30066 - DNA, 107 bp, Macaca Mulatta
gggctgactggagctaaacttcaggactgcatgagccgagcagttacaagacacaaagaagttaaaaaattgatggatgaagtaattaagagtatgaaacccaaata

SEQ ID NO: 30067 - DNA, 607 bp, Macaca Mulatta
  misc_feature (1)...(607): n = A,T,C or G
gcatattcatgtacccagacttacacctttaataacaagcaattgcacatcaaaatcagttcccgtgagganagacgttcatttgaatttttagatttattgttgcaagagtggcagactcattcgttggaaannnnnnnnnnnnnnnnnnnnnnnnnnnnnnnnnnnnnnnnnnnnnnnnnnnnnnnnnnnnnnnnnnnnnnnnnnnnnngacatatatgggtcttagaaaccactttcctggtgaagctgaaacattatataattcccttgagccatcttatcagaagagtcttcaaacttatttaaagagttctggcagtgtagcatctcttccacaatcagacaggtcctcatccagctcacaggaaagtctcannnnnnnnnnnnnnnnnnnnnnnnnnnnnnnnnnnnnnnnnnnnnnnnnnnnnnagtatcagcaggcagcagcaaagctagttcccttccaggaagtctgcagcgttcacgaagtgacattgatgtgaatgctgctgctggtgccaaagcacatcatgctgctggacagtctgtgcgaaacgggcgcttaggtgcaggtgccctgaatccaggttcgtatacatcacta

SEQ ID NO: 30068 - DNA, 312 bp, Macaca Mulatta
  misc_feature (1)...(312): n = A,T,C or G
atggagtcctacgacatcatcgccaaccagcccgtggtcatcgacaacnnnnnnnnnnnnnnnnnnnnnnnnnnnnnnnnnnnnnnnnnnnnnnnnnnnnnnnnnnnnnnnngtcggacggcccaagcacatgcgggtgatggctggagccctggagggggacctcttcatcggacnnnnnnnnnaggagcaccgggggctgctgaccatccgctaccccatggagcacggcgtggtgcgagactggaatgacatggagcgcatctggcagtacgtctactcgaaggaccagctgcagaccttttcagagga

SEQ ID NO: 30069 - DNA, 799 bp, Macaca Mulatta
tgcagtttggggggacccggttttgggaaacccgttaattaataagggttatgcatatttccaaatagctcccccaaatggttaaaactggtatttaaagaagaaaggctgaatgaggggaattaaatgcatgggacctaatgtttagtttagaaagtttggaacttgtctcaagtccagtacagctcttaagataattcagtaccactaccctttatttcttgcttcttttatccctttcagggttcgatttgctgctttgattactgtgttagcactggctgaaaaactaaaggagaattatattgtcttgctaccagaatccattcctttcttagcagagttgatggaaggtaattcccaaactattcccaactattaaacaattaaggaataattcagtaaaattctgtgaaaatgtgcccaatgataatgcagatttggatataacatgactagcagttgatccagtcctcatacaggcggctccagtctcaaatacaggcaggctcgagctcctgttttgagttgggtggagggagcgagttgtgaagtgaccacctcgtgatcatttgagagttcgtttacagtgtgatcttcactgtctttacttttgtggtgttttttgatcatacaagcagattacagtagtgtttttaattaacctcatacatttatatgattgaagttttggtccccagatgggaggttgtttaatggaaaggcctagtggcattaaggatgcagtaggatgtccacttttagtagcaagcgactttccttcactactccatgttcc

SEQ ID NO: 30070 - DNA, 152 bp, Macaca Mulatta
aaggaaggaagtttgttaacatcctgatgtgcttttggtatctaaccagtgccaacatccccagtgaaactttaagaggagccagtgtattccaggttaagttggggaatcagaatgtggaaactaaacaacttcttagtgcaagctatgag

SEQ ID NO: 30071 - DNA, 959 bp, Macaca Mulatta
  misc_feature (1)...(959): n = A,T,C or G
ggagtgcgaaggattcccttgcttggctctctcttgtggaggaggagcttggagatgagtggctgaagccagaactctttcgtataggtgccagtactctgctctcggacatcgagaggcagatataccatcatgtgactggaagatacgcagcttatcatgatcttccaatgtcttaaattagtcaccacttccagaaaagttctttaggacaacgcttaaaaattatttttctacacaattgctaaaattatttaattaaaacattgggtaataggtaactggcattcctctccttaaatttctaccgagcttaaagaatggaatggaaaaaccaaactcatcccatgtggtactcgtttcagcctcgatgtctatcaaacgctatgctacatnnnnnnnnnnnnnnnnnnnnnnnnnnnnnnnnnnnnnnnnnnnnnnnnnnnnnnnnnnnnnnnnnnnnnnnnnnnnnnnnnnnnnnnnnnnnnnnnnnnnnnnnnnnnnnnnnnnnnnnnnnnnnnnnnnnnnnnnnnnnnnnnnnnnnnnnnnnnnnnnnnnnnnnnnnnnnnnnnnnnnnnnnnnnnnnnnnnnnnnnnnnnnnnnnnnnnnnnnnnnnnnnnnnnnnnnnnnnnnnnnnnnnnnnnnnnnnnnnnnnnnnnnnnnnnnnnnnnnnnnnnnnnnnnnnnnnnnnnnnnnnnnnnnnnnnnnnnnnnnnnnnnnnnnnnnnnnnnnnnnnnnnnnnnnnnnnnnnnnnnnnnnnnnnnnnnnnnnnnnnnnnnnnnnnnnnnnnnnnnnnnnnnnnnnnnnnnnnnnnnnnnnnnnnnnnnnnnnnnnnnnnnnnnnnnnnnnnnnnnnnnnnnnnnnnnnnnnnnnnnnnnnnnnnnnnnnnnnnnnnnnnnnnnnnnnnnnnnnnnnnnnnnnnnnnnnnnnnnnnnnnnnnnnnnnnnnnnnnnnnnnnn

SEQ ID NO: 30072 - DNA, 345 bp, Macaca Mulatta
  misc_feature (1)...(345): n = A,T,C or G
ccctgggcagccgtgggaggcggaggaagctctactcagcagtacccggacgctccttcatggctgtgaagtcgtaccaggcccaaaaaagagggggagatctccctgagcaagggcgagaagatcaaannnnnnnnnnnnnnnnnnnnnnnnnnnnnnnnnnnnnnnnnnnnnnnnnnnnnnnnnnnnnnnnnnnnnnnnnnnnnnnnnnnnnnnnnnnnnnnnnnnnnnnnnnnnnnnnnnnnnnnnnnnnnnnnnnnnnnnnnnnnnnnnnnnnnnnnnnnnnnnnnnnnnnnnnnnnnnnnnnnnnnnnnnnaagcttaatggatgggattggcccaggga

SEQ ID NO: 30073 - DNA, 1163 bp, Macaca Mulatta
  misc_feature (1)...(1163): n = A,T,C or G
aaaagaaaggttgattacaaacaggaccatattttgcttcgaaatggaaccagcagttagcgagccaatgagagaccaagtcgcacggactcatttgacagaggacactcccaaagcgagtgctgacatagaaaaggttaaccagaatcaggnnnnnnnnnnnnnnnnnnnnnnnnnnnnnnnnnnnnnnnnnnnnnnnnnnnnnnnnnnnnnnnnnnnnnnnnnnnnnnnnnnnnnnnnnnnnnnnnnnnnnnnnnnnnnnnnnnnnnnnnnnnnnnnnnnnnnnnnnnnnnnnnnnnnnnnnnnnnnnnnnnnnnnnnnnnnnnnnnnnnnnnnnnnnnnnnnnnnnnnnnnnnnnnnnnnnnnnnnnnnnnnnnnnnnnnnnnnnnnnnnnnnnnnnnnnnnnnnnnnnnnnnnnnnnnnnnnnnnnnnnnnnnnnnnnnnnnnnnnnnnnnnnnnnnnnnnnnnnnnnnnnnnnnnnnnnnnnnnnnnnnnnnnnnnnnnnnnnnnnnnnnnnnnnnnnnnnnnnnnnnnnnnnnnnnnnnnnnnnnnnnnnnnnnnnnnnnnnnnnnnnnnnnnnnnnnngcagtcctgggcgccaacgatcctgagaagaatttcttaaccacagccatccgccctcatggcattttcggcccaagggacccacagttggtacccaccctaatcgagacagccagaaacggcaagatgaagttcgtgattggnnnnnnnnnnnnnnnnnnnnnnnnnnnnnnnnnnnnnnnnnnnnnnnnnnnnnnnnnnnnnnnnnnnnnnnnnnnnnnnnnnnnnnnnnnnnnnnnnnnnnaggcatttcacatcaccaatgatgagcccatccctttctggacattcctgtctcgcatcctgacaggcctcaattatgaggcccccaagtatcacatcccgtactgggtggcctactacctggccctcctgctgtccctgctggtgatggtggtcagtcctgtcatccaactgcagcccaccttcacacccatgcgggtcgcactggctggcacattccactactacagctgcgagagggccaaaaaggccatgggctaccagccactagtgaccatggatgatgctgtggagaggacggtgcagagctttcgccacctgcggagggtcaagtg

SEQ ID NO: 30074 - DNA, 260 bp, Macaca Mulatta
tgacggaccgctacaccatccacagccagctggagcacctgcagtccaagtacatcggcacgggccacgccgacaccaccaagtgggagtggctggtgaaccaacaccgcgactcgtactgctcctacatgggccacttcgaccttctcaactacttcgccattgcagagaatgagagcaaagcgcgagtccgcttcaatttgatggagaagatgcttcagccttgtggaccgccagccgacaagcccgaggagaactga

SEQ ID NO: 30075 - DNA, 573 bp, Macaca Mulatta
tgaagtttttagaagagagaaacttgtaaggtaaaggaaatagtaacagacaacttagtgttggattttccttacaatattcagactctcagggcgccagctctcaaatccattcctctgaaaagagcagttcaaagggcagaaggtggaccttgacccagggcagaacccaacagtaagctgaggactgccgtctgatgagatggctttgcctttcagagagcagacttggccatctctgccatcaccatcaccccagaaagggagagcgttgtggacttcagcaagcggtacatggactattcagtgggaattctaatcaagaaacctgaggagaaaatcagcatcttctccctctttgctccatttgattttgctgtgtgggcctgcattgcagcagccatccccgtggttggtgtgctgatatttgtgttgaacaggatacaggctgtgagggctcagagtgctgcccagcccaggccatcagcttctgctactctgcacagtacgatctggattgtctatggagccttcgtacagcaaggtacctttctgattccctgatccttgaat

SEQ ID NO: 30076 - DNA, 281 bp, Macaca Mulatta
ctaggtaatcattcctggggaatttatccagaatctatctctaccttaccagcggataatagtctactttccaattctgtttactctgaattaccatcagctgaagggaagatgaaggtaactgttacgcaaataacagtggcactgagcagcttaaaaaatatttttactcctcttctttttcgaggacttctgtcttttctgacctggtggattgctgcttgcctcttttctacaagcctttttgggcttttctatcaccagtatctgactgtggcatg

SEQ ID NO: 30077 - DNA, 663 bp, Macaca Mulatta
  misc_feature (1)...(663): n = A,T,C or G
acgacttctgtttacttaaaattagtcgtatttaatggctgggatttggtgcaaacaaacatgattgatagctggacagacatgctcgtcatgaaaaaagaaccatttctgaagcccgattggggccaaacatttacaccttgcttcatagtaaccagttgagatgaagcacgtcgttagaacgttgttggacaccatgttgaattatccccccatcggttgtgaagaactgtgctacattcaggcttacccattgaactcagnnnnnnnnnnnnnnnnnnnnctgtcttttgtctggcaggataccattcttgttgctcttctgtgtaatgaagtttaaatgcttgtttggaaaactttatttaacagtttagaaggcttgatagaaagagtgcattagtctgaagagtatacattggataggaaagaatttccttcttttgtttctccaaatctttccgccttatttagcttgagatctttgcagcttggttcatggattctagccttgcccgttgcgcagtatatactgatccagatgataaaccagtgaactatgtcaaaagcactctcaatattacatttgacaaaaagttttgtacttttcacatagcttgttgccccgtaaaagggttaacagcacnnnnnnnnnnnnnnnnnnta

SEQ ID NO: 30078 - DNA, 130 bp, Macaca Mulatta
acatccctgaagaatgctgggaactgcctaagccccgcagtcattgtcggcctcctgaaagaggcttccaagcaggcggatgtgaatttggttaacgccaagctgctggtgaaagaggctggcctcgatg

SEQ ID NO: 30079 - DNA, 290 bp, Macaca Mulatta
agcagctacttcaggactcctccacggaaggcccgtgggcagcctcactccgccagggggacagctgaggctcagggcgtagcagtgacaacttcgccaccgtggctacgcaggtggtgctgctgtgaggctggagtgggggcccagctagagtctagatgtgggacccgaggcccgggcctcatgctccagctccatggggaggccaaccacacagcacagccctcagagcatgcagagccctgctgcatgtcagaccactcgggtgggggctgcatggaggattacca

SEQ ID NO: 30080 - DNA, 1065 bp, Macaca Mulatta
ggggaaacccaaggttgtggtatgccgctttactgtctttcacaagcgccttttatatcctgtcaatcatctgtgtcgggctgctctatacatactacaccaaaccggatggctgcacagaaaacaagttcttcatcagtattaacctgatcctttgcgttgtggcttctattatatcgatccacccaaaaattcaggaacaccagcctcgctccggcctcttgcagtcctccctcatcaccctctacactatgtacctcacctggtcagccatgtccaatgaacctgatcgttcctgctaccccagcctgatgagctttattacacgcataactgcaccaacactggctcctggaaattcaactgctgtggttcctacccctactccactatcaaagagtgggtctttactggattcagataattttattggactgtttgtctttgttctctgccttttgtattctagcatccgcacttccactaatagccaagtagacaagctgaccctgtcagggagtgacagcgtcatccttggtgatacaactaccaatggtgccagtgatgaagaagatggacagcctcgacgggctgtggacaacgagaaagagggagtgcagtatagctactccttattccacctcatgctctgcttggcttccttgtacattatgatgaccctgaccagctggtacagccctgatgcaaagtttcagagcatgaccagcaagtggccagctgtggtgggtcaagatcagctccagctggggtctgcctcctgctttacgtctggacccttgtggctccacttgtcctcaccagtcgggacttcagctgaacctctgagtgccaaggacaccactgaaactcacaaaggtctccttcaccgaaaactcatgtaccttttaagtttgcttcaacctaaatattaagtgaatgctttgcaagttttgactgtatccaggttttatatcaagaaggggagattgaaataatgccttgatgccagaatttggaaccttctccttctatcccggaaaatttttgggttaaccttttaaaggt

SEQ ID NO: 30081 - DNA, 983 bp, Macaca Mulatta
ggggaggccagagctctgcgggaggctaatcccgctgcccactgccctcgcagcagtgtctccgaggactagccaagtctggaggcagatgaatgctttctgatcctcaccagggctgtggaagggtgggggtgggtcattagagtgttcaggatttacagtgcagtattcacgtgtaacttttacgttttcagtacagtgcttttataccttttatgcaatgttgtattcctttgggtactattgtgtaccatttacgatgtatgcatgttttgtttatatgataagcttggttaggtgctttcggctttctgtggtaccttttctttggattttttggtatcttaagaccctgcgtaaacgtgatgaaagtacgtttgaataacgttttccctctttactaattttaccctggggacctgaggaatgtgttgttggagcgtagaaactgcttccttgccggaatttatggaaaaaaactacacgcaggcgagagtctgggtgctggacccaaggaaaaagaccgaatgtgcccgtccttggaccacgtgctaggggcgaactggacaataccatcccgtcgatgtggaggtacaacataagtatctgcgccgtaggggagtggggttctacaatagggggaggaagccggttttgcgtacaaagtatttagctaaaactacaatcgaggagaaacacccacctcctatgaggggcacacctgtcttatgagggtagaacagtatagtggcggatttgcgtggggttgtgtacagaatttggaatcaaacaccggagctatatccattccactctttataagacgaccgtatagttaaacgtaccgtgctactatgaggtgcagtgtggtgggggagggcatgtacgcgagaagagcacatgtctgcattggcacacgctatgacaggttctccctacttggttgggcgtgataagttatgacactcatgcgatatcgtggg

SEQ ID NO: 30082 - DNA, 130 bp, Macaca Mulatta
agacggtgttgagatacaatattctccctcttaaaaatatgaagacctttagtcttagcgtggaaatgggaaaagctagatgtgagcaactgacttcacctcgatccttgagtctcgctattcacaccag

SEQ ID NO: 30083 - DNA, 447 bp, Macaca Mulatta
ggtctaattgatgactacaaaaccctccatggcaatgccccagcccctggtaccccaacagcttctgggtggcagccacccacttaccacagtggcagggccttcagtgcccgctaccctcgtccaagccggaggggctactcctcacaccatgggccttcgtggcgcaagaaatactccctcgtgaatcggcccccgggaccctcagacccacctgccgaccctgctgtgcggccgttgcacggggcccgggggggccaggctcctgtcccgcagcagcacatccttgggagacaggtccagctcaatcaaggtcagaacgtggtcatcaaagttaaaccaccatcaaagtctggctctgccagtgcttcaggggcccagcggggctctttggaagaatatgaggacaaaagggtggagtgaccaaaggccccgggaaggtgaagg

SEQ ID NO: 30084 - DNA, 1838 bp, Macaca Mulatta
  misc_feature (1)...(1838): n = A,T,C or G
gcttctgccgactaggacaattccagtgcaatgacggcnnnnnnnnnnnnnnnnnnnnnnnnnnnnnnnnnnnnnnnnnnnnnnnnnnnnnnnnnnnnnnnnnnnnnnnnnnnnnngagaatcaccactgtgactccaatgaatggcagtgcaccaacaaacgttgcatcccagaatcctggcagtgtgacacgtttaacgactgtgaggataactcagatgaagacagttcccactgtgccagcaggacctgccgaccgggccagtttcggtgtnnnnnnnnnnnnnnnnnnnnnnnnnnnnnnnnnnnnnnnnnnnnnnnnnnnnnnnnnnnnnnnnnnnnnnnnnnnnnnnnnnnnnnnnnnnnnnnnnnnnnnnnnnnnnnnnnnnnnnnnnnnnnnnnnnnnnnnnnnnnnnnnnnnnnnnnnnnnnnnnnnnnnnnnnnnnnnnnnnnnnnnnnnnnnnnnnnnnnnnnnnnnnnnnnnnnnnnnnnnnnnnnnnnnnnnnnnnnnnnnnnnnnnnnnnnnnnnnnnnnnnnnnnnnnnnnnnnnnnnnnnnnnnnnnnnnnnnnnnnnnnnnnnnnnnnnnnnnnnnnnnnnnnnnnnnnnnnnnnnnnnnnagatgaggacctgccatcctgaatattttcannnnnnnnnnnnnnnnnnnnnnnnnnnnnnnnnnnnnnnnnnnnnnnnnnnnnnnnnnnnnnnnnnnnnnnnnnnnnnnnnnnnnnnnnnnnnnnnnnnnnnnnnnnnnnnnnnnnnnnnnnnnnnnnnnnnnnnnnnnnnnnnnnnnnnnnnnnnnnnnnnnnnnnnnnnnnnnnnnnnnnnnnnnnnnnnnnnnnnnnnnnnnnnnnnnnnnnnnnnnnnnnnnnnnnnnnnnnnnnnnnnnnnnnnnnnnnnnnnnnnnnnnnnnnnnnnnnnnnnnnnnnnnnnnnnnnnnnnnnnnnnnnnnnnnnnnnnnnnnnnnnnnnnnnnnnnnnnnnnnnnnnnnnnnnnnnnnnnnnnnnnnnnnnnnnnnnnnnnnnnnnnnnnnnnnnnnnnnnnnnnnnnnnnnnnnnnnnnnnnnnnnnnnnnnnnnnnnnnnnnnnnnnnnnnnnnnnnnnnnnnnnnnnnnnnnnnnnnnnnnnnnnnnnnnnnnnnnnnnnnnnnnnnnnnnnnnnnnnnnnnnnnnnnnnnnnnnnnnnnnnnnnnnnnnnnnnnnnnnnnnnnnnnnnnnnnnnnnnnnnnnnnnnnnnnnnnnnnnnnnnnnnnnnnnnnnnnnnnnnnnnnnnnnnnnnnnnnnnnnnnnnnnnnnnnnnnnnnnnnnnnnnnnnnnnnnnnnnnnnnnnnnnnnnnnnnnnnnnnnnnnnnnnnnnnnnnnnnnnnnnnnnnnnnnnnnnnnnnnnnnnnnnnnnnnnnnnnnnnnnnnnnnnnnnnnnnnnnnnnnnnnnnnnnnnnnnnnnnnnnnnnnnnnnnnnnnnnnnnnnnnnnnnnnnnnnnnnnnnnnnnnnnnnnnnnnnnnnnnnnnnnnnnnnnnnnnnnnnnnnnnnnnnnnnnnnnnnnnnnnnnnnnnnnnnnnnnnnnnnnnnnnnnnnnnnnnnnnnnnnnnnnnnnnnnnnnnnnnnnnnnnnnnnnnnnnnnnnnnnnnnnnnnnnnnnnnnnnnnnnaagcagcaatgaacccttacagcctggacatctttgaagaccagttatactggatatctaaggaaaagggagaagtatggaaacaaaataaatttgggcaaggaaagaaagagaaaacgctggtagtgaacccttggctcactcaagttcgaatctttcatcaactcagatacaataagtcaggtaa

SEQ ID NO: 30085 - DNA, 344 bp, Macaca Mulatta
  misc_feature (1)...(344): n = A,T,C or G
gtgacaatctttctgaagcagatgaaaccttgattgttatcgaggctataagagaagctagtttgccaaaatgtcctcctgaagatgtcccactttttgaaaatattataggagatatttttccagaagtgacagttttaaaagtaaaatcacttgccttggagnnnnnnnnnnnnnnnnnnnnnnnnnnnnnnnnnnnnnnnnnnnnnnnnnnnnnnnnnnnnnnnnnnnnnnnnnnnnnnnnnnnnnnnnaggtttgtgttggtgtgatgttagtgggcccaacaggtggaggaaagacaacagtcagaaaaattttggaaaaagcattaacactattacca

SEQ ID NO: 30086 - DNA, 346 bp, Macaca Mulatta
cgcccggagggaggacatcgggtctcctgctggtgttggacccggcagcctcggagtgacggggtcgcctgcgtcccttccttcttccgagctcaagcgcctccctccacactgggcaggaaggagagggttttgggggcagagcctctgatgggaaagggactggggagcgcttccgagagctgggggcggcgagagacctggaaggggctgcggggaatagagggaggctgggctcccttccctgtccgcgcgggcaccggggcggactcctgccctggcctccttctgcggggccgtcctgttctctcgggggtctgcggggccgtcctgttctctcaggggt

SEQ ID NO: 30087 - DNA, 83 bp, Macaca Mulatta
tcaacggctggtatgtcctggtgattatcagcgacctaatgacaatcattgactccatattaaaaatggaaatcaaagcaaag

SEQ ID NO: 30088 - DNA, 644 bp, Macaca Mulatta
  misc_feature (1)...(644): n = A,T,C or G
cagcgccagcgtcagcgacagcagcggcttcagcgactcggagagtgcagattcactttataggaacagcttcagcttcagtgatgaaaaactgaattccccaacagactctaccccagctcttctctctcctgctgtcgctcctcagaaagccaaattaggagacacaaaagagctagaagacttcattgctgatcttgacagaactttagcaagtatgtgaaaccagaagaagttctgggtcctttcatcataagggagaagcttcagaaagctcggaggacctgctaaaatcagctactagaatctgctgccagaggggacgaagacgtgcactcaaccttctaccaggccactctcaggctcaccttaaaatcagcctttgatcccatctctgggcaatttagacagtgaaactgactttgtttacctgcctgcagcgtattagaacagacgatccatgctaatattgtatcttctcttaaaacatagctttcctgtaatttaaagtgcttttatgaacatatttgtaattaattatatatagttggaaatagcagtaagctttcccattatatttctgtatacaaataaaatgtgaactagnnnnnnnnnnnnnnnnnnnnnnnnnnnnnnnnnnnnnn

SEQ ID NO: 30089 - DNA, 3585 bp, Macaca Mulatta
  misc_feature (1)...(3585): n = A,T,C or G
cagatcccgagcactgcaagtccagatgcaacgggagcctggctcgagggaagacaagatccggccggaaagtgtgaaagtcacaccccaatgacgggatagcagcccctgtgtgtgagcacccctccatgccagnnnnnnnnnnnnnnnnnnnnnnnnnnnnnnnnnnnnnnnnnnnnnnnnnnnnnnnnnnnnnnnnnnnnnnnnnnnnnnnnnnnnnnnnnnnnnnnnnnnnnnnnnnnnnnnnnnnnnnnnnnnnnnnnnnnnnnnnnnnnnnnnnnnnnnnnnnnnnnnnnnnnnnnnnnnnnnnnnnnnnnnnnnnnnnnnnnnnnnnnnnnnnnnnnnnnnnnnnnnnnnnnnnnnnnnnnnnnnnnnnnnnnnnnnnnnnnnnnnnnnnnnnnnnnnnnnnnnnnnnnnnnnnnnnnnnnnnnnnnnnnnnnnnnnnnnnnnnnnnnnnnnnnnnnnnnnnnnnnnnnnnnnnnnnnnnnnnnnnnnnnnnnnnnnnnnnnnnnnnnnnnnnnnnnnnnnnnnnnnnnnnnnnnnnnnnnnnnnnnnnnnnnnnnnnnnnnnnnnnnnnnnnnnnnnnnnnnnnnnnnnnnnnnnnnnnnnnnnnnnnnnnnnnnnnnnnnnnnnnnnnnnnnnnnnnnnnnnnnnnnnnnnnnnnnnnnnnnnnnnnnnnnnnnnnnnnnnnnnnnnnnnnnnnnnnnnnnnnnnnnnnnnnnnnnnnnnnnnnnnnnnnnnnnnnnnnnnnnnnnnnnnnnnnnnnnnnnnnnnnnnnnnnnnnnnnnnnnnnnnnnnnnnnnnnnnnnnnnnnnnnnnnnnnnnnnnnnnnnnnnnnnnnnnnnnnnnnnnnnnnnnnnnnnnnnnnnnnnnnnnnnnnnnnnnnnnnnnnnnnnnnnnnnnnnnnnnnnnnnnnnnnnnnnnnnnnnnnnnnnnnnnnnnnnnnnnnnnnnnnnnnnnnnnnnnnnnnnnnnnnnnnnnnnnnnnnnnnnnnnnnnnnnnnnnnnnnnnnnnnnnnnnnnnnnnnnnnnnnnnnnnnnnnnnnnnnnnnnnnnnnnnnnnnnnnnnnnnnnnnnnnnnnnnnnnnnnnnnnnnnnnnnnnnnnnnnnnnnnnnnnnnnnnnnnnnnnnnnnnnnnnnnnngtacctggaggagaaggaggacctgaagctcacgtgctcgaccctgggnnnnnnnnnnnnnnnnnnnnnnnnnnnnnnnnnnnnnnnnnnnnnnnnnnnnnnnnnnnnnnnnnnnnnnnnnnnnnnnnnnnnnnnnnnnnnnnnnnnnnnnnnnnnnnnnnnnnnnnnnnnnnnnnnnnnnnnnnnnnnnnnnnnnnnnnnnnnnnnnnnnnnnnnnnnnnnnnnnnnnnnnnnnnnnnnnnnnnnnnnnnnnnnnnnnnnnnnnnnnnnnnnnnnnnnnnnnnnnnnnnnnnnnnnnnnnnnnnnnnnnnnnnnnnnnnnnnnnnnnnnnnnnnnnnnnnnnnnnnnnnnnnnnnnnnnnnnnnnnnnnnnnnnnnnnnnnnnnnnnnnnnnnnnnnnnnnnnnnnnnnnnnnnnnnnnnnnnnnnnnnnnnnnnnnnnnnnnnnnnnnnnnnnnnnnnnnnnnnnnnnnnnnnnnnnnnnnnnnnnnnnnnnnnnnnnnnnnnnnnnnnnnnnnnnnnnnnnnnnnnnnnnnnnnnnnnnnnnnnnnnnngccaaggggcacgaggaagaaggcacggacgccagccccagctcctgtggatctctgcccatcaccaactccttcaccaagatgnnnnnnnnnnggagccgcagcagcatcatgtcaatcaccgccgagcccccgggaaacgactccatcgtcagacgctacaaggaggacgcgccccatcgcannnnnnnnnnnnnnnnnnnnnnnnnnnnnnnnnnnnnnnnnnnnnnnnnnnngatgacagtcacgaacgctactcctttggannnnnnnnnnnnnnnnnnnnnnnnnnnnnnnnnnnnnnnnnnnnnnnnnnnnnnnnnnnnnnnnnnnnnnnnnnnnnnnnnnnnnnnnnnnnnnnnnnnnnagacccttccggccttcggtcacctccgtggggcacgtgcggggcccagggccctccgtgcagcacacgacgttgaacggcgacagcctcacctcccagctcaccctgctggggggcaacgcgcgagggagcttcgtgcactcggtcaagcctggctccctggccgagaaagccggcctccgcgagggccaccagctgctgctnnnnnnnnnnnnnnnnnnnnnnnnnnnnnnnnnnnnnnnnnnnnnnnnnnnnnnnnnnnnnnnnnnnnnnnnnnnnnnnnnnnnnnnnnnnnnnnnnnnnnnnnnnnnnnnnnnnnnnnnnnnnnnnnnnnnnnnnnnnnnnnnnnnnnnnnnnnnnnnnnnnnnnnnnnnnnnnnnnnnnnnnnnnnnnnnnnnnnnnnnnnnnnnnnnnnnnnnnnnnnnnnnnnnnnnnnnnnnnnnnnnnnnnnnnnnnnnnnnnnnnnnnnnnnnnnnnnnnnnnnnnnnnnnnnnnnnnnnnnnnnnnnnnnnnnnnnnnnnnnnnnnnnnnnnnnnnnnnnnnnnnnnnnnnnnnnnnnnnnnnnnnnnnnnnnnnnnnnnnnnnnnnnnnnnnnnnnnnnnnnnnnnnnnnnnnnnnnnnnnnnnnnnnnnnnnnnnnnnnnnnnnnnnnnnnnnnnnnnnnnnnnnnnnnnnnnnnnnnnnnnnnnnnnnnnnnnnnnnnnnnnnnnnnnnnnnnnnnnnnnnnnnnnnnnnnnnnnnnnnnnnnnnnnnnnctcctccagttcgtcagcaggtccgagaacaagtataagcgaatgaacagcaacgagagggtccgcatcatctcgggaagcccgctcgggagcctggcccggtcctcgctggacgccaccaagctcttgactgagaagcaggaagnnnnnnnnnnnnnnnnnnnnnnnnnnnnnnnnnnnnnnnnnnnnnnnnnnnnnnnnnnnnnnnnnnnnnnnnnnnnnnnnnnnnnnnnnnnnnnnnnnnnnnnnnnnnnnnnnnnnnnnnnnnnnnnnnnnnnnnnnnnnnnnnnnnnnnnnnnnnnnnnnnnnnnnnnnnnnnnnnnnnnnnnnnnnnnnnnnnnnnnnnnnnnnnnnnnnnnnnnnnnnnnnnnnnnnnnnnnnnnnnnnnnnnnnnnnnnnnnnnnnnnnnnnnnnnnnnnnnnnnnnnnnnnnnnnnnnnnnnnnnnnnnnnnnnnnnnnnnnnnnnnnnnnnnnnnnnnnnnnnnnnnnnnnnnnnnnnnnnnnnnnnnnnnnnnnnnnnnnnnnnnnnnnnnnnnnnnnnnnnnnnnnnnnnnnnnnnnnnncagaaagctgctgccccggcctgagaccgaggaggagttcctgcgcgtgtgccggctgaaggagaaggagctggaggccctgccgtgcctgtacgccacggtagaacccgacatgtggggcagcgtagaggagctgctccgcgttgtcaaggacaagatcggcgaggagcagcgcaagaccatctgggtggacgaggaccagctgtg

SEQ ID NO: 30090 - DNA, 979 bp, Macaca Mulatta
  misc_feature (1)...(979): n = A,T,C or G
taggcttaaataaactaaaacagttacatctctgccttacaaaatagaacaactgaatgctgatatatttgtgcctctaagagacctaaaacttctgaatctgcaaggctttttgattagctatttggatgtaccaccactatttcatctggaattaataactttatatggaaacctatggaactgctcttgcagtctatttaatttgcagaactggttgaacacatcaaatgtgacattagnnnnnnnnnnnnnnnnnnnnnnnnnnnnnnnnnnnnnnnnnnnnnnnnnnnnnnnnnnnnnnnnnnnnnnnnnnnnnnnnnnnnnnnnnnnnnnnnnnnnnnnnnnnnnnnnnnnnnnnnnnnnnnnnnnnnnnnnnnnnnnnnnnnnnnnnnnnnnnnnnnnnnnnnnnnnnnnnnnnnnnnnnnnagaacatatacctcttggaaaaagctgggcttttctcgttggtgttgttgtcactgcactgacaacttcacttctcatttttattgctatcaaatgcccaatatggtacaatattctgcttagttataatcatcatcgcctggaagagcatgaagcagaaacctatgaagatggttttactggaaatccaagttctctttcacagataccagaaacaaactctgaagaaactacagtaatatttgaacaattacattcatttgtggtagacgatgatggatttattgaagacaaatatatagatatccatgaattacgtgaagaaaattaatttctttcaaagtttgctttttaaacaaagttatcagctcactcacagtttagatatggagattttgctatgtgatataccaaaatacagctagcagacattcatattaacgacaacatacatgaatatcataaaattatgttctttgcattgtactgagcaagcaggtccaaatacaataactgacactccctggtagctgacagttacatagtttac

SEQ ID NO: 30091 - DNA, 734 bp, Macaca Mulatta
  misc_feature (1)...(734): n = A,T,C or G
ctggaaaagcgggngaaaggggacagcctctgggagtgacagtgcntgacaagaaggctcaaggtcccaaaggtggtggcaatgcagtaaaggtcagacacattctatgtgaaaaacatggcaaaatcatggaagccatggaaaagttaaagtctgggatgagattcaatgaagtggcctcacagtatagtgaagataaagccaggcaagggggcgacttgggttggatgaccagagggtccatggtgggaccatttcaagaagcagcatttgccttgcctgtaagtgggatggataagcctgtgtttacagacccgccggttaagacgaagtttggatatcatattattatggttgaaggaagaaaataaaatcatatgaaagannnnnnnnnnnnnnnnnnnnnnnnnnnnnnnnnnnnnnnnnnnnnnnnnnnnnnnnnnnnnnnnnnnnnnnnnnnnnnnnnnnnnnnnnnnnnnnnnnnnnnnnnnnnnnnnnnnnnnnnnnnnnnnnnnnnnnnnnnnnnnnnnnnnnnnnnnnnnnnnnnnnnnnnnnnnnnnnnnnnnnnnnnnnnnnnnnnnnnnnnnnnnnnnnnnnnnnnnnnnnnnnnnnnnnnnnnnnnnnnnnnnnnnnnnnnnnnnnnnnnnnnnnnnnnnnnnnnnnnnnnnnnnnnnnnnnnnnnnnnnnnnnnnnnnnnnnnnnnnnnnnnnnnnnnnnnnnnnnnnnnnnnnnnn

SEQ ID NO: 30092 - DNA, 345 bp, Macaca Mulatta
ttaaactattggatagagaagcataaataggtagtaaaccactaaatatgcagaaatgattatgagagttgtgaaggaggagagtaagtaagttaaatgggcaattctgaggagtagaaatttcctttacttcgtaattatttggtaattcctctttatacgtttaatgggcttttctctattattttatatttttcaattaaggaaaaaagaattttaaaaatcttggagctcactgagagtagtgggctttgcagctgaagtgcaatattacaaatgacgtggtaagaggccggcagagctgtgaattacagcaacaaagaaggaaagaaagtgattggagaa

SEQ ID NO: 30093 - DNA, 573 bp, Macaca Mulatta
tattatttctactcgccctgtttaatgatgtttctgtttcctgtctgaaatctcagaataaacatggagagctcgtcttggttgtgtaggaaatggggcgcctgagccagtgccagcccagccctgccaccccacaggtaacagggtgatgtcagctgttgaaggggacaggctgtggtggtggcattgctgctcaactcagaggcgggctgaggagagggccggcctcgtcctgtctgacctcttctgtgtagcaggatggggtgatgtgggggtagatttctaacaggtgcgccagcctcttttcccttgaaccctgtgctccaggagccgcagcagctggggatcgggtggcactgggccagccggcctgccctggagtctcagcgcagccacaaaacgcacttcggtcctgggctcactgctccatgccggggaaagcctgagcttttcagcgcttctcatcaggtcggagccgctctcacacaagctctgctgttttcactaaaacacagaccaagtgactggggcgtttttggtctcctccagaccgctgcacattccctgaatcct

SEQ ID NO: 30094 - DNA, 2484 bp, Macaca Mulatta
  misc_feature (1)...(2484): n = A,T,C or G
gtgagaggtcaacggagaggcggtctgcggggacaacaatggcggggctgtgggtcgggacagcagcgctggtcgctgccggacggcatgggcggtggccgccgcagcagctgatgttgagcgcggcactgcggaccctgaannnnnnnnnnnnnnnnnnnnnnnnnnnnnnnnnnnnnnnnnnnnnnnnnnnnnnnnnnnnnnnnnnnnnnnnnnnnnnnnnnnnnnnnnnnnnnnnnnnnnnnnnnnnnnnnnnnnnnnnnnnnnnnnnnnnnnnnnnnnnnnnnnnnnnnnnnnnnnnnnnnnnnnnnnnnnnnnnnnnnnnnnnnnnnnnnnnttcatgtgaaaatggcggatgaggccgtctgtgttggcccagctcccaccagtaaaagctacctcaacatggatgccatcatggaagccattaagaaaaccagggcccaagctgtnnnnnnnnnnnnnnnnnnnnnnnnnnnnnnnnnnnnnnnnnnnnnnnnnnnnnnnnnnnnnnnnnnnnnnnnnnnnnnnnnnnnnnnnnnnnnnnnnnnnnnnnnnnnnnnnnnnnnnnnnnnnnnnnnnnnnnnnnnnnnnnnnnnnnnnnnnnnnnnnnnnnnnnnnnnnnnnnnnnnnnnnnnnnnnnnnnnnnnnnnnnnnnnnnnnnnnnnnnnnnnnnnnnnnnnnnnnnnnnnnnnnnnnnnnnnnnnnnnnnnnnnnnnnnnnnnnnnnnnnnnnnnnnnnnnnnnnnnnnnnnnnnnnnnnnnnnnnnnnnnnnnnnnnnnnnnnnnnnnnnnnnnnnnnnnnnnnnnnnnnnnnnnnnnnnnnnnnnnnnnnnnnnnnnnnnnnnnnnnnnnnnnnnnnnnnnnnnnnnnnnnnnnnnnnnnnnnnnnnnnnnnnnnnnnnnnnnnnnnnnnnnnnnnnnnnnnnnnnnnnnnnnnnnnnnnnnnnnnnnnnnnnnnnnnnnnnnnnnnnnnnnnnnnnnnnnnnnnnnnnnnnnnnnnnnnnnnnnnnnnnnnnnnnnnnnnnnnnnnnnnnnnnnnnnnnnnnnnnnnnnnnnnnnnnnnnnnnnnnnnnnnnnnnnnnnnnnnnnnnnnnnnnnnnnnnnnnnnnnnnnnnnnnnnnnnnnnnnnnnnnnnnnnnnnnnnnnnnnnnnnnnnnnnnnnnnnnnnnnnnnnnnnnnnnnnnnnnnnnnnnnnnnnnnnnnnnnnnnnnnnnnnnnnnnnnnnnnnnnnnnnnnnnnnnnnnnnnnnnnnnnnnnnnnnnnnnnnnnnnnnnnnnnnnnnnnnnnnnnnnnnnnnnnnnnnnnnnnnnnnnnnnnnnnnnnnnnnnnnnnnnnnnnnnnnnnnnnnnnnnnnnnnnnnnnnnnnnnnnnnnnnnnnnnnnnnnnnnnnnnnnnnnnnnnnnnnnnnnnnnnnnnnnnnnnnnnnnnnnnnnnnnnnnnnnnnnnnnnnnnnnnnnnnnnnnnnnnnnnnnnnnnnnnnnnnnnnnnnnnnnnnnnnnnnnnnnnnnnnnnnnnnnnnnnnnnnnnnnnnnnnnnnnnnnnnnnnnnnnnnnnnnnnnnnnnnnnnnnnnnnnnnnnnnnnnnnnnnnnnnnnnnnnnnnnnnnnnnnnnnnnnnnnnnnnnnnnnnnnnnnnnnnnnnnnnnnnnnnnnnnnnnnnnnnnnnnnnnnnnnnnnnnnnnnnnnnnnnnnnnnnnnnnnnnnnnnnnnnnnnnnnnnnnnnnnnnnnnnnnnnnnnnnnnnnnnnnnnnnnnnnnnnnnnnnnnnnnnnnnnnnnnnnnnnnnnnnnnnnnnnnnnnnnnnnnnnnnnnnnnnnnnnnnnnnnnnnnnnnnnnnnnnnnnnnnnnnnnnnnnnnnnnnnnnnnnnnnnnnnnnnnnnnnnnnnnnnnnnnnnnnnnnnnnnnnnnnnnnnnnnnnnnnnnnnnnnnnnnnnnnnnnnnnnnnnnnnnnnnnnnnnnnnnnnnnnnnnnnnnnnnnnnnnnnnnnnnnnnnnnnnnnnnnnnnnnnnnnnnnnnnnnnnnnnnnnnnnnnnnnnnnnnnnnnnnnnnnnnnnnnnnnnnnnnnnnnnnnnnnnnnnnnnnnnnnnnnnnnnnnnnnnnnnnnnnnnnnnnnnnnnnnnnnnnnnnnnnnnnnnnnnnnnnnnnnnnnnnnnnnggtgaaatctgtgcactgtcaagctggagacacagttggagaagcggatctgctcgtggagctggagtgaaggatttataacctttcagtcatcacccaatttaattagccatttgtgtgatgctttgacacacaattgattcaagcattttacaggaacacccctgtgcagctacgtttacgtcgtcatttattccagagtcaagaccaatattctgccaaaaaatcaccaatggaaattttcactgatataaatacttgtacatatgatttgtacttctgtgagatttcctagtatgaaaattaaatcaatcaaactgatcatttgtct

SEQ ID NO: 30095 - DNA, 1068 bp, Macaca Mulatta
  misc_feature (1)...(1068): n = A,T,C or G
tggacagctacatgtggcgtttaaaaactgccctgaccatcttgccaaacaagtctctgctcatgaggccccacaggatgaacgcgccgaggcaggacagtgtcctgccctgtcggaacagtgactgctgacctgccaagagtgagctggggactgcctgctgtctgccagtacaatgaaggaagtggtttattggtcacccaagaaggtggcagactggctgctggagaatgctatgccagaatactgtgagcctctggagcatttcacaggccaggacttgatcaacctaacccaagaggatttcaaaaaaccccctttgtgccgagtctcctctgacaacgggcagcggctcctggacatgatagaaaccctgaaaatggagcaccatttggaagcacacaagaacggccatgccaacgggcacctcaacattggcgtagacatccccacccccgatggcagcttcagcatcaagattaaacccaacgggatgccaaatgggtataggaaagagatgataaagatccccatgccagaactggagcgctctcagtaccccatggagtggggcaagacttttctggcctttctttacgcactttcctgttttgttctcaccacagtgatgatctcggtcgtccatgaacgagtacctcctaaggaggtgcagcctccactaccggacacattttttgaccattttaaccgggtgcagtgggccttttctatttgtgaaattaatggcatgatccttgtaggactctggttaattcagtggctgctcttaaaatacaagnnnnnnnnnnnnnnnnnnnnnnnnnnnnnnnnnnnnnnnnnnnnnnnnnnnnnnnnnnnnnnnnnnnnnnnnnnnnnnnnnnnnnnnnnnnnnnnnnnnnnnnnnnnnnnnnnnnnnnnnnnggagactgggaagcccatctgcggagaataatgaagctcattgctggaggtggcttgtctatcactggctctcacaacatgtgtggggactatctgtacagcggccacacggtcatgctaacactcacgtacttatttatcaaagag

SEQ ID NO: 30096 - DNA, 990 bp, Macaca Mulatta
ttttttatttggtggatgtgattggtaatggttctttcccatttatagtgagcgaaactgtaggggaacttgtttggcttactccctcttcctctccaggtgtcctgttcattacggagaagcacctttacttttttatcgctcaatattgtcgaaagagaggcggggaaaggggattccaccacgggctccagagcccaaggtgcacatcagcccattacactttcactgtctgagattggggtctctaagacccaggataaaagggtggaatgtagctatatggactcaatttgcttccggaccttttccagagcctttctgtccagttgtcgctgacgaatgatgacaagacaagcgaagatcagggccacaaacacaacagccccttcgaacttccagaacaagtgttgttccatcaaagctgagcggcagcttttgaactcaattctcttagatgagctgcatgtgattttctctacataccctgtgggaccacactcaggggtagttttagcctggaaattagagcatggagagcactctgttgttaccacaaactcttccaccagccagcatggcaaatttgaggtgctcgctgacagcttctcctcctgcacgggagcctctgcttgacagagctttaaggtgaaagcacagagcaaccagcagaggtggcggccctgggggaggccatgcctcccggagtccgcaggcatggagcgctaagtgtcgcacctgtcggaacagagggacctactccgcaggcctcgtgcctccgtcagagcgcagaggcggcaactaactctgcagccctcccagaggttccaggtcagggcagggaaggccgaagttgcctgtcggagcagaggatctttcgggacgtccccgttgccacagcgagaaaaatcgattacgcgtttgtgggctaggaaggcgagcgccttctgcggggtccacagggcgctggaggaaggaccggcggcctcg

SEQ ID NO: 30097 - DNA, 375 bp, Macaca Mulatta
taaattaaaccttgcattaaaataacatcacagtatcagtggactaaacattaaaatgtaccactctaatcattggcctcatcattgaagcatccagaactatgaattagacatcatttagcaataataagcattttttacactatcattgaggaataatgacatggagcatgaaatttgggcctccagtataacttactgaatgtggattttatttcccttgttaatgatgtgagaaaattgtcaggagaatggctcttatttatatgtattttaacttacgctttgttgctcctgagggacccttagacctgctgcgaaaggatcacatttgttgtggtgctgccagttttgctttattctaaattttgtacc

SEQ ID NO: 30098 - DNA, 771 bp, Macaca Mulatta
gggctgtgagcagaacgggcctgggatttcgcaggaatgcaaaaccacatgaaaatttcaagaattcactgatgaatgaaaaacaaaataaaaatttatcattacatcttgaatacaggaagcttacagcaaagagactatgctttatgacatcagcaatggataattctatgttgcctttgtgatttgtgtatatagcttacatttatagatcactacatagccagatgaaaaaatattttattccatccacagttctctacaaaaagaaccaatgaacccaaaaagaacaaattatctgtggaaaacaaagcataactgtagtagatacgaatccaatcaccaaggaaacaggaagaggaaaacatccaaaactacaatgacgataggaaatggtctgtttttgtgatattcgtatgattaagacacaaattttttcctaggaaaatgtgattgttaactaggattctgttttacatgttgacatttccaacacacacaccactgatttgaatttcaaaatttattttctgattatatatgctacgtctgattctgaagatacaaaaattcaatggtggaatttgtttcctgaaaattctagattcatacttagtaatagaagtgtttattaccaacttctcatttagattaacatcaatgatgttttgattattctggttaaccaccacacattaggcataacaataatgctagaaattcaggaaattaaaatttgtggaattaaaccatgtggaaaattattcaatt

SEQ ID NO: 30099 - DNA, 3846 bp, Macaca Mulatta
  misc_feature (1)...(3846): n = A,T,C or G
ctccagagggcgcaggccgaggtgccgctgtctgtccgggagctgagccgaagtcggaagctgtatcgtcagcgggaacgtgtgtgggccttggcacaggagaaggcagctgacgtccaggccaggncaggctaaaccgaagtgaccatgggatcttccactctcggaccagtctccagaaactgagcaccaagnnnnnnnnnnnnnnnnnnnnnnnnnnnnnnnnnnnnnnnnnnnnnnnnnnnnnnnnnnnnnnnnnnnnnnnnnnnnnnnnnnnnnnnnnnnnnnnnnnnnnnnnnnnnnnnnnnnnnnnnnnnnnnnnnnnnnnnnnnnnnnnnnnnnnnnnnnnnnnnnnnnnnnnnnnnnnnnnnnnnnnnnnnnnnnnnnnnnnnnnnnnnnnnnnnnnnnnnnnnnnnnnnnnnnnnnnnnnnnnnnnnnnnnnnnnnnnnnnnnnnnnnnnnnnnnnnnnnnnnnnnnnnnnnnnnnnnnnnnnnnnnnnnnnnnnnnnnnnnnnnnnnnnnnnnnnnnnnnnnnnnnnnnnnnnnnnnnnnnnnnnnnnnnnnnnnnnnnnnnnnnnnnnnnnnnnnnnnnnnnnnnnnnnnnnnnnnnnnnnnnnnnnnnnnnnnnnnnnnnnnnnnnnnnnnnnnnnnnnnnnnnnnnnnnnnnnnnnnnnnnnnnnnnnnnnnnnnnnnnnnnnnnnnnnnnnnnnnnnnnnnnnnnnnnnnnnnnnnnnnnnnnnnnnnnnnnnnnnnnnnnnnnnnnnnnnnnnnnnnnnnnnnnnnnnnnnnnnnnnnnnnnnnnnnnnnnnnnnnnnnnnnnnnnnnnnnnnnnnnnnnnnnnnnnnnnnnnnnnnnnnnnnnnnnnnnnnnnnnnnnnnnnnnnnnnnnnnnnnnnnnnnnnnnnnnnnnnnnnnnnnnnnnnnnnnnnnnnnnnnnnnnnnnnnnnnnnnnnnnnnnnnnnnnnnnnnnnnnnnnnnnnnnnnnnnnnnnnnnnnnnnnnnnnnnnnnnnnnnnnnnnnnnnnnnnnnnnnnnnnnnnnnnnnnnnnnnnnnnnnnnnnnnnnnnnnnnnnnnnnnnnnnnnnnnnnnnnnnnnnnnnnnnnnnnnnnnnnnnnnnnnnnnnnnnnnnnnnnnnnnnnnnnnnnnnnnnnnnnnnnnnnnnnnnnnnnnnnnnnnnnnnnnnnnnnnnnnnnnnnnnnnnnnnnnnnnnnnnnnnnnnnnnnnnnnnnnnnnnnnnnnnnnnnnnnnnnnnnnnnnnnnnnnnnnnnnnnnnnnnnnnnnnnnnnnnnnnnnnnnnnnnnnnnnnnnnnnnnnnnnnnnnnnnnnnnnnnnnnnnnnnnnnnnnnnnnnnnnnnnnnnnnnnnnnnnnnnnnnnnnnnnnnnnnnnnnnnnnnnnnnnnnnnnnnnnnnnnnnnnnnnnnnnnnnnnnnnnnnnnnnnnnnnnnnnnnnnnnnnnnnnnnnnnnnnnnnnnnnnnnnnnnnnnnnnnnnnnnnnnnnnnnnnnnnnnnnnnnnnnnnnnnnnnnnnnnnnnnnnnnnnnnnnnnnnnnnnnnnnnnnnnnnnnnnnnnnnnnnnnnnnnnnnnnnnnnnnnnnnnnnnnnnnnnnnnnnnnnnnnnnnnnnnnnnnnnnnnnnnnnnnnnnnnnnnnnnnnnnnnnnnnnnnnnnnnnnnnnnnnnnnnnnnnnnnnnnnnnnnnnnnnnnnnnnnnnnnnnnnnnnnnnnnnnnnnnnnnnnnnnnnnnnnnnnnnnnnnnnnnnnnnnnnnnnnnnnnnnnnnnnnnnnnnnnnnnnnnnnnnnnnnnnnnnnnnnnnnnnnnnnnnnnnnnnnnnnnnnnnnnnnnnnnnnnnnnnnnnnnnnnnnnnnnnnnnnnnnnnnnnnnnnnnnnnnnnnnnnnnnnnnnnnnnnnnnnnnnnnnnnnnnnnnnnnnnnnnnnnnnnnnnnnnnnnnnnnnnnnnnnnnnnnnnnnnnnnnnnnnnnnnnnnnnnnnnnnnnnnnnnnnnnnnnnnnnnnnnnnnnnnnnnnnnnnnnnnnnnnnnnnnnnnnnnnnnnnnnnnnnnnnnnnnnnnnnnnnnnnnnnnnnnnnnnnnnnnnnnnnnnnnnnnnnnnnnnnnnnnnnnnnnnnnnnnnnnnnnnnnnnnnnnnnnnnnnnnnnnnnnnnnnnnnnnnnnnnnnnnnnnnnnnnnnnnnnnnnnnnnnnnnnnnnnnnnnnnnnnnnnnnnnnnnnnnnnnnnnnnnnnnnnnnnnnnnnnnnnnnnnnnnnnnnnnnnnnnnnnnnnnnnnnnnnnnnnnnnnnnnnnnnnnnnnnnnnnnnnnnnnnnnnnnnnnnnnnnnnnnnnnnnnnnnnnnnnnnnnnnnnnnnnnnnnnnnnnnnnnnnnnnnnnnnnnnnnnnnnnnnnnnnnnnnnnnnnnnnnnnnnnnnnnnnnnnnnnnnnnnnnnnnnnnnnnnnnnnnnnnnnnnnnnnnnnnnnnnnnnnnnnnnnnnnnnnnnnnnnnnnnnnnnnnnnnnnnnnnnnnnnnnnnnnnnnnnnnnnnnnnnnnnnnnnnnnnnnnnnnnnnnnnnnnnnnnnnnnnnnnnnnnnnnnnnnnnnnnnnnnnnnnnnnnnnnnnnnnnnnnnnnnnnnnnnnnnnnnnnnnnnnnnnnnnnnnnnnnnnnnnnnnnnnnnnnnnnnnnnnnnnnnnnnnnnnnnnnnnnnnnnnnnnnnnnnnnnnnnnnnnnnnnnnnnnnnnnnnnnnnnnnnnnnnnnnnnnnnnnnnnnnnnnnnnnnnnnnnnnnnnnnnnnnnnnnnnnnnnnnnnnnnnnnnnnnnnnnnnnnnnnnnnnnnnnnnnnnnnnnnnnnnnnnnnnnnnnnnnnnnnnnnnnnnnnnnnnnnnnnnnnnnnnnnnnnnnnnnnnnnnnnnnnnnnnnnnnnnnnnnnnnnnnnnnnnnnnnnnnnnnnnnnnnnnnnnnnnnnnnnnnnnnnnnnnnnnnnnnnnnnnnnnnnnnnnnnnnnnnnnnnnnnnnnnnnnnnnnnnnnnnnnnnnnnnnnnnnnnnnnnnnnnnnnnnnnnnnnnnnnnnnnnnnnnnnnnnnnnnnnnnnnnnnnnnnnnnnnnnnnnnnnnnnnnnnnnnnnnnnnnnnnnnnnnnnnnnnnnnnnnnnnnnnnnnnnnnnnnnnnnnnnnnnnnnnnnnnnnnnnnnnnnnnnnnnnnnnnnnnnnnnnnnnnnnnnnnnnnnnnnnnnnnnnnnnnnnnnnnnnnnnnnnnnnnnnnnnnnnnnnnnnnnnnnnnnnnnnnnnnnnnnnnnnnnnnnnnnnnnnnnnnnnnnnnnnnnnnnnnnnnnnnnnnnnnnnnnnnnnnnnnnnnnnnnnnnnnnnnnnnnnnnnnnnnnnnnnnnnnnnnnnnnnnnnnnnnnnnnnnnnnnnnnnnnnnnnnnnnnnnnnnnnnnnnnnnnnnnnnnnnnnnnnnnnnnnnnnnnnnnnnnnnnnnnnnnnnnnnnnnnnnnnnnnnnnnnnnnnnnnnnnnnnnnnnnnnnnnnnnnnnnnnnnnnnnnnnnnnnnnnnnnnnnnnnnnnnnnnnnnnnnnnnnnnnnnnnnnnnnnnnnnnnnnnnnnnnnnnnnnnnnnnnnnnnnnnnnnnnnnnnnnnnnnnnnnnnnnnnnnnnnnnnnnnnnnnnnnnnnnnnnnnnnnnnnnnnnnnnnnnnnnnnnnnnnnnnnnnnnnnnnnnnnnnnntgcaggctggaggtggcatccacactggacagcagggaggaggggagcaagggtaacatttccatttcccttcatgttttgtttcttatgttctttcagcatgctccttaaaaccccagaagccccaatgtccccaagcccc

SEQ ID NO: 30100 - DNA, 207 bp, Macaca Mulatta
gctgccgccagcgcccccgaacgtgccgcacatctgcccgcaccgccaccacctccacaccgtgcagggcctggcctcgctctctggcccctgctgctcccgttgtagccagaagaagtggcctgaggtgctgctgtcccctgaggctgtagctgccactacttctgctcccagctttctgcctaacccgaccagggtcccaaggcc

SEQ ID NO: 30101 - DNA, 187 bp, Macaca Mulatta
  misc_feature (1)...(187): n = A,T,C or G
ggttttccaatgcattctcttactacgggttagttctactcaccacagaactcttccaggcaggagatgtctgnnnnctccagtcgtaagaaggcagtagaggcaaaatgcagcctggcctgcgagtacctgagtgaggaggattacatggacttactgtggaccaccctctctgagtttccaggtg

SEQ ID NO: 30102 - DNA, 1432 bp, Macaca Mulatta
  misc_feature (1)...(1432): n = A,T,C or G
agatgctgcagaagcttcgagaggacgagccgcaggtggagacgccacaggcagagctggacagcctgggtcacacagactgggnggcccggctgtgggttcagctcatgcgggagctccgccacggagtgaagctgaagaaggtgcaggagcaggagttcaaccccctccccaccgagttccagctcacgcccttcgagatgctaatgcaggacatccgggcccggaactacaagctccgcaaggtcatggtgnnnnnnnnnnnnnnnnnnnnnnnnnnnnnnnnnnnnnnnnnnnnnnnnnnnnnnnnnnnnnnnnnnnnnnnnnnnnnnnnnnnnnnnnnnnnnnnnnnnnnnnnnnnnnnnnnnnnnnnnnnnnnnnnnnnnnnnnnnnnnnnnnnnnnnnnnnnnnnnnnnnnnnnnnnnnnnnnnnnnnnnnnnnnnnnnnnnnnnnnnnnnnnngggtttgggtctctgccctgcatcctcaacgcctgctctggagatgccaagtccacctcctgcatcaacctgtcggtcacagatgctgggggcagtgcccagcgcccgcggccccgtgtgctgctcaaggcgcccaccttggcggagatggaggaaatgaacacatctgannnnnnnnnnnnnnnnnnnnnnnnnnnnnnnnnnnnnnnnnnnnnnnnnnnnnnnnnnnnnnnnnnnnnnnnnnnnnnnnnnnnnnnnnnnnnnnnnnnnnnnnnnnnnnnnnnnnnnnnnnnnnnnnnnnnnnnnnnnnnnnnnnnnnnnnnnnnnnnnnnnnnnnnnnnnnnnnnnnnnnnnnnnnnnnnnnnnnnnnnnnnnnnnnnnnnnnnnnnnnnnnnnnnnnnnnnnnnnnnnnnnnnnnnnnnnnnnnnnnnnnnnnnnnnnnnnnnnnnnnnnnnnnnnnnnnnnnnnnnnnnnnnnnnnnnnnnnnnnnnnnnnnnnnnnnnnnnnnnnnnnnnnnnnnnnnnnnnnnnnnnnnnnnnnnnnnnnnnnnnnnnnnnnnnnnnnnnnnnnnnnnnnnnnnnnnnnnnnnnnnnnnnnnnnnnnnnnnnnnnnnnnnnnnnnnnnnnnnnnnnnnnnnnnnnnnnnnnnnnnnnnnnnnnnnnnnnnnnnnnnnnnnnnnnnnnnnnnnnnnnnnnnnnnnnnnnnnnnnnnnnnnnnnnnnnnnagatgaagatgccttctaagaagtttggacacatccctgtctacacactgggctttgagagtcctcagagggtatcagccgccaaagccacgccgacccagaggagagacatttttcagtntctctgcaagggccacagtggcagagcgtggaggaggcgttccccacatctacgcccacgctgtgtcctgaaggatgtctgcagtgagtgcaccagcttttgtggctgacgtggtgcgttccagcc

SEQ ID NO: 30103 - DNA, 534 bp, Macaca Mulatta
  misc_feature (1)...(534): n = A,T,C or G
gaaatgtgtccactactggcccacagaagaggaaacctatggacccttccagattcgcatccaggacatgaaagagtgcccagaatacactgtgcggcagctcaccatccagnnnnnnnnnnnnnnnnnnnnnnnnnnnnnnnnnnnnnnnnnnnnnnnnnnnnnnnnnnnnnnnnnnnnnnnnnnnnnnnnnnnnnnnnnnnnnnnnnnnnnnnnnnnnnnnnnnnnnnnnnnnnnnnnnnnnnnnnnnnnnnnnnnnnnnnnnnncagtgcagggattggccggacaggctgcttcatcgccacgcgaattggctgtcaacagctgaaggcccgaggggaagtggacattctgggcattgtgtgccaactgcggctagacannncagaggggggatgatccagacggcagagcagtaccagttcctgcaccacactttggccctgtatgcaggccagcttccagaggaacccagcccctgacccctgccaccctccaacagcccaggcacccacctccctgaagcctgggaa

SEQ ID NO: 30104 - DNA, 984 bp, Macaca Mulatta
  misc_feature (1)...(984): n = A,T,C or G
caggtggtgggtcattcggcgcatactggcatcaacttgtggagcctgtgcgaatgggagagggcgacatgctctataaaagccgtaagaaggagcttgtcgtgcttcgactggccagtctgttgtttaagcggtttcttttactgagagatgagttacccttctctgaggaccagtgggacttgcttcattatgagctggaagaatatttcaatttgaatctgtagcattgtgctgtggcatgtggtctagtctgctgaggttctgtcgtctgctattgcctgttttccctgtgttgacactcttattgctttcaggggctgttgaggcagtgcttctgttttcttgtctattctgcatatctttcctcctaggattatggtgattatctgtgtttaaaaaaataagtccttaaagttactgttttggtgaaattaatattaatgtcagcttatggctttttttgtcatctctgttttcaacaggattaactcagttctagtgtagtgtttactgaatttccacacttattttgaagaccctcaagagtaaatgtggcagagtgaaaggagaagttttaattgaactagtagctttgtgctataatagccttaacaaatggaccctcgcagggtcttgcagctgctcatctgtttacagtttgttctttccctccttccccttcaagtgcacttgttaaactgtgatgaacttgtgattttgtgttttacttgaccaaaaccaagtgtatatgtttacatgtttttatcctgtttagcttgacatnnnnnnnnnnnnnnnnnnnnnnnnnnnnnnnnnnnnnnnnnnnnnnnnnnnnnnnnnnnnnnnnnnnnnnnnnnnnnnnnnnnntatataaaagaatatacatcacaatatttatgtttatgtaataaagtaaatacagagccgaaagctgaaagtcaaagcctaacaggattggctgttgtgtggatgtgagttgtg

SEQ ID NO: 30105 - DNA, 1797 bp, Macaca Mulatta
  misc_feature (1)...(1797): n = A,T,C or G
ggtcatcagcatgaagcgcagttcagtttccaccggtggtgctggccgcctctccatgcaggagctaagatcccaggatgtaaataaacaaggcctctatacccctcaaacnnnnnnnnnnnnnnnnnnnnnnnnnnnnnnnnnnnnnnnnnnnnnnnnnnnnnnnnnnnnnnnnnnnnnnnnnnnnagaactagtggacatggatcccggaatagtcaacttggtatattttccagttctgagaaaatcaaggacccgagaccacttaatgacaaagcattcattcagcaatgtattcgacaactctgtgannnnnnnnnnnnnnnnnnnnnnnnnnnnnnnnnnnnnnnnnnnnnnnnnnnnnnnnnnnnnnnnnnnnnnnnnnnnnnnnnnnnnnnnnnnnnnnnnnnnnnnnnnnnnnnnnnnnnnnnnnnnnnnnnnnnnnnnnnnnnnnnnnnnnnnnnnnnnnnnnnnnnnnnnnnnnnnnnnnnnnnnnnnnnnnnnnnnnnnnnnnnnnnnnnnnnnnnnnnnnnnnnnnnnnnnnnnnnnnnnnnnnnnnnnnnnnnnnnnnnnnnnnnnnnnnnnnnnnnnnnnnnnnnnnnnnnnnnnnnnnnnnnnnnnnnnnnnnnnnnnnnnnnnnnnnnnnnnnnnnnnnnnnnnnnnnnnnnnnnnnnnnnnnnnnnnnnnnnnnnnnnnnnnnnnnnnnnnnnnnnnnnnnnnnnnnnnnnnnnnnnnnnnnnnnnnnnnnnnnnnnnnnnnnnnnnnnnnnnnnnnnnnnnnnnnnnnnnnnnnnnnnnnnnnnnnnnnnnnnnnnnnnnnnnnnnnnnnnnnnnnnnnnnnnnnnnnnnnnnnnnnnnnnnnnnnnnnnnnnnnnnnngaatcgtctagagtcgttgagaaaactgaaggcttccttacaaggagatgttcaaaagtatcaggcatacatgagcaatttggagtctcattcagccattcttgaccagaaattaaatggtctcaatgaggaaattgctagagtannnnnnnnnnnnnnnnnnnnnnnnnnnnnnnnnnnnnnnnnnnnnnnnnnnnnnnnnnnnnnnnnnnnnnnnnnnnnnnnnnnnnnnnnnnnnnnnnnnnnnnnnnnnnnnnnnnnnnnnnnnnnnnnnnnnnnnnnnnnnnnnnnnnnnnnnnnnnnnnnnnnnnnnnnnnnnnnnnnnnnnnnnnnnnnnnnnnnnnnnnnnnnnnnnnnnnnnnnnnnnnnnnnnnnnnnnnnnnnnnnnnnnnnnnnnnnnnnnnnnnnnnnnnnnnnnnnnnnnnnnnnnnnnnnnnnnnnnnnnnnnnnnnnnnnnnnnnnnnnnnnnnnnnnnnnnnnnnnnnnnnnnnnnnnnnnnnnnnnnnnnnnnnnnnnnnnnnnnnnnnnnnnnnnnnnnnnnnnnnnnnnnnnnnnnnnnnnnnnnnnnnnnnnnnnnnnnnnnnnnnnnnnnnnnnnnnnnnnnnnnnnnnnnnnnnnnnnnnnnnnnnnnnnnnnnnnnnnnnnnnnnnnnnnnnnnnnnnnnnnnnnnnnnnnnnnnnnnnnnggaagcagaggaagaagatgaaaaatgtgccagtgagcttgagtccttggagaaacacaagcacctgctagaaagtactgttaaccaggggctcagtgaagccatgaatgaattagatgctgttcagcgggataccaactagttgtgcaaaccacgactgaagaaagacgaaaagtgggaaataacttacaacgtctgttagagatggttgctacacatgtcgggtctgtagag

SEQ ID NO: 30106 - DNA, 311 bp, Macaca Mulatta
ctccctggaggctgctctctcttatcctgagagctggcctagtggtgctgagggctcctttctgcttctctgcccacctgctgagttgccactcacagcgttgtcagttcctgtgttctgagaagaggtcacgcctgggaggaagggatcgtcatgctgcatcgaatcctctctgcgctgtgtggccccgggagcgtagctgcctgttgcacctgctccacacctctccacggcctccctgcaggtgctgtgtggtgtgatgtgcagagagcagcgagggaggctttaggaagcaggtggatcctctttac

SEQ ID NO: 30107 - DNA, 1482 bp, Macaca Mulatta
caacctgaaggtggccaagcaggatggctccgtggtgcagttcaagatccagaggcacacaccactgagcaagctgatgaaggcctgctgcgagaggcagggcttgtcagtgagccagattagattcaggtttgacgggcagccaattaatgaaaccgacactccagcacagctggagatggaggagaggacaccatcgacgtgttccagcagcagacaggaggtgcgccggagagcagcctggcagggcatggtttctagagggcccgtccccaatccgggccatccgtccttgcattgctgtcgaatggtgagcacgtgaccatgctgaccacaaaggcgtctgcgcaaactcgaggacattcaccgcgatgattttcctctctttaatgtacttcaagtgcaactcaaaactgtatctgtggggttgaatctgtaacttaaattgggccaatcggaattgttatctttgttcaggtaaaatgagttgcaaggtattttgggtttttttgtgtgtccatttgtgtttttcccccctcctaaaacatttttaaccccaaaattatagcctgaatgttcgcttttagtctggccagggatctgactcctgagttggctgcctctccgctgctcactccagtcacatagagaattgatgtttctcgcagtgggggtgccgctgttggacaggtaatggggtcaaggtgggtagggaggatagactgtcatttgctgttataggcacaagtgattaaaatgctaaatattgcaaatgtatgctttgtcagtatatggaaaagttgaagggaaaatactggaatgcttcttcaaaggttaaaaaataaccaggtcctttggtaatttgaccccacgtgctctctggccctcaagcatgtaatctcccagtctgaagcccaggacccactccgctgccacccctcccaccccactccctgctcagtacctggcgttggtacacaggcaaggattggcccaaccaaaattggcttttctcttcctcttaatattgaagaaattcccacatttctcatttggtaatggtgttgtgacctcagatttcttccagtatttgcttctgatgaataattatggtccatacataaaaaagtaagattaagtattgctgaatttgcagttacgttgtcgtgtaaaagagctacttcccagtgtggttacaaatgaacccacggaatgatgacttcatgttcttctcgtgggtttgtgccgtgctgctttccaaatatgtattgaatttatgcattagtctggtgatttcagttctgtgaaatattttggaatctatgccaattaaatattttcatagttctgcctattgtccttccctgaggctccattgctgcttggtggccattctctgcctttttatagtcacctgaacaacagcccgtcatctcttgcttgcttgaaatcttgctgaaatgttctcatttcctgtttgct

SEQ ID NO: 30108 - DNA, 780 bp, Macaca Mulatta
tcaacatcagcaaaatcacactggtgagaaaccctgtgattgtaaggaaagtgggaaatcttttacttctcactcaacactaattcaacatcagcaaattcacactggtgagaaaccctatgattgtaaggaatgtggaaaatcttttacttctcactcaacactaattcaacatcagcaaatacacactggtgagaagctctatgattgtaaggaatgtgggaaatcttttgcttctcattcaacactaattcaacatcagcgaattcacactggtgagaaaccctatcattgtaaggaatgtgggaaatcttttactctccgctcagcactaattcaacatcggccaattcacactggtgagagacgctacagttgtaaagaatgtgggaaatcttttacttgtcactcaacactaattgaacatcagcgaattcacactggtgagaaaccctatcattgtaaggaatgtggaaaatcttttacttttcgctcagcaataattcagcatcagcgaattcacactggtgagaaaccctatgattgtaaggaatgcgggaaggcctttagacgtcgttcaaaacttactcaacatcaacgaatccatactggtgagaaaccttatcaatgtcatgaatgtgggaaagcctttgtccgtttctcaggactcacaaaacatcacagtattcacactggcgagaaaccctatgaatgtaagacatgtgggaagtccttcagacagcgtacacaccttactctacatcagagaattcataccgg

SEQ ID NO: 30109 - DNA, 1678 bp, Macaca Mulatta
  misc_feature (1)...(1678): n = A,T,C or G
aagaaccgtaaagatacaaaccaaacctacaaccttatggggctgcaggcttttacagagtatgtcgtagctctgcgatgtgcggtcaaggagtcaaagttctggagtgactggagccaagaaaaaatgggaatgactgaggaagaannnnnnnnnnnnnnnnnnnnnnnnnnnnnnnnnnnnnnnnnnnnnnnnnnnnnnnnnnnnnnnnnnnnnnnnnnnnnnagaaggcaagaggagccccagtcctagagaaaacacttggctacaacatatggtactttccagaaaacaacactaacctcacagagacagtgaacaccactaaccagcagcttgaactgcatctgggaggcgagagctattgggtgtctatgatttcttataattctcttgggaagtctccagtgaccaccctgaggattccagccattcaggaaaannnnnnnnnnnnnnnnnnnnnnnnnnnnnnnnnnnnnnnnnnnnnnnnnnnnnnnnnnnnnnnnnnnnnnnnnnnnnnnnnnnnnnnnnnnnnnnnnnnnnnnnnnnnnnnnnnnnnnnnnnnnnnnnnnnnnnnnnnnnnnnnnnnnnnnnnnnnnnnnnnnnnnnnnnnnnnnnnnnnnnnnnnnnnnnnnnnnnnnnnnnnnnnnnnnnnnnnnnnnnnnnnnnnnnnnnnnnnnnnnnnnnnnnnnnnnnnnnnnnnnnnnnnnnnnnnnnnnnnnnnnnnnnnnnnnnnnnnnnnnnnnnnnnnnnnnnnnnnnnnnnnnnnnnnnnnnnnnnnnnnnnnnnnnnnnnnnnnnnnnnnnnnnnnnnnnnnnnnnnnnnnnnnnnnnnnnnnnnnnnnnnnnnnnnnnnnnnnnnnnnnnnnnnnnnnnnnnnnnnnnnnnnnnnnnnnnnnnnnnnnnnnnnnnnnnnnnnnnnnnnnnnnnnnnnnnnnnnnnnnnnnnnnnnnnnnnnnnnnnnnnnnnnnnnnnnnnnnnnnnnnnnnnnnnnnnnnnnnnnnnnnnnnnnnnnnnnnnnnnnnnnnnnnnnnnnnnnnnnnnnnnnnnnnnnnnnnnnnnnnnnnnnnnnnnnnnnnnnnnnnnnnnnnnnnnnnnnnnnnnnnnnnnnnnnnnnnnnnnnnnnnnnnnnnnnnnnnnnnnnnnnnnnnnnnnnnnnnnnnnnnnnnnnnnnnnnnnnnnnnnnnnnnnnnnnnnnnnnnnnnnnnnnnnnnnnnnnnnnnnnnnnnnnnnnnnnnnnnnnnnnnnnnnnnnnnnnnnnnnnnnnnnnnnnnnnnnnnnnnnnnnnnnnnnnnnnnnnnnnnnnnnnnnnnnnnnnnnnnnnnnnnnnnnnnnnnnnnnnnnnnnnnnnnnnnnnnnnnnnnnnnnnnnnnnnnnnnnnnnnngtatgtgacccaccccttcaggcctgactgtcccctggggaaaagttttgaggagctcccagtttcacctgagattcctcccagaaaatcccaatacctacgttcgaggatgccagaagggacctgcctagaagccgaagagcagcttctcgtttctggtcaaagtctagaaagtctagcaccagaccatgtgtgggaggcagcggccccaaatccctatttgaaaaattcagtgacaaccagggaatttcttgtgtctcagaaacttccagagcacaccaaaggagaagtcta

SEQ ID NO: 30110 - DNA, 1475 bp, Macaca Mulatta
  misc_feature (1)...(1475): n = A,T,C or G
cctcaatgagctcttcggcaagtttgacgagttagccacgnnnnnnnnnnnnnnnnnnnnnnnnnnnnnnnnnnnnnnnnnnnnnnnnnnnnnnnnnnnnnnnnnnnnnnnnnnnnnnnnnnnnnnnnnnnnnnnnnnnnnnnnnnnnnnnnnnnnnnnnnnnnnnnnnnnnnnnnnnnnnnnnnnnnnnnnnnnnnnnnnnnnnnnnnnnnnnnnnnnnnnnnnnnnnnnnnnnnnnnnnnnnnnnnnnnnnnnnnnnnnnnnnnnnnnnnnnnnnnnnnnnnnnnnnnnnnnnnnnnnnnnnnnnnnnnnnnnnnnnnnnnnnnnnnnnnnnnnnnnnnnnnnnnnnnnnnnnnnnnnnnnnnnnnnnnnnnnnnnnnnnnnnnnnnnnnnnnnnnnnnnnnnnnnnnnnnnnnnnnnnnnnnnnnnnnnnnnnnnnnnnnnnnnnnnnnnnnnnnnnnnnnnnnnnnnnnnnnnnnnnnnnnnnnnnnnnnnnnnnnnnnnnnnnnnnnnnnnnnnnnnnnnnnnnnnnnnnnnnnnnnnnnnnnnnnnnnnnnnnnnnnnnnnnnnnnnnnnnnnnnnnnnnnnnnnnnnnnnnnnnnnnnnnnnnnnnnnnnnnnnnnnnnnnnnnnnnnnnnnnnnnnnnnnnnnnnnnnnnnnnnnnnnnnnnnnnnnnnnnnnnnnnnnnnnnnnnnnnnnnnnnnnnnnnnnnnnnnnnnnnnnnnnnnnnnnnnnnnnnnnnnnnnnnnnnnnnnnnnnnnnnnnnnnnnnnnnnnnnnnnnnnnnnnnnnnnnnnnnnnnnnnnnnnnnnnnnnnnnnnnnnnnnnnnnnnnnnnnnnnnnnnnnnnnnnnnnnnnnnnnnnnnnnnnnnnnnnnnnnnnnnnnnnnnnnnnnnnnnnnnnnnnnnnnnnnnnnnnnnnnnnnnnnnnnnnnnnnnnnnnnnnnnnnnnnnnnnnnnnnnnnnnnnnnnnnnnnnnnnnnnnnnnnnnnnnnnnnnnncagtgttttccagggtgcctgacgattcagattcgcactgtcctgtgtattttcatagtggtcttaatctactcagtagcccaaggatgtgtggtnnnnnnnnnnnnnnnnnnnnnnnnnnnnnnnnnnnnnnnnnnnnnnnnnnnnnnnnnnnnnnnnnnnnnnnnnnnnnnnnnnnnnnnnnnnnnnnnnnnnnnnnnnnnnnnnnnnnnnnnnnnnnnnnnnnnnnnnnnnnnnnnnnnnnnnnnnnnnnnnnnnnnnnnnnnnnnnnnnnnnnnnnnnnnnnnnnnnnnnnnnnnnnnnnnnnnnnnnnnnnnnnnnnnnnnnnnnnnnnnnnnnnnnnnnggggtggtgccgtctccgggcgcagctatgagccgattgtggccatcctgctcttctcctgtgcgctggccctgcatgccaggcaggtggacatcaggctgaggctggactacctctgggccgcacaggca

SEQ ID NO: 30111 - DNA, 111 bp, Macaca Mulatta
tatcactcagaatctggcagcctgttccgtcctgacagagtttacagtatatattggtggattcttgtccatagtgcatctgctttaagaattaacgaaagcagtgtcaag

SEQ ID NO: 30112 - DNA, 167 bp, Macaca Mulatta
cccccgcacattagcatttaaattggagtcgttgctgcgggctcatgaataatgaatctggagccctggtaaatctccccctcccactgcctcagcctcgtgcgctgctcgggaggaaggccctcaaggctccccagcctgcctggcccccgcctttgcccctgcct

SEQ ID NO: 30113 - DNA, 449 bp, Macaca Mulatta
gcggcttattagagaacaacctgggagaacccatagaggaatttatgcggccttatgatttacaagatccaagaattcatgtgagtgagatcttatgttcttctgtaactcttatagtctcagctgatggtcaccctgtgtatctattcctcaaactcacccggagaaagaaggtggagcagcaagcaaattagatttcttggcgtattaacctgtttttaggttggcatcatcagctatggattgacgggcattttccttttgtagactgttctgagtggagaagtgtacacttgcatgtgcttcctcattgatatggtgaatgtaagtctggagcttaaagatccaaaaagaaaagaaggtgctgggtccctagccaggtatgcctttaattatattattatactgttagtaacagtatccaaataatacacatgttttgcgttgac

SEQ ID NO: 30114 - DNA, 440 bp, Macaca Mulatta
  misc_feature (1)...(440): n = A,T,C or G
cgactctttcctcttccccacggtccagtcagcgggttaattaggccatcggccctcgagccgagacttgtctcttatttagttctggggagcgcctcgtcgacatgagtgatgtagaggagaacaacttcgagggcagagnnnnnnnnnnnnnnnnnnnnnnnnnnnnnnnnnnnnnnnnnnnnnnnnnnnnnnnnnnnnnnnnnnnnnnnnnnnnnnnnnnnnnnnnnnnnnnnnnnnnnnnnnnnnnnnnnnnnnnnnnnnnnnnnnnnaggtcgaggtcaaggaggcattctcatagacgttacactcgatccagatcccactctcactctcataggagacgatctcgaagtcgatcatacacaccagaataccggcggcgaaggagccgaagccattctccaatgtctaaccggagaagacatactggcagcagg

SEQ ID NO: 30115 - DNA, 632 bp, Macaca Mulatta
acagctcctaaaaatgcacagctggaactgaagaagagtaagaggaaagattactacaagattctgggagtggacaagaatgcctctgaggacgagatcaagaaagcttatcggaaacgggccttgatgcaccatccagatcggcatagtggagccagtgctgaggttcagaaggaggaggagaagaagttcaaggaagttggagaggcctttactatcctctctgatcccaagaaaaagactcgctatgacagtggacaggacctagatgaggagggcatgaatatgggtgattttgatccaaacaatatcttcaaggctttcttcggcggtcctggaggcttcagctttgaagcatctggtccagggagtttcttttttcaatttggctaatgaagggcaaccacccagaacccagaaatgcagattcactcagtttaatcttgaatgtggaaacagttcacctcctcccttcatcacgtctccatgtacttagagcagtttcgttttctcagttggatgccctgtgtctctgtgagtggggtggagcaaagggaaccaatgccgaagaccgcgggcaggggagggaggcgggggtggacagggagtcagcttgtgaatttttgttttac

SEQ ID NO: 30116 - DNA, 1215 bp, Macaca Mulatta
  misc_feature (1)...(1215): n = A,T,C or G
agacctcctatctgccaaccgctctgccatctttctgggcccccggggctccctgaacttccaggccatgtacctagatgagtaccgggaccgcctctttctgggaggccaggatgccctctactctctgcgactggaccaggcgtggccagatccccgggaggnnnnnnnnnnnnnnnnnnnnnnnnnnnnnnnnnnnnnnnnnnnnnnnnnnnnnnnnnnnnnnnnnnnnnnnnnnnnnnnnnnnnnnnnnnnnnnnnnnnnnnnnnnnnnnnnnnnnnnnnnnnnnnnnnnnnnnnnnnnnnnnnnnnnnnnnnnnnnnnnnnnnnnnnnnnnnnnnnnngcatgtgctccacctggattccggcagtgtggaaagcggccgggggcggtgccctcacgaacccagccgtccctttgccagcaccttnnnnnnggggagctgtacacgggtctcaccgctgacttcctggggcgagaggccatgatcttccgaagcggaggtcctcggccagctctgcgttctgactctgaccagagcctcttgcacgngacccccggtttgtgatggccgcccggatccctgagaactctgaccaggacaatgacaaggtgtacttcttcttctcagaaactgtcccctcgcccgatggtggctcgaactatgtcactgtcagccgcgtnnnnnnnnnnnnnnnnnnnnnnnnnnnnnnnnnnnnnnnnnnnnnnnnnnnnnnnnnnnnnnnnnnnnnnnnnnnnnnnnnnnnnnnnnnnnnnnnnnnnnnnnnnnnnnnnnnnnnnnnnnnnnnnnnnnnnnnnnnnnnnnnnnnnnnnnnnnnnnnnnnnnnnnnnnnnnnnnnnnnnnnnnnnnnnnnnnnnnnnnnnnnnnnnnnnnnnnnnnnnnnnnnnnnnnnnnnnnnnnnnnnnnnnnnnnnnnnnnnnnnnnnnnnnnnnnnnnnnnnnnnnnnnnnnnnnnnnnnnnnnnnnnnnnnnnnnnnnnnnnnnnnnnnnnnnnnnnnnnnnnnnnngtgccccagcaagatgactgcgcagccagggcggccttttggcagcaccaaggactacccagatgaggtgctgcagtttgcccgagcccatcccctcatgttctggcctgtgcggcctcggcatggccgccctgtccttgtcaagacccacctggccgagaagctacaccagatcgtggtggaccgc

SEQ ID NO: 30117 - DNA, 93 bp, Macaca Mulatta
cctcgtggcaatacagcgtcactgatggctgtacccgctgtgcttcccagttttacaccatatgtggaagagactgcacaacagccagttatg

SEQ ID NO: 30118 - DNA, 1068 bp, Macaca Mulatta
  misc_feature (1)...(1068): n = A,T,C or G
ggagaaaaactcaggcccatccattttctgggatctccttgaaaattgaggccttttcggtagtttcgggtcaggtaaaaatggcctcctggcatgagcttttcaaggtttcttggaggctttgtgcaaattgtgataaccactttggaccttcaacttatgtatctatcatgtggaaaagagccaatttagcaaactaggaacatgaaaagggaaattatggccaaaactttgggaaaaggaggttcttaaaatcagtattcccctttgtgcacttgnnnnnnnnnnnnnnnnnnnnnttctagggctgatttgatggacatttggagagagctttctctgtgattataaaaaaagaagctagctgctctatgggtcgtctttgcttagagtgtactttaacctggcttttaaagcggtagtaactgtgtcccaccaaaggtcttaaaagccatttttggagcgtattgcactgtgttctcctattgcaaatattttcatatgggaggatatttttctcttcatgcaagtccttggaattgattctaaggtgatgttcttagcactttagttcctgtcaaattttttgtcctcccccctccaccatcttaaatgtaagctgaaactcgtctactatgtctctaggggtaagcccaaagacnnnnnnnnnnnnnnnnnnttaacctacttttgagattgccccaatgtacagaattacataattctaagactcaaatcatgtgaaaagggttgctgctgtcagccttgcccactgtgacttctccaaacccaaagaggacctcttgatcaaaatgcccaacactgatcagaaactcccaaatactgcccatgagaaaactaagaggggcaggtccttccccaaaaacccctttcgaaccccccctttcctgcccctgttgttaaggaaaaaaggggaataattggggcccccttcttctttaatttggaagacttggcccaagaaanccttggggttcaaagtccaaacttccctcagagccctattataacccacctttttggtgtctcacactgggaccccccctc

SEQ ID NO: 30119 - DNA, 106 bp, Macaca Mulatta
acaaaatgttttcagctcctggaggcgaagggtgcagagccgctctgtgtccgtgaggccgggcggcgacctcgctcagtcggctcctcggtccgagtcccggggt

SEQ ID NO: 30120 - DNA, 213 bp, Macaca Mulatta
tttcataacatccaggatgtccccttgaagaaggaattcttcgtgaagtatcaggaccatggcttctcagagatcttcgccaactcacgggaggtgagcagccaactccggctgcctccgggggagtatatcattattccctccacctttgagccacacagagatgccgacttcctacttcgtgtcttcaccgagaagcacagcgagtcatgg

SEQ ID NO: 30121 - DNA, 1640 bp, Macaca Mulatta
  misc_feature (1)...(1640): n = A,T,C or G
ggtgcaggtgtgggtgctgagccgcccgccgcctggaggtttttttttagcttcaggacacgcaggccgtatcgagggcccgggcccnnnnnnnnnnnnnnnnnnnnnnnnnnnnnnnnnnnnnnnnnnnnnnnnnnnnnnnnnnnnnnnnnnnnnnnnnnnnnnnnnnnnnnnnnnnnnnnnnnnnnnnnnnnnnnnnnnnnnnnnnnnnnnnnnnnnnnnnnnnnnnnnnnnnnnnnnnnnnnnnnnnnnnnnnnnnnnnnnnnnnnnnnnnnnnnnnnnnnnnnnnnnnnnnnnnnnnnnnnnnnnnnnnnnnnnnnnnnnnnnnnnnnnnnnnnnnnnnnnnnnnnnnnnnnnnnnnnnnnnnnnnnnnnnnnnnnnnnnnnagaggatatgtttgcatggcaaatcgatttcaatggtggggaccgctggaaggtggagagcctccctggagcccacgggacagattttcctgaccccaaagtcaagaagtattttgtcacatcctacgnnnnnnnnnnnnnnnnnnnnnnnnnnnnnnnnnnnnnnnnnnnnnnnnnnnnnnnnnnnnnnnnnnnnnnnnnnnnnnnnnnnnnnnnnnnnnnnnnnnnnnnnnnnnnnnnnnnnnnnnnnnnnnnnnnnnnnnnnnnnnnnnnnnnnnnnnnnnnnnnnnnnnnnnnnnnnnnnnnnnnnnnnnnnnnnnnnnnnnnnnnnnnnnnnnnnnnnnnnnnnnnnnnnnnnnnnnnnnnnnnnnnnnnnnnnnnnnnnnnnnnnnnnnnnnnnnnnnnnnnnnnnnnnnnnnnnnnnnnnnnnnnnnnnnnnnnnnnnnnnnnnnnnnnnnnnnnnnnnnnnnnnnnnnnnnnnnnnnnnnnnnnnnnnnnnnnnnnnnnnnnnnnnnnnnnnnnnnnnnnnnnnnnnnnnnnnnnnnnnnnnnnnnnnnnnnnnnnnnnnnnnnnnnnnnnnnnnnnnnnnnnnnnnnnnnnnnnnnnnnnnnnnnnnnnnnnnnnnnnnnnnnnnnnnnnnnnnnnnnnnnnnnnnnnnnnnnnnnnnnnnnnnnnnnnnnnnnnnnnnnnnnnnnnnnnnnnnnnnnnnnnnnnnnnnnnnnnnnnnnnnnnnnnnnnnnnnnnnnnnnnnnnnnnnnnnnnnnnnnnnnnnnnnnnnngtggctaacgcctgtgatcccagcactttgggannnnnnnnnnnnnnnnnnnnnnnnnnnnnnnnnnnnnnnnnnnnnnnnnnnnnnnnnnnnnnnnnnnnnnnnnnnnnnnnnaaaaattcgccgggcatagtggccagtgcctgtggtcctagctactcgggaggctnnnnnnnnnnnnnnnnnnnnnnnnnnnnnnnnnnnnnnnnggccgggtacggtggctcgcgcctgtaatcccagcactttgggaggccgaggagggcagaacacgaggtcaggagattgagaccatcctggccaacatggtgaaaccccgtctctactaaaagcacaaaaaattagctcggcatagtggcgggcacctgtagtcccagctactcaggaggctgaggcaggagagtggaatgaaccctggaggcagaggttacattgagcggagacagcacgactgcattccagcctgggtgacaga

SEQ ID NO: 30122 - DNA, 1858 bp, Macaca Mulatta
  misc_feature (1)...(1858): n = A,T,C or G
caacagacacattgacatgggtgggtttacccgccaggcggtcgatggtcttctgtgtgaaggccagcggcagggcctcgtggcccaccatgcaggagaaggtgtcccccttcttccagtcctcggctgccacgcgcagtatgctggtcacggcgaaggtggtggtgccctggctgggctccttccgggattcccaagtcaggtacttgtcacggggcagctgctctgttcccttcagccagcgaaccagcacgtcctcggggctgaagccgcgtgccaggcacgtcagcgtcaccagctcgttcagggccagctcctccgacggcggcggcagcaggtggacctcgggccggaacgtgtttcctggaggtagagagccaggtcaggggctgggcaggggatgagagagcctctaccgctctggtgggcaccccgggctgtgtcctggccccctcagcctgcctcagtttccctctgcacttggcatgagcacccaagcccaggaccgggagggaggaggcaggctgggaatatgctttgcaaaccagagccccgagcagggtctggacccaccggattttgagatggtggcagttagtggggtctccaactcagggtgatcagcagtgcaggtgaaggtcaccctattgttccatggctcggcacagccgggcaggacactggacacactgtagcagccacaggggtcacgctcaggtgactgttggacagcgttcttcccacttgagggcgtccaggtgaaggtggcacccgagggatctctcaggccggtcagtgtgcacgtgaggttcgcctctgaacctaggagcaggtcctcgagggccggccggcgcagcgacagtcggggttcgtcacataagcaagggcttggttgggggaactgcagtggagagatggcctcagctggtcagcacgcccttccccgtgcccccgccttgcccctcctggcctgtctaccaccacctcctggggctcggcccacagtccactctggtgtgagtgaaggggcggctccctgtggggaacacaggtccaggcgcagtgtcagggcaggctggggtggccccgccccactccccagcctgccctctaaccgcagggcacagccacatcctgtctgggatttgtgtagtgctccacgtggcatgtcacggactcgctggctgggcactgtgcagctggcagggtcagctggctgctcgtggtgtacaggcccccggaggcgtcctgcctgggcgggaagtttatgacggtcacgcccgctccgcttttgctccaggtcacgttgagtggctcctgggggaagaagccctggaccaggcaggcgacgaccacgttatctgactgggtgccctcgaggctcagcgggaagaccttgggtctggtcggggatgctggaacacagaatgcgnnngcgacctggccccagacctcgaagtaatcttcgattagggtactacctttacagtaatatacggccgtgtccgcggcggtcacggacctcaggtgcagggaaaattgattcctggacgtgtcttttgaaacggtgactcgattcttgagggacggattgtagttggcgttcccagtcctgccatgaatatatccaatccactccagccccttacctggggactggcggatccaggtccagtcgtaaagaccgctgatagagcctccagagacagcgcaggtgagggacagggtctctgaaggcttcaccagtcctgggcccgactcctgcaggtgcacctgggacaggacccatctgggagctgccacacaggaggaggaagaaccacagtgtttcatgttctgcacaggagtccacctcgtc

SEQ ID NO: 30123 - DNA, 6883 bp, Macaca Mulatta
  misc_feature (1)...(6883): n = A,T,C or G
tgaaatgatacaaacttccgtctggtttgaccgcaaacagtgtttattnnnnnnnnnnnnnnnnnnnnnnnnnnnnnnnnnnnnaaacagagaaagggatgctttgaagagatcatgaaataaaacccacagaggtatgtgatttatttaattgtgaaaggagactttgcagatacatgaggccagaatggcctgttttataattgggtaaagaaggaagcattattatatattattgtgaggaagaaccagccagtttgctttttctcctaaggcgtggaagttttatgttgttttaaaaatacgaatcggaattcctgttttgtgtgccaaggtataaagtggagacgtcagatgcgtgcaaggagctcctttgtgttgtgacgatgtgttttcaaagttgcactatcttaatgttgaaaatatttacgagggaactgttttgcgtgaagttctgtatgttgtcttttcacctgtggattgtaatcaggcgcaaggaatatcctggagtggtccccagaatcacccaagaaaagatatttggggatgtagcctaacattttaccaacttacgtaaatcaaaaaagtcatcattgttgcaggagtttgcatcaaatagcagtgcatcgctgaggcttttggagacatttgggtggaagatannnnnnnnnnnnnnnnnnnnnnnnnnnnnnnnnnnnnnnnnnnnnnnnnnnnnnnnnnnnnnnnnnnnnnnnnnnnnnnnnnnnnnnnnnnnnnnnnnnnnnnnnnnnnnnnnnnnnnnnnnnnnnnnnnnnnnnnnnnnnnnnnnnnnnnnnnnnnnnnnnnnnnnnnnnnnnnnnnnnnnnnnnnnnnnnnnnnnnnnnnnnnnnnnnnnnnnnnnnnnnnnnnnnnnnnnnnnnnnnnnnnnnnnnnnnnnnnnnnnnnnnnnnnnnnnnnnnnnnnnnnnnnnnnnnnnnnnnnnnnnnnnnnnnnnnnnnnnnnnnnnnnnnnnnnnnnnnnnnnnnnnnnnnnnnnnnnnnnnnnnnnnnnnnnnnnnnnnnnnnnnnnnnnnnnnnnnnnnnnnnnnnnnnnnnnnnnnnnnnnnnnnnnnnnnnnnnnnnnnnnnnnnnnnnnnnnnnnnnnnnnnnnnnnnnnnnnnnnnnnnnnnnnnnnnnnnnnnnnnnnnnnnnnnnnnnnnnnnnnnnnnnnnnnnnnnnnnnnnnnnnnnnnnnnnnnnnnnnnnnnnnnnnnnnnnnnnnnnnnnnnnnnnnnnnnnnnnnnnnnnnnnnnnnnnnnnnnnnnnnnnnnnnnnnnnnnnnnnnnnnnnnnnnnnnnnnnngaagagcgccgggtaaaaagcacaacatgcagttaaaatgcaactagaaaactaattttaaatattgttagttttaatattcctgatatttacaaatactcattctcatgtacaattaaaaaaataactttcttctgcagatgtaagcactggcttttgtaagagcagcagccaacacgtttagcagccactgcgcatggagaagggcttgtctgcagcacagtctgccgtgtggaggggggggcctgtggcctcttcacgtaacacgatgagctggaatgacgattccgtgactcccatctatgcagctttaaagccaaatccgcccgcgtgtgtgtgtctgtctgtctgtggatctcgcaggtgagcccctccatgcggtggctgtgctgtcactggagactgttccagaccccaagggttgtctgacccttgtctgttccgttctgcttcttaccgctgtaggtaggccacggtttttgtttgttttgaggattagaatttccattacattcatccttttcacacagtaacatccacagaactagtccacctcttacaaggagagaggaaaaacaagggcaccagttgtcagctcctgcctacgaccctgtgtggaagtatatacagttgagagtcaccgtggaggttctgagactggactcagtcttgttccagtgacacttggaagggtctgctggagagaaaccagctctcagggcagggattggctgggggccagagaggaccttccccaaccctggagacgccctgaaggttctctggctccccagatgagcctctcttcctgtcaggcgaagatgaggagcccgtgttcccagcaggccctgctggcagggacttgcagtggattctcggtcaggtgtgtccacagacgcgggggcgagatgagcgatctcatcattccagttctcactcgcaggtttggggaagcaggggacgcagtccacagctccagctcccaaatggcttcacagtccttacttctccacctgcctcgaaggggctcagagacgagacttgtgaattccttggtaactgcgagtaatgagtgttttgcacatgtccacagtgtgggtgagataattatggaattcagataccttcaatcatctttcaagaaagaggcccctcccattcaaccaccctgagaactgcccttgttaaatcgttatttaaggacatatatatcaaaccatgactctgaaaggtcttcgaggctggggctctgtaatgaattagtttaaaagccgagatcataacatgaattaatagtcaattnnnnnnnnnnnnnnnnnnnnnnnnnnnnnnnnnnnnnnnnnnnnnnnnnnnnnnnnnnnnnnnnnnnnnnnnnnnnnnnnnnnnnnnnnnnnnnnnnnnnnnnnnnnnnnnnnnnnnnnnnnnnnnnnnnnnnnnnnnnnnnnnnnnnnnnnnnnnnnnnnnnnnnnnnnnnnnnnnnnnnnnnnnnnnnnnnnnnnnnnnnnnnnnnnnnnnnnnnnnnnnnnnnnnnnnnnnnnnnnnnnnnnnnnnnnnnnnnnnnnnnnnnnnnnnnnnnnnnnnnnnnnnnnnnnnnnnnnnnnnnnnnnnnnnnnnnnnnnnnnnnnnnnnnnnnnnnnnnnnnnnnnnnnnnnnnnnnnnnnnnnnnnnnnnnnnnnnnnnnnnnnnnnnnnnnnnnnnnnnnnnnnnnnnnnnnnnnnnnnnnnnnnnnnnnnnnnnnnnnnnnnnnnnnnnnnnnnnnnnnnnnnnnnnnnnnnnnnnnnnnnnnnnnnnnnnnnnnnnnnnnnnnnnnnnnnnnnnnnnnnnnnnnnnnnnnnnnnnnnnnnnnnnnnnnnnnnnnnnnnnnnnnnnnnnnnnnnnnnnnnnnnnnnnnnnnnnnnnnnnnnnnnnnnnnnnnnnnnnnnnnnnnnnnnnnnnnnnnnnnnnnnnnnnnnnnnnnnnnnnnnnnnnnnnnnnnnnnnnnnnnnnnnnnnnnnnnnnnnnnnnnnnnnnnnnnnnnnnnnnnnnnnnnnnnnnnnnnnnnnnnnnnnnnnnnnnnnnnnnnnnnnnnnnnnnnnnnnnnnnnnnnnnnnnnnnnnnnnnnnnnnnnnnnnnnnnnnnnnnnnnnnnnnnnnnnnnnnnnnnnnnnnnnnnnnnnnnnnnnnnnnnnnnnnnnnnnnnnnnnnnnnnnnnnnnnnnnnnnnnnnnnnnnnnnnnnnnnnnnnnnnnnnnnnnnnnnnnnnnnnnnnnnnnnnnnnnnnnnnnnnnnnnnnnnnnnnnnnnnnnnnnnnnnnnnnnnnnnnnnnnnnnnnnnnnnnnnnnnnnnnnnnnnnnnnnnnnnnnnnnnnnnnnnnnnnnnnnnnnnnnnnnnnnnnnnnnnnnnnnnnnnnnnnnnnnnnnnnnnnnnnnnnnnnnnnnnnnnnnnnnnnnnnnnnnnnnnnnnnnnnnnnnnnnnnnnnnnnnnnnnnnnnnnnnnnnnnnnnnnnnnnnnnnnnnnnnnnnnnnnnnnnnnnnnnnnnnnnnnnnnnnnnnnnnnnnnnnnnnnnnnnnnnnnnnnnnnnnnnnnnnnnnnnnnnnnnnnnnnnnnnnnnnnnnnnnnnnnnnnnnnnnnnnnnnnnnnnnnnnnnnnnnnnnnnnnnnnnnnnnnnnnnnnnnnnnnnnnnnnnnnnnnnnnnnnnnnnnnnnnnnnnnnnnnnnnnnnnnnnnnnnnnnnnnnnnnnnnnnnnnnnnnnnnnnnnnnnnnnnnnnnnnnnnnnnnnnnnnnnnnnnnnnnnnnnnnnnnnnnnnnnnnnnnnnnnnnnnnnnnnnnnnnnnnnnnnnnnnnnnnnnnnnnnnnnnnnnnnnnnnnnnnnnnnnnnnnnnnnnnnnnnnnnnnnnnnnnnnnnnnnnnnnnnnnnnnnnnnnnnnnnnnnnnnnnnnnnnnnnnnnnnnnnnnnnnnnnnnnnnnnnnnnnnnnnnnnnnnnnnnnnnnnnnnnnnnnnnnnnnnnnnnnnnnnnnnnnnnnnnnnnnnnnnnnnnnnnnnnnnnnnnnnnnnnnnnnnnnnnnnnnnnnnnnnnnnnnnnnnnnnnnnnnnnnnnnnnnnnnnnnnnnnnnnnnnnnnnnnnnnnnnnnctgggtgcatcaggaagctgctgtctgagtctttaatgtcttgctgggaaagcaacgtcttccttcatccttttctttcttccctctgcgtgtccttgttttgtttaatgcgggagagggtcagagctatagaggttatatatacaccatccgtgtacattatatatatgtagatacagacccctatcatgtcagagatctgcatgtcagtttttcagcgacgaaggtgcctcgtgttctgagttcagcagatacaggaacccagccgccccctcctgcacttgatgctcccacctttgttgtgcctcactcaaaatggtgcttttttcagttgtctgtcttttcttatgtttttatttgtaaggtgctgtatataagttgaatatattatgcacatatcctacccaatgggtagaacaagctgttaatactgtaatataatgtatagatgataccaattttaacagaaatggcatagaatttgtgaatgcctatgtgctttgtcctcttttgtaaggaaatttgcaaatggatgcatacagattaaagtctatgtagtttattttcctattaaatatcaatattataacacgagaaagaagtgtgaacaaacaagcaagtttatgaccagcgtatatatagcaatggaaagttgcatctttgctgtgaaaacactttaaagaaaatactttttaaaaaatcccacagctttttggttgccactagacgcttcttatttgaatcagttttactattgaatcagctggaccagtgttagttatatttgagtcccataatgtttttcaacttgctttgtaatctcctgcatctgtctcctgctgcagcatcaccaacgtgtcagccttagtgaaaagtgcacattttatgttgttaaattgcagaaactgtgtcagaggaataagtcaatcagcctgcaccagaggactctgttcagctccagaggcatctgtgaccatctgtgtccaagtctctctgtgcctttttgttttacaaactgaagctgtggagccaatgaagtaacagtagagattgtagggaaatacctcacgaaaaacaaacccacttacaataccctgttcttagaaaaagcgtccagttatgggttagcactataagagacgtggctgtcagccagccaggtgaggacctctcatccattcccacgcatgtcccatcataatcctgacccgaaaagcaaactcggttttgccatcagttagaaattacattttgaattgtatattgttacatctctcttccagcttagtttttagtgtctgattgagacctctgcatttatcttcaaataccctaattttaaaaagaacgaacgagagaagtgtgtaacaccgtattcattaaaannnnnnttgaatcttgggtgtgggtatcctttcgagtgttgccccgtaagagcagtttgtggaattttgcccgtctgacccatattatcagcttattctgccacaaaagtggagtctaataaattccaaagtttttatttgccccatggtgtatgttcnnnnnnnnnnnnnnnnnnnnnnnnnnncatacccctaacatccaagaaacaaacaaccgattatccttaaactgaaatggagtctacaaggcaactcctaatgctgaatggattaaaagtcagcccttttaggatctgtctgaaagggccgtgacaaggtgacactcgtgttgttgtgnnnnnnnnnnnnnnnncccacgtgttggttccatcatatactgtagggtgcatcccttgggattcagcattaagaactgaggctcgttactgtcagaaacaaagctcctaccccccaggttcaaccttgtgggagaactgttgagcatgagaatgttctagactcagaggtactgaaatttgtgaccatatcattgcttcctttctacaggacgaattgaggcttaaacttgactgttaatgatactggttcatttgaatgtgctcgttggtatgttgctatttttcatttcatagctttcaaaaatcatgctacttgtatacttgtctagtttaaggctattttaaaatatgtacaatactatttacagcatttaattcatttttattataaagcaatctactaaaaaagtacaactgtatttgaacaatgcaatagttggttgtgagctatgataatcaagtcattaaagtttcttttagcaaacatttgtgcttacttttcaacataattcccagttacatacagaaaatgatttccacctgtcacgtatctgcctcttttacctgagcaatggtgatgtagttcttagacctaaggtctgtaattgcaatacttttaaagaaagatgttgctctaagtgctgtttgttagttatgaaatcagatttttctgcttgttcttaatgctgtggtcaaaaccatagcacaaaatcattaaaaataatcagcggca

SEQ ID NO: 30124 - DNA, 493 bp, Macaca Mulatta
  misc_feature (1)...(493): n = A,T,C or G
nagttgtcacgatgtccacagaaggaggatttggtggtactagcagcagtgatgcccagcaaagcctacagtcattctggcctcgggtcatggaagaaatccggaatttaacagtnnnnnnnnnnnnnnnnnnnnnnnnnnnnnnnnnnnnnnnnnnnnnnnnnnnnnnnnnnnnnnnnnnnnnnnnnnnnnnnnnnnnnnnnnnnnnnnnnnnnnnnnnnnnnnnnnnnnnnnnnnnnnnnnnnnnnnnnnnnnnnnnnnnnnnnnnnnnnnnnnnnnnnnnnnnnnnnnnnnnnnnnnnnnnnnnnnnnnnnnnnnnnnnnnnnnnnnnnnnnnnnnnnnnnnnnnnnnnnnnnnnnnnnnnnnnnnnnnnnnnnnnnnnnnnnnnnnnnnncaggaggaggtgcgccagtctgtaactcctgccgagccagtccagtactatttcacgctggctcagcagcccaccgctgtccaagtccagggccagcag

SEQ ID NO: 30125 - DNA, 668 bp, Macaca Mulatta
  misc_feature (1)...(668): n = A,T,C or G
agagtgatggctgttttagtacttcaggtggaannnnnnnnnnnnnnnnnnnnnnnnnnnnnnnnnnnnnnnnnnnnnnnnnnnnnnnnnnnnnnnnnnnnnnnnnnnnnnnnnnnnnnnnnnnnnnnnnnnnnnnnnnnnnnnnnnnnnnnnnnnnnnnnnnnnnnnnnnnnnnnnnnnnnnnnnnnnnnnnnnnnnnnnnnnnnnnnnnnnnnnnnnnnnnnnnnnnnnnnnnnnnnnnnnnngagcaaaaatccagcaacaattggccaaaatacataacaatgtaaagaaactgcagcatcagttaaaagatgtgaagcctacacctgattgttgagaagctcagagaaatgatggaagaaattgaaaatgcaattaacacttttaaagaagagcagaggttgatgtatgnatatgaagagctaattaaagaagagaagacaactaataatgagttgagtgccatatcaagaaaaattgacacatgggctttgggtaattcagaaacgaagaaagctttcagagaatctcaagccaagttctgtagacaagtaaccccaagtactccttccgaagagtactagaatttgaaaaatccttcagccaacagaaggcgacaaggggctgggatgattatgatccccgaactttgtaaaggggagaac

SEQ ID NO: 30126 - DNA, 471 bp, Macaca Mulatta
taggctgctgcagaattttaaggttatagataaagctgtgatattttatgcaaagactggctctaggtatttgaggagcacaatacagagattttaaaaagtgattttgtaaaatctacactatggtctctgtttctccaaagtaagtgtttgtgatttgttcctcatactgcagtgagtaaaaaagacacaagaaaacaacaacgtaaatattaaagtacgtttcaatgttgggtgaattttgtttttagatgccaataaaacttatttgtttgataacagtgttctaggaattgtatttttttaacctataaattcttaaaaccttgaattattactagcatgtgcttatattttgcaaaagctttctatcgtaacaacaatgaagaactctgtggtggaaaaagcatgtactttgatataaaaatcatgcagcctcctcagtatgtgtatgatatctgtgtatgttta

SEQ ID NO: 30127 - DNA, 2464 bp, Macaca Mulatta
  misc_feature (1)...(2464): n = A,T,C or G
caggggtctgcttcgagttgccttacagcgcaagggccaggccctggaggaagatgaagacccagagnnnnnnnnnnnnnnnnnnnnnnnnnnnnnnnnnnnnnnnnnnnnnnnnnnnnnnnnnnnnnnnnnnnnnnnnnnnnnnnnnnnnnnnnnnnnnnnnnnnnnnnnnnnnnnnnnnnnnnnnnnnnnnnnnnnnnnnnnnnnnnnnnnnnnnnnnnnnnnnnnnnnnnnnnnnnnnnnnnngcacctgtggcccctcaaggacctcacgctgacgagcaatcannnnnnnnnnnnnnnnnnnnnnnnnnnnnnnnnnnnnnnnnnnnnnnnnnnnnnnnnnnnnnnnnnnnnnnnnnnnnnnnnnnnnnnnnnnnnnnnnnnnnnnnnnnnnnnnnnnnnnnnnnnnnnnnnnnnnnnnnnnnnnnnnnnnnnnnnnnnnnnnnnnnnnnnnnnnnnnnnnnnnnnnnnnnnnnnnnnnnnnnnnnnnnnnnnnnnnnnnnnnnnnnnnnnnnnnnnnnnnnnnnnnnnnnnnnnnnnnnnnnnnnnnnnnnnnnnnnnnnnnnnnnnnnnnnnnnnnnnnnnnnnnnnngtcctgttatgagcacatccagaaagaagacatgaggctgcaccgcttacctggccactggcactccagggagctctggtagcttggcctttcctggacagactgcagagctgagcagggcattgctggcccatccctcgttacccaaggcaaagggcaggacaggcccttggaagtagctcttggaggagatgagtattttgttttgcacaggaagatgctgctgctgccctgactgggatgagggtgaggggtgatgggtgtggccctggacgtggtggttttcccttggccactagcccatctccaatgacccctaaatctgcagcannnnnnnnnnnngggtgaggagcccctggcttctcttagcttgagcctttatcccaagttgcagagcctctctgggcctcagtgctgccatctgtaaatggtggagtgagtacgctgtaaaggaccttctatccattttgctgaattccagagtcctttcggaagactgacttcagtctgctgggctgtcctgacctctggcaggctctaagcctcgctgggtatgcagtcaacagggtgggcctggaggtccgtgaactgcaggccgtgtacccatgacataaacggcggcaccggagcaagctggggcagggggtgggcaaactctcactgccagcacgccccaagtggcctgtgaatcattcacctgtgacctctgtgggcctgcgggaggacagcaggggcacatnnnnnnnnnnnnnnnnnnnnnnnnnnnnnnnnnnnnnnnnnnnnnnnnnnnnnnnnnnnnnnnnnnnnnnnnnnnnnnnnnnnnnnnnnnnnnnnnnnnnnnnnnnnnnnnnnnnnnnnnnnnnnnnnnnnnnnnnnnnnnnnnnnnnnnnnnnnnnnnnnnnnnnnnnnnnnnnnnnnnnnnnnnnnnnnnnnnnnnnnnnnnnnnnnnnnnnnnnnnnnnnnnnnnnnnnnnnnnnnnnnnnnnnnnnnnnnnnnnnnnnnnnnnnnnnnnnnnnnnnnnnnnnnnnnnnnnnnnnnnnnnnnnnnnnnnnnnnnnnnnnnnnnnnnnnnnnnnnnnnnnnnnnnnnnnnnnnnnnnnnnnnnnnnnnnnnnnnnnnnnnnnnnnnnnnnnnnnnnnnnnnnnnnnnnnnnnnnnnnnnnnnnnnnnnnnnnnnnnnnnnnnnnnnnnnnnnnnnnnnnnnnnnnnnnnnnnnnnnnnnnnnnnnnnnnnnnnnnnnnnnnnnnnnnnnnnnnnnnnnnnnnnnnnnnnnnnnnnnnnnnnnnnnnnnnnnnnnnnnnnnnnnnnnnnnnnnnnnnnnnnnnnnnnnnnnnnnnnnnnnnnnnnnnnnnnnnnnnnnnnnnnnnnnnnnnnnnnnnnnnnnnnnnnnnnnnnnnnnnnnnnnnnnnnnnnnnnnnnnnnnnnnnnnnnnnnnnnnnnnnnnnnnnnnnnnnnnnnnnnnnnnnnnnnnnnnnnnnnnnnnnnnnnnnnnnnnnnnnnnnnnnnnnnnnnnnnnnnnnnnnnnnnnnnnnnnnnnnnnnnnnnnnnnnnnnnnctgacaagtgaggacagcctgaccctgccctcaaatgcagcccgccctgagttcatgggatgctgatggaaccccaccatacttccctgcctcctttgagatttgcgagcccttgctgcagttcagattcaacaaggccctctggccaccctctcactaggcctcacccaacaccggtggaactggagcctctggctgggcacagtggctcactttgggcggctgaggcaggaagattgctggaacctgagagttcaagaccagcctgggcaatatagtgagaccctgtctctacaaaaataaaataattagctgg

SEQ ID NO: 30128 - DNA, 516 bp, Macaca Mulatta
  misc_feature (1)...(516): n = A,T,C or G
gaaagcctaccaccctggctgcttccctgcgtggtgtgtcaccgtggcctcgacggcatccccttcacggtggatgctacgagccagatccactgcattgaggactttcacaggnnnnnnnnnnnnnnnnnnnnnnnnnnnnnnnnnnnnnnnnnnnnnnnnnnnnnnnnnnnnnnnnnnnnnnnnnnnnnnnnnnnnnnnnnnnnnnnnnnnnnnnnnnnnnnnnnnnnnnnnnnnnnnnnnnnnnnnnnnnnnnnnnnnnnnnnnnnnnnnnnnnnnnnnnngctggatgggcacatcttatgcaaggcctgcagcgcctggcgcatccaggagctctcagccaccgtcaccactgactgctgagtcttcctagaagtacctgctgggttctcagttccagttcccatccttcgattgatcaccctccctgacatccgcctgtatgacttcatcaccaaatgctgtctcctctttctccaatcaagaaataataatccctcgagtttacaaaac

SEQ ID NO: 30129 - DNA, 850 bp, Macaca Mulatta
tccctgcagaagagcacagaagtgatgaaggccatgcaacgtcttgtgaagattccagaaattcaggccaccatgagggagttgtccaaagaaatgatgaaggctgggatcatagaggagatgttagaggacacttttgaaagcatggacgatcaggaagaaatggaggaagaagcagaaatggaaattgacagaattctgtttgaaattacagaaggggccttgggcaaagcacccagtaaagtgaccgatgcccttccagaggcagaaccttcaggagcgatggctgcctcagaggatgagaagaaggaagaggctctggaagccatgcagtaccagctggccacactccgcagttaggggctgcctagcccactgggtgtgctcacactccgctcaagaactgccattttatgtatctcttgcactacatctctgttgtgaggactaccattttggagaaggttctgtttgtctcttttcactccctgcccaggttttgggatcacaaagggattgttcttgtaaaggtggcataaataaatgcatcacttttaggagtatagacagaaatatcttgttgtggggaggggaaagaaatccatctgctcatgaagcacttctgaaaatacaggtgattgcttgaatgtccaaaactctactttcgtctataaaacactatataaatgaattttaataaatttttgctttcgcacttggccccactgtagattgccctgtgcagtaaactttcctaggtgttggcttccctcagattacttcatttgttgggcgtggaaagagttgctatggccaggcatatgggatttggaagctcagcagaaatgac

SEQ ID NO: 30130 - DNA, 912 bp, Macaca Mulatta
  misc_feature (1)...(912): n = A,T,C or G
ggggatgaaaatgaagaaaatcaacaaagaccgagcaaaagacgagtgatgccatttgggtttgtttagaaaaaagggtgagctagagagaaagagaactgcccgtcccccttccgccttctttcttctctcacccccaccctagcctccaccatccccgcacaaagcggctctaaacctcaggccacatctcccccaaggcaaaccctgttcaggctggctcgtaggcctgccgctttgatggaggaggtattgtaagctttccattttctatnnnnnnnnnnnnnnnnnnnnnngggggggcattagtactgatagatgtgtgtgctaccttgnnnnnnnnnnnnnnnnnnnntacctgttcctgacttnnnnnnnnnnnnnnnnnnctaccttttttataatgcacaactggttgatggtaggctgttatagtattttaagtctgtggtagttaattttaattttgcgtagtttgtggcgggcagaatcgactctgaccaagaatacttttgaacaactggggttttctcatatggggggtaaaatttaatggttattttggtggaacctccaacaaccatcccggggtggtaacctggggaggtgaaatgaaccccccctcttttgttggatatttgttgggtaaaaaaataagaaaatattcccattttttgaaaacctccgagggttttggttttaataaaagnnnnnnnnnnnnnnnnnnntgtctggccatccagagagttataatgccttacttatattagtgcggaaaaaaaagggtccctcttccgggatatataaactatcgggcatgtgataaagtcccttaatagaaacttattgttaaaactccaatacactgaggtaaaaggtggattttatccccaccacgtggagagaaaaaan

SEQ ID NO: 30131 - DNA, 225 bp, Macaca Mulatta
tcaaggtgcgagtcagtggcctggacaagaaggccaagtacatcctgctgatggacattgtggccgctgatgattgccgctataagttccacaactcgcgctggatggtggcaggcaaggccgaccctgagatgcccaaacgcatgtacatccacccagacagcccagccactggggagcagtggatggccaagcctgtggccttccacaagctgaagctgacca

SEQ ID NO: 30132 - DNA, 1184 bp, Macaca Mulatta
  misc_feature (1)...(1184): n = A,T,C or G
ctggtgccggcgggtggggctggagctgagtcccaaggtgagcgagcgagccggcgggcggaggacccgcggcggggcgcgggctgccctgaccagccctcctccggctcaggtggcggtcagccggcagggcacggtggccggctacggcatggtggcccgggagagcgtgcaggccggagagctgctgttcgtggtaccgcgggccgcgctcctgtcgcagtacacctgctccattggcggcctgctggagcgagnagagcgaggcgcgctgcagagccagtcgggctgggtgccactgctgctggcgctcctccacgagctgcaggccccggcctcacgctggaggccgtactttgcgctctggcccgagctgggccgcttggagcacccgatgttctggnggccagaggagcagcgccggtgcctgctgcagggcacaggcgtacctgaggccgtggagaaggatttggccaacatccgcagcgagtaccactccatcgtgctgcccttcatggaagcccaccccgatctcttcagcctcagggttcgctccctagaactctaccatcagctcgtggcccttgtgatggcctatagnnnnnnnnnnnnnnnnnnnnnnnnnnnnnnnnnnnnnnnnnnnnnnnnnnnnnnnnnnnnnnnnnnnnnnnnnnnnnnnnnnnnnnnnnnnnnnnnnnnnnnnnnnnnnnnnnnnnnnnngaattgtcttcggatggtagccactcagcccattcctaaaggccatgagattttcaacacttatgggcaaatggctaactggcaacaggttcatatgtacggttttgttgaaccatatcctgnnnnnnnnnnnnnnnnnnnnnnnnnnnnnnnnnnnnnnnnnnnnnnnnnnnnnnnnnnnnnnnnnnnnnnnnnnnnnnnnnnnnnnnnnnnnnnnnnnnnnnnnnnnnnnnnnnnnnnnnnnnnnnnnnnnnnnnnnnnnnnnnnnnnnnnnnnnnnnnnnnnnnnnnnnnnnnnnnnnnnnnnnnnnnnnnnnnnnnnnaggtactgtgcatgcctgctgaggagttcagagagcttaaagaccaggatggagggggagataataaaagggaagagggcagcctgacgatcacaagtattaacaagctcaaagcatcgtggagacagctgctacaaaacag

SEQ ID NO: 30133 - DNA, 1449 bp, Macaca Mulatta
  misc_feature (1)...(1449): n = A,T,C or G
gcctgatgaagtcctccgatatcgatcaggatttatttacagacagttactgcaaggtgtgcagtgcacaactgatctccgaatcgcagcgtgtggcccactacgagnnnnnnnnnnnnnnnnnnnnnnnnnnnnnnnnnnnnnnnnnnnnnnnnnnnnnnnnnnnnnnnnnnnnnnnnnnnnnnnnnnnnnnnnnnnnnnnnnnnnnnnnnnnnnnnnnnnnnnnnnnnnnnnnnnnnnnnnnnnnnnnnnnnnnnnnnnnnnnnnnnnnnnnnnnnnnnnnnnnnnnnnnnnnnnnnnnnnnnnnnnnnnnnnnnnnnnnnnnnnnnnnnnnnnnnnnnnnnnnnnnnnnnnnnnnnnnnnnnnnnnnnnnnnnnnnnnnnnnnnnnnnnnnnnnnnnnnnnnnnnnnnnnnnnnnnnnnnnnnnnnnnnnnnnnnnnnnnnnnnnnnnnnnnnnnnnnnnnnnnnnnnnnnnnnnnnnnnnnnnnnnnnnnnnnnnnnnnnnnnnnnnnnnnnnnnnnnnnnnnnnnnnnnnnnnnnnnnnnnnnnnnnnnnnnnnnnnnnnnnnnnnnnnnnnnnnnnnnnnnnnnnnnnnnnnnnnnnnnnnnnnnnnnnnnnnnnnnnnnnnnnnnnnnnnnnnnnnnnnnnnnnnnnnnnnnnnnnnnnnnnnnnnnnnnnncctgaagaataagtagtgaaagcatcaatcaagagataagaacaaaatatcagcatttctctgctgtggagaattgctatcaacaaccagaggaggcttctttcttgaacaataaacatttcttacaaggattcacagattaacatacgactgatcttgatttttggaaatgaatgagnnnnnnnnnnnnnnnnnnnnnnnnnnnnnnnggggtaagttatgatatttggatggatttttaaattctttcctgataacacatttagcacatgttctaaattataatcctatagcaaaccattggagcattattcaaactgaaagtggaaaaatttaaatttccaatttattctagatctcctcagagcataattattctgttaaatcctcaatgagtgtgattaaaccacctctatccagaaatatacgttgttttttcatcgtgttggacacagctgagggtgacatgcacagaaccggagcagatcactattagtggaaaatnnnnnnnnnnnnnnnnnnnnnnnnnnnnttctctgttctccaagcacaggacccaggtttgccatctgaacaatgaagacgaagagagtaaataaaggaagaattctcatctttttttctgatcattcaaacaacagtttctcaaagttaagccatgtcctccttgcaagttgccaaataatagcttaggaaaagaattagtctgtgtgcatgatgatcctcttaggcaaaaatgtcttcacagcccttgaccttggtgaattttt

SEQ ID NO: 30134 - DNA, 909 bp, Macaca Mulatta
  misc_feature (1)...(909): n = A,T,C or G
aggaaccaagtaccaggcagtgctgagtgtggatgactgctttgggatgggccgctcagcctacaatgaaggggactattatcatacggtgttgtggatggagcaggtgctaaagcagcttgatgctggggaggaggccaccacaaccaagtcccaggtgctggactacctcagctatgctgtctttcagttgggtgatctgcaccgtgccctggagctcacccgccgcctgctctcccttnnnnnnnnnnnnnnnnnnnnnnnnnnnnnnnnnnnnnnnnnnnnnnnnnnnnnnnnnnnnnnnnnnnnnnnnnnnnnnnnnnnnnnnnnnnnnnnnnnnnnnnnnnnnnnnnnnnnnnnnnnnnnnnnnnnnnnnnnnnnnnnnnnnnnnnnnnnnnnnnnnnnnnnnnnnnnnnnnnnnnnnnnnnnnnnnnnnnnnnnnnnnnnnnnnnnnnnnnnnnnnnnnnnnnnnnnnnnnnnnnnnnnnnnnnnnnnnnnnnnnnnnnnnnnnnnnnnnnnnnnnnnnnnnnnnnnnnnnnnnnnnnnnnnnnnnnnnnnnnnnnnnnnnnnnnnnnnnnnnnnnnnnnnnnnnnnnnnnnnnnnnnnnnnnnnttgcacgagccactgttcgtgatcccaagacaggagtcctcactgttgccagctatcgggtttccaaaagnagctcctggctagaggaagatgatgaccctgttgtggcccgagtaaatcgtcggatgcagcacatcacagggttaacagtaaagactgcagaattgttacaggnnnnnnnnnnnnnnnnnnnnnnnnnnnnnnnnnnnnnnnnnnnnnnnnnnnaatgatgagcgacatactttcaagcatttagggacggggaatcgtgtggccactttcttaaactacgtgagt

SEQ ID NO: 30135 - DNA, 226 bp, Macaca Mulatta
ttcgtggaggaggcggagcggctgcgtgtgcagcacaagaaggaccacccggattacaagtaccagccgcggcggaggaagtcggtgaagaacgggcaggcggaggcagaggaggccacggagcagacgcacatctcccccaacgccatcttcaaggcgctgcaggctgactcgccgcactcctcctccggcatgagcgaagtgcactcccccggcgagcactcgg

SEQ ID NO: 30136 - DNA, 273 bp, Macaca Mulatta
aatgagacggaatctctgtctgtcacccaggctggagtgcagtggcatgatctcagctcactgcaacctctgcctcccgtgttcaagcaatcgtcctacctcagcctcctgagtagctgggactacaggcctgcaccaccacgcccagctaagttttgtatttttagtagagatggggtttcaccatgttgaccagaatggtcttgaactcctgccctcaagtgatctgcccacttcggcctcccaaagtcctgggattacaggcatgagcca

SEQ ID NO: 30137 - DNA, 785 bp, Macaca Mulatta
ggaatgctgtatttgttcatctcaaacctagatgtatacagctctgagttataaatggttataaagctcctgttactgatattagttatttacatcaaaaaagcttttagaaaatggtacgaggtaaccaattcttgtcatggtgaaatctgattgagtaaccaagcagttttactattctggtgctgcttcataacaaaaatgaaaagctgcatgcatctacatacagcaggcatggattgtttatgtcgtatgatctcctttattaagtaagttcacttatagtatttctataatttgattcattaccgtaatagggccatgtaggaaatgcactgattgcatgttattgtggcaagaatatcctaaatgtcattaaaatcctccaacatgatggatctgcttatggtcttgtttgttgacatgagaaattaacattcttatagttacatctggaaatgagcatttgaaatagataatcctttaagccttgtggcaaaatttttgtggcttttatttaacttttgaaggttattatgcactaaccttttttggtggctaattagggtttaaatacagaaaccagatttcaaattaaactgtcctttggcagtgagtaaatagcatattttggaagtagagttggatacttttttcctacaaagtttggggaaattttttttcctggaagtaattaattttaattcccccattcttacatccagttggaaaagcttattcctaccctaatacctggaaattcccatccctttaaaaaaggggaa

SEQ ID NO: 30138 - DNA, 267 bp, Macaca Mulatta
  misc_feature (1)...(267): n = A,T,C or G
agtgactgagctctgcaacgtggcgtgctccagcgtgatgccaggagggggcaccaacctggagctcgctctgcactgcctgcacgaggctcagggcaacgttcaggnnnnnnnnnnnnnnnnnnnnnnnnnnnnnnnnnnnnnnnnnnnnnnnnnnnnnnnnnnnnnnnnnnnnnnnnggttcagacgtctggacccctatagagaagaggctttttaagaaggcgttctatgcccacaagaaggacttctacttgatacacaaga

SEQ ID NO: 30139 - DNA, 505 bp, Macaca Mulatta
  misc_feature (1)...(505): n = A,T,C or G
gacccagccggtgcccaaccctgtggcatactacctacaccactcaccctggtggttccaccgcttcgagacactcagcaaccacttcatcgagctcctggtgcccttcttcctcttcctcggccggcgggcctgcatcatccacggggcgctgcagatcctgttccaggnnncctcatcgtcagcgggaacctcagcttcctcaactggctgaccatggtgcccagcctggcctgcttcgatgacgccaccctggggttcttgttcccctccgggccaggcagcctgaaagaccgagtcctgcagatgcagagggaaatccgaggcgcccggcccaagcccagattcggnggctctgtggtgcggcgtgcagccaacgtctcgctgggcatcctgctggcctggctcagcgtgcccgtggtcctcaacttgctgagctccagacaggtcatgaacacccatttcaactctcttcacattgtcaacacttacggggccttcggaa

SEQ ID NO: 30140 - DNA, 1661 bp, Macaca Mulatta
  misc_feature (1)...(1661): n = A,T,C or G
gcgattcacgtcccggaagcggccgtggcggtggcggcgtaggcggaggagattttcggacttgcgacttccgaacggccctggcaggaggagcggcgttcggccggggcgggcctgaggaaacgctctggggcccagtggctctccccctgctcctgcccgaacctgccgtctctcttacggagccagtggccgggtangatgcagacttcagaacgtgaggggagtgggccggagctgagccccagcgtgatgcccgaggctcccctggagtctccaccttttcctaccaagtccccagcgtttgaccttttcaacttggttctctcctacaagaggctggagatctacctggaacccttgaaggatgcaggnnnnnnnnnnnnnnnnnnnnnnnnnnnnnnnnnnnnnnnnnnnnnnnnnnnnnnnnnnnnnnnnnnnnnnnnnnnnnnnnnnnnnnnnnnnnnnnnnnnnnnnnnnnnnnnnnnnnnnnnnnnnnnnnnnnnnnnnnnnnnnnnnnnnnnnnnnnnnnnnnnnnnnnnnnnnnnnnnnnnnnnnnnnnnnnnnnnnnnnnnnnnnnnnnnnnnnnnnnnnnnnnnnnnnnnnnnnnnnnnnnnnnnnnnnnnnnnnnnnnnnnnnnnnnnnnnnnnnnnnnnnnnnnnnnnnnnnnnnnnnnnnnnnnnnnnnnnnnnnnnnnnnnnnnnnnnnnnnnnnnnnnnnnnnnnnnnttctatggggctcttctgggcacggtctgcatgctgtatttgctgccactctgctgggtcctcacccttttaaacagcaccctctttctggggaatgtggagttcttccgagnagttgtgtctgagtacagggcatctctgcagcagaggatgaacccaaagcaggaagagcatgcctttgagagccctccaccaccagatgttggggggaagtgtggtctgatggacagcacgcctgccctcacacccacggagnagagtctctcttcccaggacctcacaccgggcagcgtggaggaggctgaggaggctgagccagatgaggagtttaaagatgcgattgaggnaggaggatgatgagggtgtcccgtgcccagcagaggacgagctggccctgcaggacaacgggttcctgagtaagaatgaggtgctgcgcagcaaggtgtctcggctcacggagcggctccgcaagcgctaccccaccaacaacttcggtnggtgtgacaggagcaggcagttcttaagggctcagagcagccaggttccagcagtccccagtagcactacacacaagaagtattactctggtccagcaaataattttctatttctacaacttctaagttaaggtacttagnngggcagtcctccactggcccagcgctccagcttcctttccctgcctcttgccccatggagtgggaggccaggtgagtggagcagaggtcctgaagcccttgacccctgggggcctgggaagtgtaggatctttctggactgggtcctggatcccggggctattccctggaggacagtcttagttatgggataaggtcccttgggggtctccatttcctttccaacaatttcatgttcactactggactcttacgggctcagtatctctccgttagccatgagctggctcaggca

SEQ ID NO: 30141 - DNA, 686 bp, Macaca Mulatta
atcattacaaaagtcaaagagtgtgtacaatttgccatcacaccatggaagtagattaggctggtaataatgaaatccattgtctgcccgggagaatctcatagccttagttcctgcctgtttccactgttgaacatattcttgtgttttgggagggactagagaaaggaaatgcagacatttttgtaagagttctattagcccaattcatttccttatagtccatctctgaaaatgtattttctggggaagggaggaagtgtggagggaggtggactgagagaggtgtcctaatcagagtacaaaggtatagatgctcactttggtccttcatcaactgttgctgagtccttccctatatttttgtgcaattttttgacaaaatggctacatgcattttaggtatcctaaggctctttctctctgccccattgatactggaaaggaagtgtaacactgtttatgttttgtcacagaaccagtctagagtggtgatatgaggattggaatgcttctcattcagcagatatttgtggtgtaaagaagataaaaatatttgaggataaaaatgggggaagagttatttttgctaagcttcagcatgttcctttcactgcccttctttgtggctagtatagggacagggacaaataagaactaagtgactaattctagagagcatcctg

SEQ ID NO: 30142 - DNA, 797 bp, Macaca Mulatta
  misc_feature (1)...(797): n = A,T,C or G
nccctcccacagcttctgggcccctcctgctcctgggaggctgagagtctgcactgcagctgctcctttcgagcctggccggctccctccctgtgctggtggcttggggagaagccactggaggggaacagcagccagggctcattcaaggtcaactccagctcagccgggccctgggccaacagctccctgatcctccacggtgggctcacctctgtcctcaaagtcagctgcaagggctggaacacctatgggtcccagagcggctctgtcgtgctgctgcaagnnnnnnnnnnnnnnnnnnnnnnnnnnnnnnnnnnnnnnnnnnnnnnnnnnnnnnnnnnnnnnnnnnnnnnnnnnnnnnnnnnnnnnnnnnnnnnnnnnnagtgaaagtccgcaggaagcaagcagctgggagaccagaaaaaatggatgatgaagaccccattatgggtacnnnnnnnnnnnnnnnnnnnnnnnnnnnnnnnnnnnnnnnnnnnnnnnnnnnnnnnnnnnnnnnnnnnnnnnnnnnnnnnnnnnnnnnnnnnnnnnnnnnnnnnnnnnnnnnnnnnnnnnnnnnnnnnnnnnnnnnnnnnnnnnnnnnnnnnnnnnnnnnnnnnnnnnnnnnnnnnnnnnnnnnnnnnnnnnnnnnnnnnnnnnnnnnnnnnnnnnnnnnnnnnnnnnnnnnnnnnnnnnnnnnnnnnnnnnnnnnnnnnnnnnnnnnnnnnnnnnnnnnnnnnnnnnagagcccttgtgacactgttaacattaactgatgtgtaagtgctccaagcaga

SEQ ID NO: 30143 - DNA, 224 bp, Macaca Mulatta
agctcgggacgggattatgtgtactgggtagacccgtggagaggggcggtgagatctgggtggcagagagaaacagaggcagagagggcatggagaggggtcggcatcagagaaggggccggcagtgaccatcaccccctttcttcttccctcagctagagtaacagagtcaggcagagcctgaacacttgggtggaacatgggcccttctctggagaccctgg

SEQ ID NO: 30144 - DNA, 1450 bp, Macaca Mulatta
  misc_feature (1)...(1450): n = A,T,C or G
ggggggaggttctcttacatcgaccgcctaagagtcgcgctgtaagaagcaacaaccttctcctccttgtctccgccatctgctctgcagtcgcgaagcagcaaccatgcgtgagtgcatctccatnnnnnnnnnnnnnnnnnnngtccagattggcaatgcctgctgggagctctactgcctggaacacggcatccagcccgatggtcagatgccaagtgacaagaccattgggggaggagatgattccttcaacaccttcttcagtgagacgggcgctggcaagcatgtgccccgggccgtgtttgtagacttggaacccacggtcattgatgaagttcgcactggcacctaccgccagctcttccaccctgagcagctcatcacaggcaaggaagatgctgccaataactatgcccgagggcactacaccattggcaaggagatcattgaccttgtgttggaccgaattcgtaagctggctgaccagtgcaccggtcttcagggcttcttggttttccacagctttggtgggggaactggttctgggttcacctccctgctcatggaacgtctctcagttgattatggcaagaagtccaagctggagttctccatttacccagcgccccaggtttccacagctgtagttgagccctacaactccatcctcaccacccacaccaccctggagcactctgattgtgccttcatggtagacaatgaggccatctatgacatctgtcgtagaaacctcgatattgagcgcccaacctacactaaccttaaccgccttattagccagattgtgtcctccatcactgcttccctgagatttgatggagccctgaatgttgacctgacagaattccagaccaacctggtgccctacccccgcatccacttccctcttgccacatacgcccctgtcatctctgctgagaaagcctaacatgaacagctttctgtatcagagatcaccaatgcttgctttgagccatcccaaacataatggtagaaatgtgaaccctcgccctgggtaaatacaatggcttgcctgcctgtttgtaccctgggtgattgtggattccccaaagatgtcaatggctggccattgccccccaatcaaaaccaaagcgcaaccatccaatttttgtggaattgggtgcccccactgggcttacaagggtgggggatcaaacttaaccaagcctacccacagataagagccctgggtgggaaaacctgggaccaaaggttccaaagaaacctggtggtgacaggcttgaaccaaaaacccacaagtcactttggccgaaagccctgggggtttccccctggagaccatnaagattatggacttttgattgtaatggcacaagncagttggccctccggtctaacaaggagactgaggagtntgcacggtgatatgaagacaaagaacaag

SEQ ID NO: 30145 - DNA, 795 bp, Macaca Mulatta
  misc_feature (1)...(795): n = A,T,C or G
gggtacgaattggagcaatgttggcctatacacctctggatgagaagagccttgctttattactcaattatcttcatgatttcctaaagtacctggcaaagaattctgcaactttgtttagtgccagcgattacgaagtggctcctcctgagtaccatcggaaagctgtgtgagaggcactctcactcacttatgtttggatctccgtaaacacatttttgttcttagtctatctcttgtacaaacgatgtgctttgaagatgttagtgtataacaattgatgtttgttttctgtttgatttttaaacagagaaaataaaaggggtaatagctnnnnnnnnnnnnnnnnnnnnnnnnnnnttcaaatttgctgccagtgttttcaatgatggacaacaggagggatatgctgtagagtgttttattgcctagttgacaaagctgcttttgaatgctggtggttctattcctttgacactacgcacttttataatacgtgttaatgctatatgacaaaatgctctgattcctagtgccaaaggttcaattcagtgtatataactgaacacactcatccatttgtgcnnnnnnnnnnnnnnnnnnnnnnnnnnnnngtgcttaaagtaaagaggccatcctttgcaagtcatccatgttggtacttaggcattttatctttgctcaaattgttgaagaatggtggcttgttttcangggtttttgggaatttgtggccaaatgccccgtttttaaccttgatagaacccccatgccattggtggtaacctaggtttt

SEQ ID NO: 30146 - DNA, 139 bp, Macaca Mulatta
tctacctgttagatggagaacttgcatcatgaatttctcgaaatgctcctggaacttatttatatgcctcaaaatcctgtaaactcatttatagtaacccacagttttaattttataaataaatgtatttattaaatct

SEQ ID NO: 30147 - DNA, 3438 bp, Macaca Mulatta
  misc_feature (1)...(3438): n = A,T,C or G
gcggtggtgtctgtggatgggcggcccgtgagactccaactctgtgacactgccggacagnnnnnnnnnnnnnnnnnnnnnnnnnnnnnnnnnnnnnnnnnnnnnnnnnnnnnnnnnnnnnnnnnnnnnnnnnnnnnnnnnnnnnnnnnnnnnnnnnnnnnnnnnnnnnnnnnnnnnnnnnnnnnnnnnnnnnnnnnnnnnnnnnnnnnnnnnnnnnnnnnnnnnnnnnnnnnnnnnnnnnnnnnnnnnnnnnnnnnnnnnnnnnnnnnnnnnnnnnnnnnnnnnnnnnnnnnnnnnnnnnnnnnnnnnnnnnnnnnnnnnnnnnnnnnnnnnnnnnnnnnnnnnnnnnnnnnnnnnnnnnnnnnnnnnnnnnnnnnnnnnnnnnnnnnnnnnnnnnnnnnnnnnnnnnnnnnnnnnnnnnnnnnnnnnnnnnnnnnnnnnnnnnnnnnnnnnnnnnnnnnnnnnnnnnnnnnnnnnnnnnnnnnnnnnnnnnnnnnnnnnnnnnnnnnnnnnnnnnnnnnnnnnnnnnnnnnnnnnnnnnnnnnnnnnnnnnnnnnnnnnnnnnnnnnnnnnnnnnnnnnnnnnnnnnnnnnnnnnnnnnnnnnnnnnnnnnnnnnnnnnnnnnnnnnnnnnnnnnnnnnnnnnnnnnnnnnnnnnnnnnnnnnnnnnnnnnnnnnnnnnnnnnnnnnnnnnnnnnnnnnnnnnnnnnnnnnnnnnnnnnnnnnnnnnnnnnnnnnnnnnnnnnnnnnnnnnnnnnnnnnnnnnnnnnnnnnnnnnnnnnnnnnnnnnnnnnnnnnnnnnnnnnnnnnnnnnnnnnnnnnnnnnnnnnnnnnnnnnnnnnnnnnnnnnnnnnnnnnnnnnnnnnnnnnnnnnnnnnnnnnnnnnnnnnnnnnnnnnnnnnnnnnnnnnnnnnnnnnnnnnnnnnnnnnnnnnnnnnnnnnnnnnnnnnnnnnnnnnnnnnnnnnnnnnnnnnnnnnnnnnnnnnnnnnnnnnnnnnnnnnnnnnnnnnnnnnnnnnnnnnnnnnnnnnnnnnnnnnnnnnnnnnnnnnnnnnnnnnnnnnnnnnnnnnnnnnnnnnnnnnnnnnnnnnnnnnnnnnnnnnnnnnnnnnnnnnnnnnnnnnnnnnnnnnnnnnnnnnnnnnnnnnnnnnnnnnnnnnnnnnnnnnnnnnnnnnnnnnnnnnnnnnnnnnnnnnnnnnnnnnnnnnnnnnnnnnnnnnnnnnnnnnnnnnnnnnnnnnnnnnnnnnnnnnnnnnnnnnnnnnnnnnnnnnnnnnnnnnnnnnnnnnnnnnnnnnnnnnnnnnnnnnnnnnnnnnnnnnnnnnnnnnnnnnnnnnnnnnnnnnnnnnnnnnnnnnnnnnnnnnnnnnnnnnnnnnnnnnnnnnnnnnnnnnnnnnnnnnnnnnnnnnnnnnnnnnnnnnnnnnnnnnnnnnnnnnnnnnnnnnnnnnnnnnnnnnnnnnnnnnnnnnnnnnnnnnnnnnnnnnnnnnnnnnnnnnnnnnnnnnnnnnnnnnnnnnnnnnnnnnnnnnnnnnnnnnnnnnnnnnnnnnnnnnnnnnnnnnnnnnnnnnnnnnnnnnnnnnnnnnnnnnnnnnnnnnnnnnnnnnnnnnnnnnnnnnnnnnnnnnnnnnnnnnnnnnnnnnnnnnnnnnnnnnnnnnnnnnnnnnnnnnnnnnnnnnnnnnnnnnnnnnnnnnnnnnnnnnnnnnnnnnnnnnnnnnnnnnnnnnnnnnnnnnnnnnnnnnnnnnnnnnnnnnnnnnnnnnnnnnnnnnnnnnnnnnnnnnnnnnnnnnnnnnnnnnnnnnnnnnnnnnnnnnnnnnnnnnnnnnnnnnnnnnnnnnnnnnnnnnnnnnnnnnnnnnnnnnnnnnnnnnnnnnnnnnnnnnnnnnnnnnnnnnnnnnnnnnnnnnnnnnnnnnnnnnnnnnnnnnnnnnnnnnnnnnnnnnnnnnnnnnnnnnnnnnnnnnnnnnnnnnnnnnnnnnnnnnnnnnnnnnnnnnnnnnnnnnnnnnnnnnnnnnnnnnnnnnnnnnnnnnnnnnnnnnnnnnnnnnnnnnnnnnnnnnnnnnnnnnnnnnnnnnnnnnnnnnnnnnnnnnnnnnnnnnnnnnnnnnnnnnnnnnnnnnnnnnnnnnnnnnnnnnnnnnnnnnnnnnnnnnnnnnnnnnnnnnnnnnnnnnnnnnnnnnnnnnnnnnnnnnnnnnnnnnnnnnnnnnnnnnnnnnnnnnnnnnnnnnnnnnnnnnnnnnnnnnnnnnnnnnnnnnnnnnnnnnnnnnnnnnnnnnnnnnnnnnnnnnnnnnnnnnnnnnnnnnnnnnnnnnnnnnnnnnnnnnnnnnnnnnnnnnnnnnnnnnnnnnnnnnnnnnnnnnnnnnnnnnnnnnnnnnnnnnnnnnnnnnnnnnnnnnnnnnnnnnnnnnnnnnnnnnnnnnnnnnnnnnnnnnnnnnnnnnnnnnnnnnnnnnnnnnnnnnnnnnnnnnnnnnnnnnnnnnnnnnnnnnnnnnnnnnnnnnnnnnnnnnnnnnnnnnnnnnnnnnnnnnnnnnnnnnnnnnnnnnnnnnnnnnnnnnnnnnnnnnnnnnnnnnnnnnnnnnnnnnnnnnnnnnnnnnnnnnnnnnnnnnnnnnnnnnnnnnnnnnnnnnnnnnnnnnnnnnnnnnnnnnnnnnnnnnnnnnnnnnnnnnnnnnnnnnnnnnnnnnnnnnnnnnnnngacagtatatggggctgcagttggtctccctgtaggggccttccgtacctcctgcctttaggccacaggtgtaaagtgcttagtgaagcacacctgtgtggcccagttctgaaagctttatgcaaacagttgaattttaactggggttgataacaccttggactgttagtgttaaaaatctagtgggttgacctttacatgcaacattttttaaaatatattgctgcattttatagaatagtaaaggtacgattatacttgagattttcctccatttttatttctttgtgaacatagtttggggccgaaaatgtttttaaagtatgtgcttgagttaaatataaagttggtttgcttcaaagctaaaaaattgttaaacttgcagcttggtattgcagagaagattttataaaaattttgcttcagagaatgccactttggctgaactacaagtgtaggccactgttataatttaaaaatacagcatacttcaaaactgtttgttttctcttgttaccatgtatgtataaatggaccttttataaccttgttctctgcttgacagactcaagagaaactacccaggtattacacaagccaaaatgggagcaaggctttctctccagactatcgtaacctggtgccttaccaagttgtgcttttctgttttcaagtgtagatgatgttgagcagaatgttgtacttgaaaatgctataaatgagatggtacgaaataaattctgacctatg

SEQ ID NO: 30148 - DNA, 1250 bp, Macaca Mulatta
  misc_feature (1)...(1250): n = A,T,C or G
caggctggccaaggtgatccagaagcaccagcgactgctgtggaccctggaatccctggtgactgggcgggctgttcgagaggttcgagacggggacgtccagctggcccagcagcttctccactaccatgcaatccaggcatccacccaggaggaggcactggcaggctgggagcccatggngagtaattggcctcatcctgccacccacattctccttccttgagatgatgtggaggatttgccctgccctggctgtgggnnnnnnnnnnnnnnnnnnnnnnnnnnnnnnnnnnnnnnnnnnnnnnnnnnnnnnnnnnnnnnnnnnnnnnnnnnnnnnnnnnnnnnnnnnnnnnnnnnnnnnnnnnnnnnnnnnnnnnnnnnnnnnnnnnnnnnnnnnnnnnnnnnnnnnnnnnnnnnnnnnnnnnnnnnnnnnnnnnnaggaaggccgtgcccttcgacggaccctggcgggtgagtgtgcggagctgggcctagcgctggggacggagtcgctgctgctgctgacagacgcagcggacgtcgactcggctgtggagggtgctgtggacgccgcctggtccgaccgcggcccgnnnnnnnnnnnnnnnnnnnnnnnnnnnnnnnnnnnnnnnnnnnnnnnnnnnnnnnnnnnnnnnnnnnnnnnnnnnnnnnnnnnnnnnnnnnnnnnnnnnnnnnnnnnnnnnnnnnnnnnnnnnnnnnnnnnnnnnnnnnnnnnnnnnnnnnnnnnnnnnnnnnnnnnnnnnnnnnnnnnnnnnnnnnnnnnnnnnnnnnnnnnnnnnnnnnnnnnnnnnnnnnnnnnnnnnnnnnnnnnnnnnnnnnnnnnnnnnnnnnnnnnnnnnnnnnnnnnnnnnnnnnnnnnnnnnnnnnnnnnnnnnnnnnnnnnnnnnnnnnnnnnnnnnnnnnnnnnnnnnnnnnnnnnnnnnnnnnnnnnnnnnnnnnnnnnnnnnnnnnnnnnnnnnnnnnnnnnnnnnnnnnnnnnnnnnnnnnnnnnnnnnnnnnnnnnnnnnnnnnnnnnnnnnnnnnnnnnnnnnnnnnnnnnnnnnnnnnnnnnnnnnnnnnnnnnnnnnnnnnnnnnnnnnnnnnnnnnnnnnnnnnngggctgtatgagtatctgcggtcctcagggacccctgcccagctgtcctgcctctccaagaacctgaactatgacacctttggccttgctgttccctcaaccctgccggctgggactgaaatagggccca

SEQ ID NO: 30149 - DNA, 622 bp, Macaca Mulatta
gctccccaatgctggaggccagcgatgacgaggccctgttggtctgttgaccgccgggttcgctggtgaccgccacagccccgctttgtaaccagggaatacacagtcatttctaccctgcctctgcgtcctttcttatggagaggccctccggggaccccagcggaggggctgggccctcagccagctggctgcactggtgggcatggtgggcgggagctctgggactgaacggtggggagaagggcggagcggtgagcccgtctgtaggatcccagcgtacacaagcaccctggggtctcacttctctccccccacttcattctgggaacccatttccaaagaagcagaggaccagagcttttttgcttcatctgccctgcagtggcaccagccgcccacagagctgggagctgtcatgaggatggggctgggccacggggacgctgggtctcatccgtggtgactgttctgcccatgcctcaccctcttcctgttcagcaaggcccctggaggacctgggttgggcagctcctgccaagccctcaggcccctgaccaggcaggtgcccttttgccttccttgagggtccaatctcctgggtactgtggcggggctgggg

SEQ ID NO: 30150 - DNA, 855 bp, Macaca Mulatta
tggccaggatgtgtagggagtcttgggcacgccgctcatcctacactccctctccagtgccctcccgaagcctcctattctacgatgacggggcaggctcatgggaagatggccgcagcgccctgctgcccatggagcccccagatggctgggaaatcaaccccggggggccggcagagcagcggccccaggaccacctgcagcatgaccacctggacaacagccacgagaccaccaagtacctgagtgaggcctggcctaaagacggtggaaacggcaccagccccgacttctcccactccaaggagtggttccacgacaggtgggtggggagcccctttccctcctgaggcagggtccacctgcctcctgcccacccttggcccccacattggccacaccctcccaaggccccatccctgctgggtctagatccagcttgcagagggtaaaaggcttcctgctggacagagtcatccctggtctctcttctctctccagggatctgggtcctaacaccaccatcaaactctcttaggccatgccaagacccaggacacaggacgcacccccggcacgcagaagaggagttcttgctcactaaccgtatccgcctcgtgcccctgcctcctggagcttcccgttccaggagaaaaggctctacttcccagcctttccttgcccctgacatctggactcttcccttgggccaaccactctgttctcattctccttcccaccgccatccatccgtccttcttagacaaaccactcactggctaccccacctcctctctcatatgcccaacacaaccactgcctccctgtcccacacctgcacccaacagacacatc

SEQ ID NO: 30151 - DNA, 782 bp, Macaca Mulatta
ggggctcacggtggagctctccgagtctgtgcagaaaggcttccagatgctggcggatcccggctccttcgactccaacgccttcacgcttctcctccgggcggctttccagagcctgctggacgcccaggcggacgaggccgtgttagatcatccagacttgaaacatatcgacccagtggttttaaaacattgtcatgcagcagctgcaacttacttactagaggcaggaaagcaccgagctgacaagtcaactctaagcacttatctagaagactgtaaatttgacagagagcgaatagaactgttttgcacggaatatcagaataataagaattccctagaaatcctactgggaagcataggtagatctctccctcatataacggatgtttcttggcgcttggaatatcagataaagaccaatcaacttcataagatgcacagacctgcatatttggtgaccttaagtatacagaacactgattccccatcctacccagagattagttttagttgcagcatggaacaattacaggacttggtggggaaacttaaagatgcttcgaaaagcctggaaagagcaactcagttgtaacttggggaagttaacgatccgcccgagtgcagaggaaaaccagaaacgccttgcctttgagctgaaccaccgttttgtgcgagcctggatgtttctttttcagtagaaaaagaattttcctttttgaattttataccatttcatccaatttttgacacttttaaaaaaaacacgtgtggtgaag

SEQ ID NO: 30152 - DNA, 900 bp, Macaca Mulatta
aaagagaccaaagctttgaagacttaaatccaaccctattgcggacacattccttgtatactgagggcaatagagctacagagcattaacaaatacccatcttcccagatttttttcccatattttatgaactatatttttcctgagatgtttatcttttaagattctttaaaattagcccctattccataaattctacactacaaaattatgtcctcctgcctacttttaattgaatttaagtctgcgcctgttgtgatgcttctgtgataatcattttgctgaatggcgtaagatctctactaagatccatttggcttaaagctaatgaacactagtgaacacatccttaaatgactttcgtttatttcctttaagtagcacttccaaaataacaaattcaaggcaattcaatattcagcattagctagacttatgagccattactgaaatttctgctgaatttatcaagttttttcatggaatctcccaaatgcctatactcatgtgtaactgttaacatggcatttggtactaaattctcccagataagctttattatattatttaaggtattcttattcccaagaattactatttcaaagaaaaccgagttggtcactttaagcaactatttgaataaatgaaaaactgaattctcaggtgctttgagacttctctgttcaatttaaaatgctttgggggagaagtaaaatagtggcctttgaaaaaatatgctgacacaagacatattgaattttgtagttaaaaaaaattaacaaataatgaacgtggcattttattaaatgcatcaaaaagggtcaggttatttttaatagaaaatccataattctattaaatggttgagaaattagtcacatcaatagacttctttcattt

SEQ ID NO: 30153 - DNA, 1143 bp, Macaca Mulatta
  misc_feature (1)...(1143): n = A,T,C or G
aggaataaagttcaacatcaggccaaggcagccccaccacnnntcccaccaggcggctcccaggatggttacttgaaggcacccacagagaggatcactcgggacttgtccagtggggccccgcggggccgcaacctgccagcgcctgaccagcctcaatccccgctgcagagggggacccgtttgcggctccgccagcgccnnnnnnnnnnnnnnnnnnnnnnnnnnnnnnnnnnnnnnnnnnnnnnnnnnnnnnnnnnnnnnnnnnnnnnnnnnnnnnnnnnnnnnnnnnnnnnnnnnnnnnnnnnnnnnnnnnnnnnnnnnnnnnnnnnnnnnnnnnnnnnnnnnnnnnnnnnnnnnnnnnnnnnnnnnnnnnnnnnnnnnnnnnnnnnnnnnnnnnnnnnnnnnnnnnnnnnnnnnnnnnnnnnnnnnnnnnnnnnnnnnnnnnnnnnnnnnnnnnnnnnnnnnnnnnnnnnnnnnnnnnnnnnnnnnnnnnnnnnnnnnnnnnnnnnnnnnnnnnnnnnnnnnnnnnnnnnnnnnnnnnnnnnnnnnnnnnnnnnnnnnnnnnnnnnnnnnnnnnnnnnnnnnnnnnnnnnnnnnnnnnnnnnnnnnnnnnnnnnnnnnnnnnnnnnnnnnnnnnnnnnnnnnnnnnnnnnnnnnnnnnnnnnnnnnnnnnnnnnnnnnnnnnnnnnnnnnnnnnnnnnnnnnnnnnnnnnnnnnnnnnnnnnnnnnnnnnnnnnnnnnnnnnnnnnnnnnnnnnnnnnnnnnnnnnnnnnnnnnnnnnnnnnnnnnnnnnnnnnnnnnnnnnnnnnnnnnnnnnnnnnnnnnnnnnnnnnnnnnnnnnnnnnnnnnnnnnnnnnnnnnnnnnnnnnnnnnnnnnnnnnnnnnnnnnnnnnnnnnnnnnnnnnagttcgagagcatggaggacgatgccaacttctttctgaccctcatccgcgcgccgcggaacctgaccttcccgcggatcaaggaccggcactcgcaggaggcgcggaccacagccaggatcgcccaccagtacttcgtccagctctcagccctgcgacggcagcgcacctacgacttctactacatggattacctgatgttcaactactcccagccctttgcagatctgtactg

SEQ ID NO: 30154 - DNA, 2929 bp, Macaca Mulatta
  misc_feature (1)...(2929): n = A,T,C or G
tcaggcttctccgaactttgcttccccagcagaataatcctgtggaagactgagcagttcttgtgagtctaaaaccatggcccatcattggtgacgttcagggatgtggctatagacttctctcagaaggaatgggagtgcctggacactactcagaggaaattgtacagagatgtgatgttggagaattatagtaacttggtctcactgggnnnnnnnnnnnnnnnnnnnnnnnnnnnnnnnnnnnnnnnnnnnnnnnnnnnnnnnnnnnnnnnnnnnnnnnnnnnnnnnnnnnnnnnnnnnnnnngtttgttatccaggcataagaccaagaaattaccttcagaaaaggacattcatgaaatcagtttatccaaagggagtataatagaaaaaagtaaaactcttcgtctgaaaggatccattttgagaaatgagtggcagagcaaaagtgagtttgagggtcagcagggacttgaagaaagatctatcagtcaaaagaaaatcgtctctaaaaaaatgtcaactggtagaaaacatccctcttttactctgaatcagagaattcataatagtgagaaaagttgtgactcaaacttggttcaacatgggaaaacagattctgatgtgaaacgtgattgtaaagaacgtgggagtaccttgaataatgtctgccagcttactctccatcagaaaattcatactggtnnnnnnnnnnnnnnnnnnnnnnnnnnnnnnnnnnnnnnnnnnnnnnnnnnnnnnnnnnnnnnnnnnnnnnnnnnnnnnnnnnnnnnnnnnnnnnnnnnnnnnnnnnnnnnnnnnnnnnnnnnnnnnnnnnnnnnnnnnnnnnnnnnnnnnnnnnnnnnnnnnnnnnnnnnnnnnnnnnnnnnnnnnnnnnnnnnnnnnnnnnnnnnnnnnnnnnnnnnnnnnnnnnnnnnnnnnnnnnnnnnnnnnnnnnnnnnnnnnnnnnnnnnnnnnnnnnnnnnnnnnnnnnnnnnnnnnnnnnnnnnnnnnnnnnnnnnnnnnnnnnnnnnnnnnnnnnnnnnnnnnnnnnnnnnnnnnnnnnnnnnnnnnnnnnnnnnnnnnnnnnnnnnnnnnnnnnnnnnnnnnnnnnnnnnnnnnnnnnnnnnnnnnnnnnnnnnnnnnnnnnnnnnnnnnnnnnnnnnnnnnnnnnnnnnnnnnnnnnnnnnnnnnnnnnnnnnnnnnnnnnnnnnnnnnnnnnnnnnnnnnnnnnnnnnnnnnnnnnnnnnnnnnnnnnnnnnnnnnnnnnnnnnnnnnnnnnnnnnnnnnnnnnnnnnnnnnnnnnnnnnnnnnnnnnnnnnnnnnnnnnnnnnnnnnnnnnnnnnnnnnnnnnnnnnnnnnnnnnnnnnnnnnnnnnnnnnnnnnnnnnnnnnnnnnnnnnnnnnnnnnnnnnnnnnnnnnnnnnnnnnnnnnnnnnnnnnnnnnnnnnnnnnnnnnnnnnnnnnnnnnnnnnnnnnnnnnnnnnnnnnnnnnnnnnnnnnnnnnnnnnnnnnnnnnnnnnnnnnnnnnnnnnnnnnnnnnnnnnnnnnnnnnnnnnnnnnnnnnnnnnnnnnnnnnnnnnnnnnnnnnnnnnnnnnnnnnnnnnnnnnnnnnnnnnnnnnnnnnnnnnnnnnnnnnnnnnnnnnnnnnnnnnnnnnnnnnnnnnnnnnnnnnnnnnnnnnnnnnnnnnnnnnnnnnnnnnnnnnnnnnnnnnnnnnnnnnnnnnnnnnnnnnnnnnnnnnnnnnnnnnnnnnnnnnnnnnnnnnnnnnnnnnnnnnnnnnnnnnnnnnnnnnnnnnnnnnnnnnnnnnnnnnnnnnnnnnnnnnnnnnnnnnnnnnnnnnnnnnnnnnnnnnnnnnnnnnnttagtcgtagtgtagaccttagaatacatcaaagaattcatactggtgagaaaccctatgagtgtaaacaatgtgggaaggcctttagacttaattcacaccttactgaacatcagagaattcacactggtgagaaaccctatgagtgtaaggtatgtagaaaggcctttagacaatattcacatctttatcaacatcagaaaactcataatgtaatttaatataagaaagggtttccatgtcatgctctatttatagaatatcaaaatatttatggccagaaagaagttctgtcaatgtgttgatctttttttagacatattaacttaataaatgtatgagtcttaaatatctcttagttctcattaaatttaggaaaattcacactagaaaataaagctgttaatgtaacaattgtggaaaagtgttctagcaacagcatatacttatcatcattgcttttccactactctactatctgtgtgatattagacaaaatatttgcttcttggtacctcagctgtaaaatgaaacacacctaaaagtgtggttaattgtttccaacatgtataatacagcaacaactatctggcccatactgctttggattaacattggatattactgtttttattatcatcaacattattgttagtggatttcttaacaggaagacacagtggagatgataaatttggaaaagtcactcatcacgtatatttcatgaaggacttctttgataaaatctgtgttatgagctgaatgtttgtgttcccgtaacaattcctatgttgaaacatgaatcccaaggtgatggtatttgaaggtagggcctttaggaggaaatcaggtcatgagggtggagccttcatgaatgggatcgctgcctttattagaggaagccaaagagccagctagctctttcaaccgcatgaggatacagcaggaagtcagcagtctacagtgccaaagagggagggcctttcccagaacccaagcatgctggcaccctgaccttggacttgcagcctccaaaactgtgagaaataaatttcagttgtttata

SEQ ID NO: 30155 - DNA, 909 bp, Macaca Mulatta
gggagagattggaacttcgttttccgcgatgcgtttcctggccgctacattcctgctcctggcgctcagcaccgccgcccaggccgaacccgtgcagttcaaggactgcggttctgtggatggagttataaaggaagtgaatgtgagcccgtgccccacccagccctgccaactgagcaaaggacagtcttacagcgtcaatgtcacctttaccagcaatattcagtctaaaagcagcaaggccgtagtgcatggcatcctgatgggcgtcccagttccctttcccattcctgagcctgatggttggaaaagtggaattaactgtcccatccaaaaagacaagacctatagctacctgaataaactaccagtgaaaaaagccgaatatccctccaaaaaattggtgggtgggagggcaacttccaagatgacaaaaaaccccaagcctcctttcctgctgggaaaatcccccagcaccgattcgtttctcatcctccaagtggcctcattgaggttcgggggctcttgggccacccaattctggctgactccttggaaagggccgtccacgttctggctggttccatacagcgagtgaatttggcctctcccaatgggttatccccgcgcactcccgtttgaaaaaggcacgggggcctacgcggggaccaaactatctacttctcggacagggcttggccccccccagggggcgcgcatcgtagcctcacacctgtctttgcgttcaggaccccgttagtgttgttacctaccctaagtttcgcgtgtcatgctgtatgatcaccacctctttttcttctttacacaccctaccgccagcttctccaggatcgtcattccccgcaccccgctcctaccccgccttgccgcagagtatcaccctggccc

SEQ ID NO: 30156 - DNA, 341 bp, Macaca Mulatta
cctgtgtgccaccaagccaggactttccccttggctgggcatccctggctctctcctggtacccagcaagacgtctgttccagggcagtgtagcatctttcaagctctgttactatggtgatggccatgatgttacaatcccacttgcctgaataatcaagtgggaaggggaagcagagggaaatggggccacgtgaatgcagctgctctgttttccctaccctgaggaagaaccaaacggaagcaacaggaacttctgcaactggtttttatcagaaagatcatcctgcctgcggatgatgtcaaaggggcacaagaaattggagctggagaagattgat

SEQ ID NO: 30157 - DNA, 1031 bp, Macaca Mulatta
agaaatgggcaacatttgtgaaagccaagaaatgtaatagttttggatgactaaaatagataaaagttaaggtaagtgcacaaacatcagtgtcaggctatggaagaaagataaagagatgacaaatacttttttttttgaggagagatgctgaggtcagggcacttacgtgcatcaagtgatggagacaaagtaaagagagtttatggatatatatgcatatctcgctaacaagcttggttctgaaatttagaatacctcatcacatcaagataaattgcctttagcatagaacttgagataagtagaggttcactagaagtgctaacttttggatcagggcaaaggcgtttccgggagtgtttttatactagacccctgcctagtccttggggctgaggcatgtccacataattcagagcaacagccttctacttgtgtaagacccaagcatgggaaggatgcccaagacaatagctatgcctctgccccagcctgatgccatgtggtctagagtctgggcagcaacaaccctgtggtcaaagacatggaagaaatgctctgcaaatcccacagcctgttagattggaaaagaagcaagtggcattgggacaattgctctgcatgcctacagcttacctgtcaactacaggaggctgccaaggtgtgcaagaggacctgagggcagagccatgctcagggcacagatagacggggatgggagtcaagatggggcatgggaagtgatgagggctctaagaacacatgaagcaggtattggatatcagcagacagatgagactccttggcaccacagtctgagcctggggtcgggggacagctggggagttgtcaggcaggaacattgatgtagtcatctgaattactgtcctccatcttggcggcaggctggtggtagagactcacatattcacagctgctcctcagagatggggcatggaaccagggagattcagacacctgcagcggggcggggggcaacggcgctccgtagcctggaggcgggggcc

SEQ ID NO: 30158 - DNA, 864 bp, Macaca Mulatta
  misc_feature (1)...(864): n = A,T,C or G
nagggtgcagaagctggatacctaccaagattacaaggaggctgcgtcctcttaccaggaagcctggagcacactccggaagcaggcgtttggatcctggatcagaaacccaccggattatcaccagttcaagtgagaaggaaatgtttgctctggtagcaggacccttcatcctgaactgccttccttcacacaggacaagtcttatcttttttggtggttaaatcagggaatattctttctgagcactgcatctctgttgtgtaatacagatggaatctggaacttagagcaggttatacttgattgaagtagctctctgctaaaatggcatctcactaatgccctcgctgtctgacttccattgtgttttattgcttctctaaaatatgaaatcagggtttggaacatgatgctttaaaagtactccacagcagctctgttttatgggttcctacattgattcagcaaatatttattgagctgaaatgatgtttgacactctgcaagttttacagctttgcctagcatagcgaacatatattttgtattcccagcctttcttccttcggggagccattcttttcccattcttgagtgatcctgctctgtgcctcaggcttggctgaagctaaccttactccctggctctaggaatagcctgtgagccagccctggactgccctggaattgttctcagaggtatcaggaaaggctgtctgttttgatctggagctgtaagagtcataatcgtgggactgccggtggccatcttttcctactacctagagaaagccagcaaagaattgaaggcaacaaaggaaacagccaagagaatcaaagatctagtaacactgtttagat

SEQ ID NO: 30159 - DNA, 263 bp, Macaca Mulatta
  misc_feature (1)...(263): n = A,T,C or G
ctgtcccagaaactttgggcagctccgaacccgctgagggtgctctccgacagcgcnccacctgctctagttcctgaaggggcagactcctcacattccagtactttcccacctgacccctctcccctcgtttttccttcaataaactattttgtgtcagcttcctccttgactctgaaatggattcacggccatttgaaaaccctgtgtcccccagacatctctcacttgccaccattagaggggaggtcttcttgtcaagg

SEQ ID NO: 30160 - DNA, 281 bp, Macaca Mulatta
agaagatgtcacaagacttcatttgctttactcttagttgaaaatcaaatggaagtttttcatgattagggatgctgtcatgagtctggtcagtttactgttgggaactgtgtctttatttcactgttattaataactgaggagataattgacctataaagatattgaaatgttgtttttaaggtctttgcaatgttcctaagtcattaatacaacctgactggggctatttaacaataatctttgtttacatgtttaaataagcaaataactacccagga

SEQ ID NO: 30161 - DNA, 774 bp, Macaca Mulatta
  misc_feature (1)...(774): n = A,T,C or G
nnnnnnnnnnnnnnnnnnnnnngtgcccagccatgatgaacattttttaaaaccaatttttcaggtataacgtaagatttctagccaaaggaaaattttgttgtatttattgtaacttttgctgtaatttggtattgtgtggtatttcttttgtgctttaagtaaaatcatgctagatttagatgccaataaatgcacaatttgaattaaaaacagtctttgtacctctcaaataaaaccataatttatgccataaagtgactgacctccagccatagccaagatctcactttctaggtgagtataatgctcctttccttacatacctgaaactgccttttttagtatgttatagacctttacagctcatttattttggctatttttaacctcctttcatttatttgacatcccttaaattaaaagaaaggatatttaaaatacaactttgtgatatatacatatacacacnnnnnnnnnnnnnnnnnnnnnnnnnnnngacacacataaatcaataaattgtctatttatcaacttttagctttacccccggactttggcaatgttgtagataatagttcaggttctagttttccattttcacatgagctggaaaatgttacagactaccaaattcaaacaagcatctcatatataaagagtctaacagaaagtctcttagggagaaaagaaaattcttacaataaaaacgggagcattgctaggtnnnnnnnnnnnnnnnnnnnnnnnnnnnnncggttaattaaccaaaat

SEQ ID NO: 30162 - DNA, 614 bp, Macaca Mulatta
gatgctaagcaaggacctgtgaaagatgcctatagcctggccaacaacccccagtacaaactggaggtgcagtgtccacaggggggcgctgcagtttgggttttgcttagtagacacataacagacaaggatgattttgcgaataatcgagaatttatcacaatggttgtctacaagactgatgggaaaaaagtttattacccagctgacccacctccatacattgatggaattcgaattaacagccctcattatttgactaagataaagctgaccacacctggcacccatacctttacattagtggtttctcaatatgaaaaacagaacacaatccattacacagttcgggtatattcagcatgcagttttactttttcaaagattccttcaccatacaccttatcaaaacggattaatggaaagtggagtggtcagagtgctgggggatgtggaaatttccaagagactcacaaaaataaccccatctaccaattccatatagaaaagactgggccattattgattgagctacgaggaccaaggcaatatagcgttggatttgaggttgtaacccgtttctactgtaggagatcctggtccccatggctttc

SEQ ID NO: 30163 - DNA, 166 bp, Macaca Mulatta
tttggctttggttgaaaaaagaatttagcctgtatgtactgctttaactactggaagaatgacagatgacaaagatgtgcttcgagatgtgtggtttggacgtattccaacttgcttcacgctatatcaggatgagataactgaaagggaagcagaaccatactat

SEQ ID NO: 30164 - DNA, 574 bp, Macaca Mulatta
  misc_feature (1)...(574): n = A,T,C or G
gggagaagggagtagtccggccttccaggtgggatgagaggcaatgactcgttacctgacgcccatcaacttggaggccttccctggccttgcgcagaaaagtcggggatcggggcaagagaggctgagtacagatgggaaactattgtgcacaagtctttccagaggagtttcttaatgagatatgtgtatttatttccagaccaataaatttgtaacnnnnnnnnnnnnnnnnnnnnnnnnnnnnnnnnnnnnnnnnnnnnnnnnnnnnnnnnnnnnnnnnnnnnnnnnnnnnnnnnnnnnnnnnnnnnnnnnnnnnnnnnnnnnnnnnnnnnnnnnnnnnnnnnnnnnnnnnnnnnnnnnnnnnnnnnnnnnnnnnnnnnnnnnnnnnnnnnnnnnnnnnnnnnnnnnnnnnnnnnnnnnnnnnnnnnnnnnnnnnnnnnnnnnnnnnnnnnnnnnnnnnnnnnnnnnnnnnnnnnnnnnnnnnnnnnnnnnnnnnnnnnnnnnnnnnnnnnnnnnnnnnnnnnnnnnnnnnnnnnnnnnnnnnnnnnnnnnnnnnnnnnnnnnnnnnnnn

SEQ ID NO: 30165 - DNA, 148 bp, Macaca Mulatta
ggtttgccagtttagatcatcaacattttctgatgtagaagctcattttagagcagcccatgaaaacactaagaacttgctatgtccattttgcctcaaagttagtaaaatggcaaccccctacatgaatcattacatgaagcatcag

SEQ ID NO: 30166 - DNA, 1777 bp, Macaca Mulatta
  misc_feature (1)...(1777): n = A,T,C or G
gggcgtgtgccagcagtgagacagagagtgaagcgttagacatcatggaccagcaatttgaagagatgaacaacaaactcaactcggtcactgaccccactggctttctgcggatggttcgccgcaataacctctttaacaggnnnnnnnnnnnnnnnnnnnnnnnnnnnnnnnnnnnnnnnnnnnnnnnnnnnnnnnnnnnnnnnnnnnnnnnnnnnnnnnnnnnnnnnnnnnnnnnnnnnnnnnnnnnnnnnnnnnnnnnnnnnnnnnnnnnnnnnnnnnnnnnnnnnnnnnnnnnnnnnnnnnnnnnnnnnnnnnnnnnnnnnnnnnnnnnnnnnnnnnnnnnnnnnnnnnnnnnnnnnnnnnnnnnnnnnnnnnnnnnnnnnnnnnnnnnnnnnnnnnnnnnnnnnnnnnnnnnnnnnnnnnnnnnnnnnnnnnnnnnnnnnnnnnnnnnnnnnnnnnnnnnnnnnnnnnnnnnnnnnnnnnnnnnnnnnnnnnnnnnnnnnnnnnnnnnnnnnnnnnnnnnnnnnnnnnnnnnnnnnnnnnnnnnnnnnnnnnnnnnnnnnnnnnnnnnnnnnnnnnnnnnnnnnnnnnnnnnnnnnnnnnnnnnnnnnnnnnnnnnnnnnnnnnnnnnnnnnnnnnnnnnnnnnnnnnnnnnnnnnnnnnnnnnnnnnnnnnnnnnnnnnnnnnnnnnnnnnnnnnnnnnnnnnnnnnnnnnnnnnnnnnnnnnnnnnnnnnnnnnnnnnnnnnnnnnnnnnnnnnnnnnnnnnnnnnnnnnnnnnnnnnnnnnnnnnnnnnnnnnnnnnnnnnnnnnnnnnnnnnnnnnnnnnnnnnnnnnnnnnnnnnnnnnnnnnnnnnnnnnnnnnnnnnnnnnnnnnnnnnnnnnnnnnnnnnnnnnnnnnnnnnnnnnnnnnnnnnnnnnnnnnnnnnnnnnnnnnnnnnnnnnnnnnnnnnnnnnnnnnnnnnnnnnnnnnnnnnnnnnnnnnnnnnnnnnnnnnnnnnnnnnnnnnnnnnnnnnnnnnnnnnnnnnnnnnnnnnnnnnnnnnnnnnnnnnnnnnnnnnnnnnnnnnnnnnnnnnnnnnnnnnnnnnnnnnnnnnnnnnnnnnnnnnnnnnnnnnnnnnnnnnnnnnnnnnnnnnnnnnnnnnnnnnnnnnnnnnnnnnnnnnnnnnnnnnnnnnnnnnnnnnnnnnnnnnnnnnnnnnnnnnnnnnnnnnnnnnnnnnnnnnnnnnnnnnnnnnnnnnnnnnnnnnnnnnnnnnnnnnnnnnnnnnnnnnnnnnnnnnnnnnnnnnnnnnnnnnnnnnnnnnnnnnnnnnnnnnnnnnnnnnnnnnnnnnnnnnnnnnnnnnnnnnnnnnnnnnnnnnnnnnnnnnnnnnnnnnnnnnnnnnnnnnnnnnnnnnnnnnnnnnnnnnnnnnnnnnnnnnnnnnnnnnnnnnnnnnnnnnnnnnnnnnnnnnnnnnnnnnnnnnnnnnnnnnnnnnnnnnnnnnnnnnnnnnnnnnnnnnnnnnnnnnnnnnnnnnnnnnnnnnnnnnnnnnnnnnnnnnnnnnnnnnnnnnnnnnnnnnnnnnnnnnnnnnnnnnnnnnnnnnnnnnnnnnnnnnnnnnnnnnnnnnnnnnnnnnnnnnnnnnnnnnnnnnnnnnnnnnnnngctccaccaggtgctggttcagctccaggctggcgagaaggagcaggacttggcatcagctcccattcaggtctccatcagcgtccagctgtggcggctcccgggatgccacgagttcctggcagctctagg

SEQ ID NO: 30167 - DNA, 838 bp, Macaca Mulatta
ggattgtactttatagactctgcagctttgtcaccaagagacttatgctataaccttatagatggtagtaaaataaagtaggtttcaagaaccaaaatctttgtttcctaatataaagtaatgctttgtaaggcccaaagagtaattttccccttatttcttattccttccacattcccttccctgttgtatcattaaaggcttagaaagacttagtcatcctacgagttcattatagattggcttagtttataagtagttggcctttatttttctagtcaaggtttttgaactttgaaataatataaactcatttgttttaagtagtacaggtctaagaaggaatggcagagatttaaagaaagtagagaagtcaagtgtaatctcaaattcagtcacagtaaaatatcttctgactcatagaaatgtggtttctactcagacttctcacagttggttccttaactgattttaacccaggtacctgatttccctctcaggagctctggctattgttaatgcagtaccctgctttgctttggatggacaatggattctaaactctttcctagatgccacccttacctcagtgattggagacaatgatgtcaaagatctaatagggtttttcatcttgctgggtggcagtgtacttttggctgccaatgtgaccctgggactctggatggttacagcacggtaatgtttgcactcatctgacagaatccctgagttacagtatacagctaagtggtaatatccattgccattgaaattcttgtttggtatgaaatataaagtgattccttaaattacatcttagccaacgaacctgagc

SEQ ID NO: 30168 - DNA, 378 bp, Macaca Mulatta
taactactcatctgcttgctaaggcttataaaatgtggttatctcagctggtggccaccatccaatatatgaccagcagccaatctacctttttattctggtggtgatgcaaacagtgtgggtgctacaaggaaggccagttctgaggccaggtgtcctccagctgggtcataggctctcagccaagctactctccccctagtcccactcagagataggctgagagaggaatgtttgcaaccacaacttgcacctacctttacccagaccctaggaaagggccttttggtaaccaggggctgcccctggagtagcttccaggcctgttctctggaaacccaggaacctacagttacatggggccagacaagaggtttg

SEQ ID NO: 30169 - DNA, 1107 bp, Macaca Mulatta
  misc_feature (1)...(1107): n = A,T,C or G
agtcggcagtgcgaagagctgctatggtgctgagtttactggtagagccggccgagccgaggcggtcgcggccatgaaggcgggtgccacgtctatgtgggctgtcgtgctgtgggctgctgaatgaagtcatgggaactggagctgtcagaggccagcagtcaggatttgcaggagccactggtccattcagatttacaccaaaccctgagttttccacctacccaccagcagctacagaagggcccaacatagtttgtaaagcctgtggactttcattttcagtctttagaaagaagcatgtttgctgtgactgcaagaaggatttttgctccgtttgttcagttttacaagaaaatctccgtagatgttctacttgtcacttattacaagagacagcatttcagcgccctcagttaatgcgactgaaggtgaaggacctgcggcagtatctcattctgagaaatatacccatagatacttgtcgtgagaaggaagacttggtggatctagtgctgtgccatcatggactaggctctgaggacgacatggacacaagcagtctgaattcttcaaggtcccagacttctagcttttttacacgttcgtttttttcaaactatacagccccctctgctactatgtcttcatttcagggagagcttatggatggagaccagacatccagatctggagtgccggcacaggtacaaagtgaaatcacttcagcaaacacggaagatgatgacgacgacgatgannnnnnnnnnnnnnnnnnnnnnnnnnnnnnnnnnnnnaacgtggaggatcggaaccccggactctccaaggagagagcgagagcttcgctgtctgacttgtcaagccttgatgatgtggaagggatgagcgtgcgccagctgaaggaaattctggctcggaattttgtcaactattctggctgttgtgaaaaatgggaactggtagagaaagtaaaccggttatacaaagagaatgaagaaaaccaaaagtcctatggtgagcggctgcagctgcaggatgaggaagatgacagcctgtgtcgcatctgcatggatgccgtcatcgactgtgtcctgctggagtgcg

SEQ ID NO: 30170 - DNA, 363 bp, Macaca Mulatta
aataattgtatttctgtcaatcatggtgttgcacttacccagacataaaaccttatgctacacaccttgcctcacgtgctgtggaagactctgtgactttcttaccatcttatttgggctcaatctggggtttccaaatgggtgtttggggcattccaggggctcaaggggttcaaggtgcccagtgctgcgtgtagcacacgtccacagccaggcttgctttgagtggctcacaccagatctgtgttggagtctgaactctggcctgtatacttggcagcacgtcaatctcatttcagtagccaacaaaggtcagggcccaacctattgcccagggagccccatcttctcccaacctagact

SEQ ID NO: 30171 - DNA, 169 bp, Macaca Mulatta
aggtgtccagctatccattaccaagaagaaatctattcgtttgagcctaaagaactctttgaggtaaaaaattagaatgaaagaacctttggatggtgaatgtggcaaagcagtggtaccacagcaggagcttctggacaaaattaaagaagaaccagacaatgctcaa

SEQ ID NO: 30172 - DNA, 787 bp, Macaca Mulatta
  misc_feature (1)...(787): n = A,T,C or G
ggtcctgggcattgactccatgacatttctagcatatccaaggcaccaccagtgatttcccccatttnnnnnnnnnnnnnnnnnnnnnnnnncgtattttgcaatacggctaaacgctttcctgattgagagttaaagcagtaggagtcaagttactggtgccacagagctggaggtatgataggtcaggggctgggtgttgaacttagttaatggaagactgagagcagaacaggtttgtcatctccgcaaggccagaaagtgaccacaaaaagaggcagataatagacactggggtaggatcataccctagggaaatacctttcctgggcttgttttctagcatatcattgacctgggatctttgggtgatcaagggtgtggttagtggaggctctgtgctgcacgtatgcagtatcctatctctttctacatcaagtcaaaacactaagttggtgtactgcctcgacctttttacacctcatcctggaacatatacagggttgagaattttagacaatctctaggtagaggagacaagacgtagacccagacggaagaaatctgcttccctaccatgcctattgtcacaccccacctgtaattcccaagtcctctaaggtactaattttgtagctgctctggaagtaaagatttcagattcaactgggtagggaaagactctgcacctgctgtctaagggaagaatggggttaaatccctggggaggaaatggcgtaaccccctccgtcttcattgatcacgcaacggaatgctattatcatta

SEQ ID NO: 30173 - DNA, 808 bp, Macaca Mulatta
ggcagcaagcacagtattttcttttaaatatcaaaattcctgtaaaaggactgtgcacaataaagtgtttagactccattttcattaggcaggttgactaaaaatgattgcagtaacttaggtttatatatatataaaaaaagtagagcaacctttcatgctgtgacacagatcaaaggttgatactttgtaattttactctggagattctaagtgaagttcaaggtgtacgttttcaagagttactaaaatcaagttggaaatgatttatgtacacttccctgagcctggactaaagcctcgtgcctgtaccccaagtagggatggtacttttctatacaaaagtgatttcctggcaggcaggtatttacaaactgtgttcctgtaccagtccaataatgacaactctaaatccagctgcaccaaatcttattaggccatttgtcatacctatgaaaaatctttagttattaaaataactttgttaatgctacctatggtagggccagaaacaatgtagaattaggaaattttcctgaaaaataaacttttgggggctatggaagaaaaagtttaaagtatcctttagttgccaaaaccttttccccccggaaatttttttggaagtgaaccccaaggggttacctataaaaaaaaaccttggggcaaagaattgaaattcttcctaaccctgtgaaaattaacattttggggaaggggtcaaaaaaagcaaccccttttttatcacccggaaaaatcaaaattcctcccctctgtgccagaaaatttattatacaagccccctcca

SEQ ID NO: 30174 - DNA, 736 bp, Macaca Mulatta
  misc_feature (1)...(736): n = A,T,C or G
gactaaatgcagccgtgactcaaatttacatgaatattaccacataaatactaaatggtgttctactgcaggtataacatgctacagttagtggggagccaggtgcaggaatttgtgttgaacattccagaatcctcttcttcctagggaaaagttgaggtaatgcctcagactgactagcaataaaaatatgtgaaacaaaatatgtgcagttttcaaaggcttgggaaaaaacaatccctctttctgctgatggaaggatagcttagtagaatgtttctgagggctggttgttctctataagttaaaagcattaaaaatgtgtacacgctttgacccaggactttgagctctaaaaaaatatcaagagctgtgtacaaatacattaagctgcttaccacagcaatgtccactggtagaaaactggctcttctacataatggaattctttttaacagaattcagttctgtagccttgggagtatactagataagtttattggcatgagacttcagaattaagtgggaaaacagttcttcaagcatgtacagaaaagtgacctgaagtttttgggtgatgaacttagnnnnnnnnnnnnnnnnnnnnnnnnnnnngcagggtcttgctctgttgctctgccatccacgctgggagtgcagttggcacaaatcatagctcactatggcccttgggcttcaggcacatctctcccgcatctcaggccttccccaagta

SEQ ID NO: 30175 - DNA, 262 bp, Macaca Mulatta
  misc_feature (1)...(262): n = A,T,C or G
agttcgaatctttagaaataaagttacatgaatataagagagaaatagaagagcaacttcgggcagaaatgtgtcaaaagnagttgaagttttttaaagatactgagatagcaaaaattaaaatggaagcgaaaaaaaagtatgagaaggaattagccatgttccagaacgattttgagaaagcctgtcaagcaaaatctgaagccctcgttcttcgggaaaaagagtaccacttganagaattcaaaagcaccaagaggtg

SEQ ID NO: 30176 - DNA, 358 bp, Macaca Mulatta
aggcacgggcgccccttcgtggcggccacagaagaaccgctcccgggcggcgtcgggcggggcggcgctggccagtcctggccaggtgacgggatcaggggccccagctgggtctggaggcaaggagcgctcggaaaacttgtccttgcggcgcagcgtgtcggagcttagccttcaggggcggcggcggcggcagcaggagcggagacagcaggcacttagcatggccccaggggcagccgacgcccaaatcggacctgcagaccccggagacttcgatcagttgactcaatgcctcatccaggcccccagtaaccacccctacttcctgctgctccagggctaccaggacgcccag

SEQ ID NO: 30177 - DNA, 157 bp, Macaca Mulatta
caggagcggttccgcaccatcacccagagctactaccgcagtgccaatggggccatcctcgcttacgacatcaccaagaggagctccttcctgtcagtgcctcactggattgaggatgtgatgaagtacgcgggctccaacattgtgcagctgctga

SEQ ID NO: 30178 - DNA, 269 bp, Macaca Mulatta
  misc_feature (1)...(269): n = A,T,C or G
gccctgtgagtagccagtacagctcctttcttttctggaggatgccccattcccccgaactggatctgtcggagctggaaggcctgggtctgtcagatacagccacntacaagataaaagacagcagcgttggcaaaatgatcgggccagcaactgcagcagaccaggagaaaaaccctgaaggtgatggcctccttgagtacagcaccttcaacttctggagagctcccattgccagcatccactcctttcgaactggacttgctcta

SEQ ID NO: 30179 - DNA, 325 bp, Macaca Mulatta
gttggcctctccacgctctgcagctgagaatgccgccttgcaacagctggtcatagctcagaacgaggctgctttcctgagcatgattgactccaagatggaaggcaagttcacctaccccacaggagagtccctggtctattccaactgggccccaggggagcccaacgatgacggtgggtcagaggactgtgtggagatcttcaccaatggcaagtggaatgacagggcttgcggagaaaagcgtctcgtggtctgcgagttctgagtcaactggggtgggtagggcagtgcttggcccaggagtttggccaggaagtcaaag

SEQ ID NO: 30180 - DNA, 1566 bp, Macaca Mulatta
  misc_feature (1)...(1566): n = A,T,C or G
gcttgttttctgtgctgatgttggcctggatcttcctnnnnnnnnnnnnnnnnnnnnnnnnnnnnnnnnnnnnnnnnnnnnnnnnnnnnnnnnnnnnnnnnnnnnnnnnnnnnnnnnnnnnnnnnnnnnnnnnnnnnnnnnnnnnnnnnnnnnnnnnnnnnnnnnnnnnnnnnnnnnnnnnnnnnnnnnnnnnnnnnnnnnnnnnnnnnnnnnnnnnnnnnnnnnnnnnnnnnnnnnnnnnnnnnnnnnnnnnnnnnnnnnnnnnnnnnnnnnnnnnnnnnnnnnnnnnnnnnnnnnnnnnnnnnnnnnnntgatcatgcttataggagcgctcaccttgatgggctacagtngtttcgccgcagttggtgggatggaaggcctgaaggagaagtacttcttggccctggccagcaaccggagcgagaacagcagctgcgggctgccccgggaggatgccttccatattttccgagatccactgacatctgatctcccgtggccaggggtcctgtttggaatgtccatcccatccctctggtactggtgcacggatcaggnnnnnnnnnnnnnnnnnnnnnnnnnnnnnnnnnnnnnnnnnnnnnnnnnnnnnnnnnnnnnnnnnnnnnnnnnnnnnnctgcccctcttcataatggtgttccctgggatggttagccgcatcctcttcccagnnnnnnnnnnnnnnnnnnnnnnnnnnnnnnnnnnnnnnnnnnnnnnnnnnnnnnnnnnnnnnnnnnnnnnnnnnnnnnnnnnnnnnnnnnnnnnnnnnnnnnnnnnnnnnnnnnnnnnnnnnnnnnnnnnnnnnnnnnnnnnnnnnnnnnnnnnnnnnnnnnnnnnnnnnnnnnnnnnnnnnnnnnnnnnnnnnnnnnnnnnnnnnnnnnnnnnnnnnnnnnnnnnnnnnnnnnnnnnnnnnnnnnnnnnnnnnnnnnnnnnnnnnnnnnnnnnnnnnnnnnnnnnnnnnnnnnnnnnnnnnnnnnnnnnnnnnnnnnnnnnnnnnnnnnnnnnnnnnnnnnnnnnnnnnnnnnnnnnnnnnnnnnnnnnnnnnnnnnnnnnnnnnnnnnnnnnnnnnnnnnnnnnnnnnnnnnnnnnnnnnnnnnagggtgccttctggggcctgatctcgggcctgctcctgggcttgattaggctggtcctggactttatttacgtgcagcctcggtgcgaccagccagatgagcgcccggtcctggtgaagagcatccactacctctacttctccatgatcctgtccacggtcaccctcatcactgtctccaccgtgagctggttcacagagtcgccctccaaggagatggtnnnnnnnnnnnnnnnnnnnnnnnnnnnnnnnnnnnnnnnnnnnnnnnnnnnnnnnnnnnnnnnnnnnnnnnnnnnnnnnnnnnnnnnnnnnnnnnnnnnnnnnnnnnnnnnnnnnnnnnnnnnnnnnnnnnnnnnnnnnnnnnnnnnnnnnnnnnnnnnnnnnnnnnnnnnnnnnnnnnnnnnnaagcagtccaaagtggtgaaggccatcctgtggctctgcggaa

SEQ ID NO: 30181 - DNA, 2344 bp, Macaca Mulatta
  misc_feature (1)...(2344): n = A,T,C or G
ctggcttgaggatgctcaggtcttcatccaaaagaccctgtgtccagctgtcaagcagcctcatgtccagttgactccattggtaattgattgtgtgaagactgtctggttgtcccagggaaggaatcaaggttctacgctgcccctcagctatanagcttcgtctcagtacaggacctcaagactcaccagcatctcccatgctgtagccatctgtcctggagcagtactgcataccaggcctgggcccaagaggctggaccaaatgggaaccccctgccccgagagcagctgttgcttttagggacactaacagacctaccaggggacttggaacaagagtgcaggaacggaagcctctatgtgagagataacactggcgtcctgagctgtgagnnnnnnnnnnnnnnnnnnnnnnnnnnnnnnnnnnnnnnnnnnnnnnnnnnnnnnnnnnnnnnnnnnnnnnnnnnnnnnnnnnnnnnnnnnnnnnnnnnnnnnnnnnnnnnnnnnnnnnnnnnnnnnnnnnnnnnnnnnnnnnnnnnnnnnnnnnnnnnnnnnnnnnnnnnnnnnnnnnnnnnnnnnnnnnnnnnnnnnnnnnnnnnnnnnagaaacaagctcagaggtgtgcagcgaaacctggctgggaatctggttcgactgagtgctctggtgaaaagtaagcagaaagcttacttcatcctgtctcttggtagatcacccccagctgtcacccacgtgtctgtcatcgtgcaggnnnnnnnnnnnnnnnnnnnnnnnnnnnnnnnnnnnnnnnnnnnnnnnnnnnnnnnnnnnnnnnnnnnnnnnnnnnnnnnnnnnnnnnnnnnnnnnnnnnnnnnnnnnnnnnnnnnnnnnnnnnnnnnnnnnnnnnnnnnnnnnnnnnnnnnnnnnnnnnnnnnnnnnnnnnnnnnnnnnnnnnnnnnnnnnnnnnnnnnnnnnnnnnnnnnnnnnnnnnnnnnnnnnnnnnnnnnnnnnnnnnnnnnnnnnnnnnnnnnnnnnnnnnnnnnnnnnnnnnnnnnnnnnnnnnnnnnnnnnnnnnnnnnnnnnnnnnnnnnnnnnnnnnnnnnnnnnnnnnnnnnnnnnnnnnnnnnnnnnnnnnnnnnnnnnnnnnnnnnnnnnnnnnnnnnnnnnnnnnnnnnnnnnnnagctccaggatgttcacctgctccagtcagtgggtggggggacaagaaggccagtgctcgccccctgcctccgtggcgccgttctgcttcaaagcttctctcgtcagaagcctgggactcactcatcccgtcaagcctacggggcctccctgtatgagcagttggtgtgggaacgtcagttaggacttcccctctacctgtgggctaccaaggccctggaggagctggcctgcaagnnnnnnnnnnnnnnnnnnnnnnnnnnnnnnnnnnnnnnnnnnnnnnnnnnnnnnnnnnnnnnnnnnnnnnnnnnnnnnnnnnnnnnnnnnnnnnnnnnnnnnnnnnnnnnnnnnnnnnnnnnnnnnnnnnnnnnnnnnnnnnnnnnnnnnnnnnnnnnnnnnnnnnnnnnnnnnnnnnnnnnnnnnnnnnnnnnnnnnnnnnnnnnnnnnnnnnnnnnnnnnnnnnnnnnnnnnnnnnnnnnnnnnnnnnnnnnnnnnnnnnnnnnnnnnnnnnnnnnnnnnnnnnnnnnnnnnnnnnnnnnnnnnnnnnnnnnnnnnnnnnnnnnnnnnnnnnnnnnnnnnnnnnnnnnnnnnnnnnnnnnnnnnnnnnnnnnnnnnnnnnnnnnnnnnnnnnnnnnnnnnnnnnnnnnnnnnnnnnnnnnnnnnnnnnnnnnnnnnnnnnnnnnnnnnnnnnnnnnnnnnnnnnnnnnnnnnnnnnnnnnnnnnnnnnnnnnnnnnnnnnnnnnnnnnnnnnnnnnnnnnnnnnnnnnnnnnnnnnnnnnnnnnnnnnnnnnnnnnnnnnnnnnnnnnnnnnnnnnnnnnnnnnnnnnnnnnnnnnnnnnnnnnnnnnnnnnnnncagagtctatgtccagttctttctggctgatgccctgatcctgcctgtgccccggccctcccttcattcagcaacaccctcaatacctcagacagatcccaccagcccggagggaccccacctaggacagagccgactcttcttgctctgccacaaggaggccctcatgaagcggaatttttgtgtctctccaggagcaagtccagaggtgcccaagcccaccctcagtttctgtgtgttggggagctggcttgggggcacccagaggaaggaggggactggatgggggctgcccgagccccaggggaaaacgacaaggatcagaagg

SEQ ID NO: 30182 - DNA, 448 bp, Macaca Mulatta
caggcaaggagcagaacggtaacaccagcaatggaaccaacgactacataggcagtgtagagaaatggcgttaaatggctcaaaaaggcctgcacatacttctcccaaagcgccactgaaaagatggcatagtttaaaagatgaaagtgtccaaacacatcctgcttccttcattggggaagttaaaaaaagaaaagtttagatgttgcctttacagttgcctttcaattcagtgttatactgtgcgtgggtaaaacaaatctcaatatggaattaaattgtctttttggggttggactatttatgaaatccgaaagccaagccagactcaccagaaattgctgtttagatattttaagaagttcttaaattagtcatggagacaaaatgaaaacaaaatgtgaccatttaacttatggctaagaaatggactttaaattattcatga

SEQ ID NO: 30183 - DNA, 166 bp, Macaca Mulatta
caggcaaggaaactgtttttgagtgtgaagatttagaagaccctctcttgaattagtttacttactttctttaagaaattcttcataggatggtcctatttcttggttcccaccgatgtattcatcttggatcatccagggaggtgtggcacctgaaaaagaaata

SEQ ID NO: 30184 - DNA, 767 bp, Macaca Mulatta
ggcgatggacaccttttatcaaagatattatggaggatgctattgataatagattagattcaaaagaatggccgtattgttcccagtgtccagcagtatggaatggttcaggagctgtaagtgctcgccagaaacccagagctaattatttagaagaccgaaaaaatgggtcaaagctgattgtttttgtaattggagggattacatactctgaaatgcgttgtgcttatgaagtttctcaggcacataaatcctgtgaagttattattggttctacacatattttaacacccaaaaagctgttggatgatataaagatgctgaataaacccaaggataaactctcctttattaaggatgaatagcttttctttttggagggtttagagattcttactaatatgttgaactaaaatagaaagaaaatgttgctgtcatgtaatttaaacaatgtaaatattttatggaataatggcttttcaaatatatttcttaaggaactgtgtatgattgtggattactggatttggcattgtgggataattgaaatgttggctgctgctgtgtaagtgatgaaaagagatggtgaaaatggtttctaagagggaatgtgtctcgcctttggaggcccaagagatggagggagtgggcggggaagttgcgtggcagcccgccccagggggacaggaacgggagtaagcccagtggggagacactgggaagaccagaacgagccgcgagggcggcgggagagagcagcacgagcg

SEQ ID NO: 30185 - DNA, 429 bp, Macaca Mulatta
  misc_feature (1)...(429): n = A,T,C or G
tggcttgtctcccgtcgtccccacccttgcccctcttggcagctcagggcagccctgggatttggcagacgccagtcctccctgagatgtctccccatccttccctccgccaggccctacgtctccgcaaaccccccgcttcggggtgaccgcttcagacaggaagctgagtccgggcctggggtaagggacctgcccaatcctgtgacagcccgcgtccttctgacagtcacctcccactagcggtgannnnnnnnnnnnnaccttcccggtgccccactgagaagtgggctcttccttggcaggggcttcttcactgtatcgctgtggatgtcgaggtggggcaggatcgaagaggagaaaacaagagaagagggaggtagggccagcgagggacaaaaggggaggaaaatttagatgggaagtgga

SEQ ID NO: 30186 - DNA, 724 bp, Macaca Mulatta
tcctgcaaacaaggtttgcccgaatcttggctgagtatgagtccatgcagcagaaactgaaacaaagattaaccaaggttgagaaatttctgaaaccgcttattgacacagaattttcaagtattgagggacctggagtagaaagtgggcccattgactctacatagaactgaaaagctggtcattgacagggacacgcctcatgatccttctgatcttgtgactgacatcaaataaaactttaaagaagaggaagactcagttcggaaatttttccatgaggaaaatgtgctttgatgcaaggtacaaggcccacaccctctctgagagatactataattaaaaaagctttatatcttgggatttttcacaactgataatgtgcaaagatataaactgattaacttgtcaatggctgtatcttctgatttttttcacatatgctcgttttatgtaataatcttcataaaaatgaataagtatccctcactttcatgccatttccattgttgagtgaagtgtatttgaagtaactgagaattaccatgtacatcatgtttgggataacattttaaaaaattagactgcaataaagtaaaattaattatgcaactgtagtgaaaatgagttatttgataatttagcagggagtttaggatcttgcagaacttcagggtcattttaaggaaaaatcaatcatttttgtagtctaggactgagaaag

SEQ ID NO: 30187 - DNA, 682 bp, Macaca Mulatta
ttcttggatgcttcttaaccctcaggcaaacctatgttccccctgtattcaggctctgctttaaagcaagccatgaggctattggagtttctgtttagggcattaaaaattcccgcaaactataaagagcaatgttttcagtcttttaggattagaagaattacataaaaattaataaacattttcaatgatggaaaaatgtgtcttgtaattctttggttcttgcctcgttgagtacataagagaagaagactcttggccatgtttgctccctaattgcttgtcttgtatggtgtcatcttttctagctgttttgatatttgttaagtttgcagatgagtttggggcctctggcaacatagagactaaggaactgggtaagaaaaaaacaaatgttacaatcatgttacttacagtgcttcttcctgtggaattaaaagttctttctgctcctcacccccttccaggtgtggtatctgtgcgctttgaagaagatgaagacaggaacttgtgtctaatagcatatccattaaaaggggaccatggaattgtggacattgtagataattcagactgtgaaccaaaaagtaagctcctaaggtggacaacaaacaaaaaacatcatgtcttagaaacagaaaagacccctaaggactgggtgcgtcagcaccgtaaagaggag

SEQ ID NO: 30188 - DNA, 1298 bp, Macaca Mulatta
  misc_feature (1)...(1298): n = A,T,C or G
gatccactccaagatgcacacggagaccatcaagccccacaagtgcccgcactgctccaagaccttcgccaacacctcctacctggcccagcacctccgtatccactcgggggccaagccctacaactgttcctactgccagaaggccttccgccagctctcccacctccagcagcacacacgnnnnnnnnnnnnnnnnnnnnnnnnnnnnnnnnnnnnnnnnnnnnnnnnnnnnnnnnnnnnnnnnnnnnnnnnnnnnnnnnnnnnnnnnnnnnnnnnnnnnnnnnnnnnnnnnnnnnnnnnnnnnnnnnnnnnnnnnnnnnnnnnnnnnnnnnnnnnnnnnnnnnnnnnnnnnnnnnnnnnnnnnnnnnnnnnnnnnnnnnnnnnnnnnnnnnnnnnnnnnnnnnnnnnnnnnnnnnnnnnnnnnnnnnnnnnnnnnnnnnnnnnnnnnnnnnnnnnnnnnnnnnnnnnnnnnnnnnnnnnnnnnnnnnnnnnnnnnnnnnnnnnnnnnnnnnnnnnnnnnnnnnnnnnnnnnnnnnnnnnnnnnnnnnnnnnnnnnnnnnnnnnnnnnnnnnnnnnnnnnnnnnnnnnnnnnnnnnnnnnnnnnnnnnnnnnnnnnnnnnnnnnnnnnnnnnnnnnaccaccacacttccagtctcctggggcagccccccagggtgggggtggtggggacagcaaccccaaccctccaccccagtgttcctttgacctgaccccctataagacggcggagcatcataaggacatctgcctcactgtcaccaccagcaccatccannnntccaggtggagcacctggccagctcttagagatccgtgctgccacccactgggaagaggaagaagtagtcctggtttcttctttctccaactcctcttggtgggaaaagtcctcttcttcacaggccttggctccatctccttgggcctcaggcacagctttccttcacaggataccatcctttttctgaactcttcaaaaggaacatcagccctcctgattgcaaaggaatactgagctgatggtatcatccagcagcctcccctcccaagcaaagcttttaaaattgggggttggtgctcaagggaaggatttgctatgacctcatagaaacttgtccagtgtggtcacttaccctatccttaccctccttatcctcaaagtttgggttgatagaagactagaggctggccctcccaggtaacagagaaaagggagccccaaatgcaaccagcctcttgttctattcttgcctgcaaaagaacagaggtttctc

SEQ ID NO: 30189 - DNA, 105 bp, Macaca Mulatta
catgatcacaggagacaacccgctctctgcatgccatgtggcccaggagctgcacttcattgaacagtatcacacgctgatcctgcagcctccctctgagaaagg

SEQ ID NO: 30190 - DNA, 1977 bp, Macaca Mulatta
  misc_feature (1)...(1977): n = A,T,C or G
agaaggccagcaatcgccagaacaatggcagaagatgtacggtagatgctctgggaatgaagtctaccacattgttttggaagaaagtacattttttgctgaatatgaaggaaagagttttacatatgcctctttccatgcacacaaaaagtnnnnnnnnnnnnnnnnnnnnnnnnnnnnnnnnnnnnnnnnnnnnnnnnnnnnnnnnnnnnnnnnnnnnnnnnnnnnnnnnnnnnnnnnnnnnnnnnnnnnnnnnnnnnnnnnnnnnnnnnnnnnnnnnnnnnnnnnnnnnnnnnnnnnnnnnnnnnnnnnnnnnnnnnnnnnnnnnnnnnnnnnnnnnnnnnnnnnnnnnnnnnnnnnnnnnnnnnnnnnnnnnnnnnnnnnnnnnnnnnnnnnnnnnnnnnnnnnnnnnnnnnnnnnnnnnnnnnnnnnnnnnnnnnnnnnnnnnnnnnnnnnnnnnnnnnnnnnnnnnnnnnnnnnnnnnnnnnnnnnnnnnnnnnnnnnnnnnnnnnnnnnnnnnnnnnnnnnnnnnnnnnnnnnnnnnnnnnnnnnnnnnnnnnnnnnnnnnnnnnnnnnnnnnnnnnnnnnnnnnnnnnnnnnnnnnnnnnnnnnnnnnnnnnnnnnnnnnnnnnnnnnnnnnnnnnnnnnnnnnnnnnnnnnnnnnnnnnnnnnnnnnnnnnnnnnnnnnnnnnnnnnnnnnnnnnnnnnnnnnnnnnnnnnnnnnnnnnnnnnnnnnnnnnnnnnnnnnnnnnnnnnnnnnnnnnnnnnnnnnnnnnnnnnnnnnnnnnnnnnnnnnnnnnnnnnnnnnnnnnnnnnnnnnnnnnnnnnnnnnnnnnnnnnnnnnnnnnnnnnnnnnnnnnnnnnnnnnnnnnnnnnnnnnnnnnnnnnnnnnnnnnnnnnnnnnnnnnnnnnnnnnnnnnnnnnnnnnnnnnnnnnnnnnnnnnnnnnnnnnnnnnnnnnnnnnnnnnnnnnnnnnnnnnnnnnnnnnnnnnnnnnnnnnnnnnnnnnnnnnnnnnnnnnnnnnnnnnnnnnnnnnnnnnnnnnnnnnnnnnnnnnnnnnnnnnnnnnnnnnnnnnnnnnnnnnnnnnnnnnnnnnnnnnnnnnnnnnnnnnnnnnnnnnnnnnnnnnnnnnnnnnnnnnnnnnnnnnnnnnnnnnnnnnnnnnnnnnnnnnnnnnnnnnnnnnnnnnnnnnnnnnnnnnnnnnnnnnnnnnnnnnnnnnnnnnnnnnnnnnnnnnnnnnnnnnnnnnnnnnnnnnnnnnnnnnnnnnnnnnnnnnnnnnnnnnnnnnnnncagtcatttgtgaaggattatatgatttctatcacgagacttctgttgggactggatactacaccaggatctgggtttctttgttctnnnnnnnnnnnnnnnnnnnnnnnnnnnnnnnnnnnnnnnnnnnnnnnnnnnnnnnnnnnnnnnnnnnnnnnnnnnnnnnnnnnnnnnnnnnnnnnnnnnnnnnnnnnnnnnnnnnnnnnnnnnnnnnnnnnnnnnnnnnnnnnnnnnnnnnnnnnnnnnnnnnnnnnnnnnnnnnnnnnnnnnnnnnnnnnnnnnnnnnnnnnnnnnnnnnnnnnnnnnnnnnnnnnnnnnnnnnnnnnnnnnnnnnnnnnnnnnnnnnnnnnnnnnnnnnnnnnnnnnnnnnnnnnnnnnnnnnnnnnnnnnnnnnnnnnnnnnnnnnnnnnnnnnnnnnnnnnnnnnnnnnnnnnnnnnnnnnnnnnnnnnnnnnnnnnnnnnnnnnnnnnnnnnnnnnnnnnnnnnnnnnnnnnnnnnnnnnnnnnnnnnnnnnnnnnnnnnnnnnnnnnnnnnnnnnnnnnnnnnnnnnnnnnnnnnnnnnnnnnnnnnntaacaaacttgtcacttatttatcttctagatgaaatgaatgatcatcaaagtaccctctcctacatcctgattaacccatctccagataccagaatagaactgaatgatgttgt

SEQ ID NO: 30191 - DNA, 2029 bp, Macaca Mulatta
  misc_feature (1)...(2029): n = A,T,C or G
caggtggtgacaatatgatcatcatctggaatgtgggcaccggggaggtgctgctgagcctggatgatatgcacccagacgtcatccacagtgtgtgctggaacagcaacggtagcctgctagccaccacctgcaaggacaagaccttgcgcatcattgaccccagaaaaggccaagtggtggcggtnnggtctctgccctaagtaagcccccagcctgcaattctctgcccggctcctgttccctcccctcccttgcatctcagaagctcagagaagggctcctcgctttgggattgaggaggggagaagctggaaactccaccctcccaccagaacctgcatgaaacctgagctcccggacccctctcctctcagccggcacccagacgcatcttccagggtctggggcctgacactggctcgagggctggccctttctccttgtggacccgctgggnnnnnnnnnnncaaccctcgcatgttgcttatcccagccgggtgccctgggtgggctgaggccctggcctcgccggcctcagtctaacctggggtgcgggtgcgtgggccgcttgcatgtctgcgtggagcacaagcgccgagcgcggtcgggcgggcgcgcgggcgctctaacccactaaccccgcgagcaggagagagcccggcctcacgagggcgcccgcccgctgcgggctgtcttcaccgcagacgggaagctgatcagcaccggcttcagcaggatgagtgagcggcagctcgcactgtgggacccggtaggccaggccgcgccgggcnnnnnnnnnnnnnnnnnnnnnnnnnnnnnnnnnnnnnnnnnnnnnnnnnnnnnnnnnnnnnnnnnnnnnnnnnnnnnnnnnnnnnnnnnnnnnnnnnnnnnnnnnnnnnnnnnnnnnnnnnnnnnnnnnnnnnnnnnnnnnnnnnnnnnnnnnnnnnnnnnnnnnnnnnnnnnnnnnnnnnnnnnnnnnnnnnnnnnnnnnnnnnnnnnnnnnnnnnnnnnnnnnnnnnnnnnnnnnnnnnnnnnnnnnnnnnnnnnnnnnnnnnnnnnnnnnnnnnnnnnnnnnnnnnnnnnnnnnnnnnnnnnnnnnnnnnnnnnnnnnnnnnnnnnnnnnnnnnnnnnnnnnnnnnnnnnnnnnnnnnnnnnnnnnnnnnnnnnnnnnnnnnnnnnnnnnnnnnnnnnnnnnnnnnnnnnnnnnnnnnnnnnnnnnnnnnnnnnnnnnnnnnnnnnnnnnnnnnnnnnnnnnnnnnnnnnnnnnnnnnnnnnnnnnnnnnnnnnnnnnnnnnnnnnnnnnnnnnnnnnnnnnnnnnnnnnnnnnnnnnnnnnnnnnnnnnnnnnnnnnnnnnnnnnnnnnnnnnnnnnnnnnnnnnnnnnnnnnnnnnnnnnnnnnnnnnnnnnnnnnnnnnnnnnnnnnnnnnnnnnnnnnnnnnnnnnnnnnnnnnnnnnnnnnnnnnnnnnnnnnnnnnnnnnnnnnnnnnnnnnnnnnnnnnnnnnnnnnnnnnnnnnnnnnnnnnnnnnnnnnnnnnnnnnnnnnnnnnnnnnnnnnnnnnnnnnnnnnnnnnnnnnnnnnnnnnnnnnnnnnnnnnnnnnnnnnnnnnnnnnnnnnnnnnnnnnnnnnnnnnnnnnnnnnnnnnnnnnnnnnnnnnnnnnnnnnnnnnnnnnnnnnnnnnnnnnnnnnnnnnnnnnnnnnnnnnnnnnnnnnnnnnnnnnnnnnnnnnnnnnnnnnnnnnnnnnnnnnnnnnnnnnnnnnnnnnnnnnnnnnnnnnnnnnnnnnnnnnnnnnnnnnnnnnnnnnnnnnnnnnnnnnnnnnnnnnnnnnnnnnnnnnnnnnnnnnnnnnnnnnnnnnnnnnnnnnnnnnnnnnnnnnnnagggcgacagcagcattcggtactttgagattaccgacgagccgcctttcgtgcactacctgaacacgttcagcagcaaagagccgcagcggggcatgggtttcatgcccaaaaggggactggatgtcagcaagtgtgagatcgcccgg

SEQ ID NO: 30192 - DNA, 110 bp, Macaca Mulatta
gatctttgaacaggtactaagtgaactggagcctctatgtctggcagaacaggacttcataagtaaatttttcaaactacagcaacatcaaagtatacctggaactatgg

SEQ ID NO: 30193 - DNA, 804 bp, Macaca Mulatta
gggcgtgtgcatctctcccgaggccatcgttactgcggacggaactgattttcctatggattctagtaacggaaactgtagaggggcaagcagtgagcgctgtaaatgtaagcctattagagctacacagaagacttgtttccggaacaattacaactatgtcattcgggctaaagttaaagagataaagactaagtgccatgatgtgactgcagtagtggaagtgaaggagattctaaagtcttctctggtaaacattccacgggatactgttaacctctataccagctctggctgcctctgccctccacttaatgttaatgaggaatatatcatcatgggctatgaagatgaggaacgttccagattactcttggtggaaggctctatagctgagaaatggaaggatcgacttggtaaaaaagttaagcgctgggatatgaagcttcgtcatcttggactccgtaaagttgattctagcaatagtgaatcccctccgagtcaaaattctgggcggaaactcgaaccccccgcaagcacccaacctaatcccgaaaatccaaaaattaacctccggggaactttcctataaaaaactacttggcattgctgggcctacccaaaggaaaaattgcccttatgcccaccccaaatcccaatgggttacccaccaaaaatccgggggggaaacgggaataaaaacctcccaaattcccctttggggttttcggggtttttccctttcccccaaaacccctttaaaaagggttttgggggggcaaaactctcttaaaaaaaatttgg

SEQ ID NO: 30194 - DNA, 497 bp, Macaca Mulatta
ggggggttccggcgtggccattttcgttgctggtgttaagttgcggcggttgctggtcagtaacagccaagatgctgcggaatctgctggctctccgtcagattggacagagaaccataagcactacttcccgcagacatttacaaaataaagttccagagaaacaaaaactgttccaggaggatgatggaattccactgtatctaaagggtgggatagctgatgtcctcctgtatagagccaccatggttcttggagttggtggaacagcatatgccttgtatcagctggctgtggctgcatttcccaagaagcaggagtgacttcgatcatcccagcaatcacttggttcagtttcattccgctctctatggaccagtaatctgataaccgagctcttctctggggatcaatatttattgacttgtagtaactgccgccaataaagcagtctttaccatgtgaaatatgacaacaataaataaatataacatgtc

SEQ ID NO: 30195 - DNA, 1849 bp, Macaca Mulatta
  misc_feature (1)...(1849): n = A,T,C or G
ttcagagcctgaggccggcactttggacccagcccttgacctctcagcaactacagtgtatccgggagctgagtagccgtcgattgcagaggnaggatgccggtgcagtacatccttggagagtgggactttcaggggctcagcctgaggatggtgnnnnnnnnnnnnnnnnnnnnnnnnnnnnnnnnnnnnnnnnnnnnnnnnnnnnnnnnnnnnnnnnnnnnnnnnnnnnnnnnnnnnnnnnnnnnnnnnnnnnnnnnnnnnnnnnnnnnnnnnnnnnnnnnnnnnnnnnnnnnnnnnnnnnnnnnnnnnnnnnnnnnnnnnnnnnnnnnnnnnnnnnnnnnnnnnnnnnnnnnnnnnnnnnnnnnnnnnnnnnnnnnnnnnnnnnnnnnnnnnnnnnnnnnnnnnnnnnnnnnnnnnnnnnnnnnnnnnnnnnnnnnnnnnnnnnnnnnnnnnnnnnnnnnnnnnnnnnnnnnnnnnnnnnnnnnnnnnnnnnnnnnnnnnnnnnnnnnnnnnnnnnnnnnnnnnnnnnnnnnnnnnnnagctatgaagaccctgcggccctggacggtggggaggagggcatggacatcattacccacatcctggccctggcaccccggctcctgaaggactctggngtagtatcttcttagaagtggacccaaggcacccggagcttgtcagcagctggcttcagagccggcctgaactgtaccttaatcttgtggctgtgcgcaaggacttctgtgggannnnnnnnnnnnnnnnnnnnnnnnnnnnnnnnnnnnnnnnnnnnnnnnnnnnnnnnnnnnnnnnnnnnnnnnnnnnnnnnnnnnnnnnnnnnnnnnnnnnnnnnnnnnnnnnnnnnnnnnnnnnnnnnnnnnnnnnnnnnnnnnnnnnnnnnnnnnnnnnnnnnnnnnnnnnnnnnnnnnnnnnnnnnnnnnnnnnnnnnnnnnnnnnnnnnnnnnnnnnnnnnnnnnnnnnnnnnnnnnnnnnnnntgtgggagtattgggggatatggccagtaaagtattgagagattaacaaatggtgacctaatgatttgttccatgacttgcaggtccgctgaccccttactcccaggtagcgccagggcgagagtttccttctgccccagcagggctggccatcagtaccctgcttggtaggggtatgcgggtgcagcgtggaggaaggcacgtgagtcctcactcctggccttggataccatggggcctggtgtagagcagctcactcccagggactgatcagtcctccactgccctgggtgcatgcgaacacacttccctggccaagcctggctcaagcacaggaagctcatctgcatttcggcttaaggatgactgcctgctttctggaggggagggcctggaggtccttgctgcacagttcctgggtcgcacatccacattcatttaacggaaggcttgagccagtgaggggtgtttcctttttatccccatagcttttaactaaaacatccctcctgagttgaccccctggggtttcaaataacccatgtgtacctggttagggctggggagagtgagaaactgagatactgggcacaggattgtggcctccaccccagctctggtctgtgcagactcatggccaccaggaggcttgcagatccagccttcctatcaacagtgacaggaaatctctaggttggtgagtactggtggtgtgagcctgcttcagggtgggtcctaaggaacatggcaaaccaggctggctcattccactagactgccccctgccactccagcacttcccagggcctggcagtatggtctgatgagcagtgtgatccaatgggca

SEQ ID NO: 30196 - DNA, 655 bp, Macaca Mulatta
  misc_feature (1)...(655): n = A,T,C or G
gggggaagcgggcgcgcttcctgcctggaggaggctgcgggtctcaatccgtggcgcctcgccagctacaggacgacgcgggctcttgaggggcagagcagcacatcatgcaggatcccaatgaagatacagaatggaatgacattttaagagattttggcattcttcctcctaaagaagagtcaaaagatgaaattgaagaaatggttttaggtttacagaaagaagcaatggtgaaaccatttgaaaagatgactcttgcacagctgaaggaagctgaagatgaatttgatgaagaagatatgcaagctattgaaacatacagagagaagcggttacaggaatggaaagctcttaagaaaaaacaaaaatttggagaattaagagaaatttctggaaatcagtatgtgaatgaagtcacaaatgcagaaaaagatgtgtgggttataattcatctatacagatcaagaacttgaatggaagctagcagaagttggagcaatacagactgatttggaagataaccccccaaaagacattgtagatatggtggtatcttcaattagaaacacttctattcannnnnnnnnnnnnnnnnnnnnnnnnnnnnnnnnatgtcggccgccctcgccctcaagagctttctaacattcgt

SEQ ID NO: 30197 - DNA, 759 bp, Macaca Mulatta
  misc_feature (1)...(759): n = A,T,C or G
ggctgtgttgtaaatagaagcactgacaaccagaggcaacagcaattaaatgacgtggtaacaaattcatctactattatccagaatccagtagagacacagaagaaggactatagtctgttaccactgttagcagctgcccctcaagttggagaaaagattgcatttaagcttttggaactaacatccagttactctcctgatgtctctgactacaaggaaggaagaatattaagccacaatccagagacccagcaagtagatatagaaattctttcatccttacctgccttgagagaacctgggaaatttgatttggtttatcacaatgaaaatggaaccgaggtagtggagtacgctgtgacacaggagagcaagatcactgtattttggagagagttgattgacccaagactgattattgaatctccaagtaacacatcaagtacagaacctgcctgagtatgacctctccaccttagagtttatgaatgtcttgtttgtgaaagtgactctaacccgnnnnnnnnnnnnnnnnnnnnnnnnnnnggatttggaagttgtatggatttttatcttccctttactgcctaggaaaacaatctacctccatcttttaaaatgacctgggggggttgggtttggtagaatccttggggttttttttggtcagggtttaaatttccagcttaaaaaaaatgggaaaaacaatgaacattttcccttgggaaaaaaaattgtgtgggaaaataccacaat

SEQ ID NO: 30198 - DNA, 1754 bp, Macaca Mulatta
  misc_feature (1)...(1754): n = A,T,C or G
caggagatttttcgggatattaccagaccactcatttnnnnnnnnnnnnnnnnnnnnnnnnnnnnnnnnnnnnnnnnnnnnnnnnnnnnnnnnnnnnnnnnnnnnnnnnnnnnncatgttggaccatagggtgagaccgggtcctgtcccccacagccaggagcccgagagtgaggacatggagctgcctttggagggctatgtgcccgagggcctggagctggctgccctgcggccagagagccccacgcccgaggaacaggagtgccacaaccatagccccgatggggactccagttccgactatgtgaacaacacctccgaggaggaggactatgacgagggcctccctgaggaggaggagggcatcacctactacatccgctactgccccgaggacgacagctacctggagggcatggactgcaatgggaaggagtacctggnnnnnnnnnnnnnnnnnnnnnnnnnnnnnnnnnnnnnnnnnnnnnnnnnnnnnnnnnnnnnnnnnnnnnnnnnnnnnnnnnnnnnnnnnnnnnnnnnnnnnnnnnnnnnnnnnnnnnnnnnnnnnnnnnnnnnnnnnnnnnnnnnnnnnnnnnnnnnnnnnnnnnnnnnnnnnnnnnnnnnnnnnnnnnnnnnnnnnnnnnnnnnnnnnnnnnnnnnnnnnnnnnnnnnnnnnnnnnnnnnnnnnnnnnnnnnnnnnnnnnnnnnnnnnnnnnnnnnnnnnnnnnnnnnnnnnnnnnnnnnnnnnnnnnnnnnnnnnnnnnnnnnnnnnnnnnnnnnnnnnnnnnnnnnnnnnnnnnnnnnnnnnnnnnnnnnnnnnnnnnnnnnnnnnnnnnnnnnnnnnnnnnnnnnnnnnnnnnnnnnnnnnnnnnnnnnnnnnnnnnnnnnnnnnnnnnnnnnnnnnnnnnnnnnnnnnnnnnnnnnnnnnnnnnnnnnnnnnnnnnnnnnnnnnnnnnnnnnnnnnnnnnnnnnnnnnnnnnnnnnaccaggaccccagaagagaggccaaagtggctcccagagcaggnnnncaggtttgcaatggtctggagcagccaaggaagcagcagcgctctgatctcaatggacctgttgacaataacaacattccaganagacaaagaaggtggcatcatttccaagttttgtggctgttccagggccctgtgaaccagaagacctcatcgatgggatcatctttgctgccaattacctggggtccacccagctgctgtcagaacggaacccttccaaaaacatcagaatgatgcaagcgcaggaggccgtcagccgggtcaannnnnnnnnnnnnnnnnnnnnnnnnnnnnnnnnnnnnnnnnnnnnnnnnnnnnnnnnnnnnnnnnnnnnnnnnnnnnnnnnnnnnnnnnnnnnnnnnnnnnnnnnnnnnnnnnnnnnnnncaggaaaccatgatggaccacgccttgcgtaccatctcctacatcgccgacattgggaacattgtggtgctgatggccagacgccgcatgccccggtcagcctctcaggactgcatcgagaccacacccggggcccaggaaggcaagaagcagtataagatgatctgccatgtgttcgaatcagaggatgcccagctcatcgcccagtccatcggccaggccttcagcgtggcctaccaggagttcctgcgagccaatggcatcaaccccgaagacctgagccagaaggagtacaaagatatcatcaacacccaggagatgtacaacgacga

SEQ ID NO: 30199 - DNA, 100 bp, Macaca Mulatta
gcttctggatggtcctgggagcctgtgtcctcacattcaggagtccagtggaaagctggctcagctggactgagcaagctgagaagaaacatggtctttc

SEQ ID NO: 30200 - DNA, 427 bp, Macaca Mulatta
  misc_feature (1)...(427): n = A,T,C or G
aatgcccatatccgccttatccgtgaggaagcttgccttgggcgccctctgctggctctcctgaagctaacaggggcgagtgctcggtggtttacaaattgcctccattaagactgtgaaactgttcagcctgctatagttagatctctggcacctgcctaggaggtcttgcannnnnnnnnnnnnnnnnnnnnnnnnnnnnnnnnnnnnnnnnnnnnnnnnnnnnnnnnnnnnnnnnnnnnnnnnnnnnnnnnnnnnnnnnnnnnnnnnnnnnnnnnnnnnnnnnnnnnnnnnnnnnnnnnnnnnnnnnnnnnnnnnnnnnnnnnnnnnnnnnnnncatcaggagacccagctgtgctcctggatggttttaccacaagcccaattgctatggttacttcaggaagctgaggaactggtctgatgc

SEQ ID NO: 30201 - DNA, 526 bp, Macaca Mulatta
ctctaaagaacatgaacatctagtaattaatgaagtaatagattcccccaaagggaaaaaacgcaaggtagaacatcagacagcttgtgcttgtagttctcggtgtgtacaaggatctgaaaagtgtcctcagaagacttctagaaaagaagaagcgaaacctgtgcctgtaccttttgaggtgaaaagatcaaaaatggctgcttcagtggtctcgaaaaggaatgagataaagaagtcggttcatacacaagtgaatactaacacaacactcccaaaaagtccacagccatcagtgcctgaacaaagtgataatgacctggagcaagcaggaaagagcaaacgaggtagtattctccagctctgtgaagaaattgctggtgaaattgagtcagataatgtagaggtgaaaaaggaatcttcacaaatggaaagtgtaaaggaagaaaagcccacggaaataaaattggaagagaccagtgttgaaagacaaatacttcatcagaaggaaacaaatcaggatgtg

SEQ ID NO: 30202 - DNA, 655 bp, Macaca Mulatta
  misc_feature (1)...(655): n = A,T,C or G
ggggctggaactggagcgcgcaccctgcagcagtgatggtccagaactgtgtgctgtggagttcgtggacaggccagttattggctcatctcagatctacgatcatctctccaaacctgttgagcaaagactcatggccccannnnnnnnnnnnnnnnnnattcgtggctggagcatgtatgatgatgaaagcctgtgactttgagggattctactctgaatgtacctcccagatcctccctgtcatgccacattgcactgattggagtgtggaattggaaaggaatttcggatgtggattttcacctgaggtttccctgcatccctgcagtgccaaagccccaccttcagggaccacctggaatgtgtgaggggctaacagcacagtaacgtgcatacatatctgcagggttggaatgggagctttaaaggtggtagtgatttgtattttggaagaatcatgttgcctttttgttaaataaaatctgtacttcaatgtttatcatattatcaaacatatactaacaaatacacaccactcctacttcatcgtaaattccgcctatctttataaaaatttaaaactaaaaaaattgtgggnnnnnnnnnnnnnnnnnnnnnncttttttgcgcccgccctatttatttattgttc

SEQ ID NO: 30203 - DNA, 629 bp, Macaca Mulatta
  misc_feature (1)...(629): n = A,T,C or G
gtgactgaagccatactattttatagaattaatggaaagcagaaaagacatcacaaacgaagaagaactttggaaaatgaagcctaggagaaatttagaagaagatgattatttgnnnnnnnnnnnnnnnnnnnnnnnnnnnnnnnnnnnnnnnnnnnnnnnnnnnnnnnnnnnnnnnnnnnnnnnnnnnnnnnnnnnnnnnnnnnnnnnnnnnnnnnnnnnnnnnnnnnnnnnnnnnnnnnnnnnnnnnnnnnnnnnnnnnnnnnnnnnnnnnnnnnnnnnnnnnnnnnnnnnnnnnnnnnnnnnnnnnnnnnnnnnnnnnnnnnnnnnnnnnnnnnnnnnnnnnnnnnnnnnnnnnnnnnnnnnnnnnnnnnnnnnnnnnnngccaatggtttccatcactctcttggcattggtttacctgccaggtgtgatagcagcaattgtccaacttcataatggaaccaagtataagaagtttccacattggttggataagtggatgttaacaagaaagcagtttgggcttctcagtttcttttttgctgtactgcatgcaatttatagtctgtcttacccaatgaggcgatcctacagatacaagttgctaaactgggcatatcaacagg

SEQ ID NO: 30204 - DNA, 767 bp, Macaca Mulatta
  misc_feature (1)...(767): n = A,T,C or G
gggcaaaaactaacattgaaattttgaaacagcagcagagtgagtggattttattttttgttattgttggtggtttaaaaaaattccccccatgtaattgtgaacacctgctttgtggtcactgtaacatttggggggtgggacagggaggaaaagtaacaatagtccacatgtccctggcatctgttcagagcagtgtgcagaatgtaatgctcttttgtaagaaacgttttatgatttttaaaataaatttagtgaacctatttttggtggnnnnnnnnnnnnnnnnnncagtcattttaaaatggtggctgaatttcccaacccacccccaaactaaacactaagtttgattttcagctcctctgttggacatataagtgcatctcttgttggacataggcaaaataacttggcaaacttagttctggtgatttcttgatggtttggaagtctattgctgggaagaaattccatcatacatattcatgcttataataagctggggattttttgtttttgcaaatgcttgcccctacttttcaacattttctatgttagtagttgtgaagaactaaggtggggagcagtactacaagttgagtaatggtattagtatataccagaattctgattggcagaagttttattaatcggaataacacttggttatggaagtgactaatgctgaaaaaattgattatttttattagataattttctcacctatagacttatactgtcaacttgctctaagtgtcttatta

SEQ ID NO: 30205 - DNA, 552 bp, Macaca Mulatta
  misc_feature (1)...(552): n = A,T,C or G
cagatcgagttttggttcgggttagagacttgacaatacaaaaagctgatgaagttgtttgggtccgtgcaagagttcatacaagcagagctaaagnnnnnnnnnnnnnnnnnnnnnnnnnnnnnnnnnnnnnnnnnnnnnnnnnnnnnnnnnnnnnnnnnnnnnnnnnnnnnnnnnnnnnnnnnnnnnnnnnnnnnnatcaacaaagagagcattgtggatgtagaaggtgttgtgagaaaagtgaatcagaaaattggaagctgtacacagcaagatgttgagttacatgttcagaagnnnnnnnnnnnnnnnnnnnnnnnnnnnnnnnnnnnnnnnnnnnnnnnnnnnnnnnnnnnnnnnnnnnnnnnnnnnnnnnnnnnnnnnnnnnnnnnnnnnnnnnnnnnnnnnnnnnnnnnnnnnnnnnnnnnnnnnnnnnngacatcaactagtcaggcagtcttccgtctccagtctggcatctgccatctcttccgagaaactttaattaacaaaggttttgtggaaatccaaactcctaaaattatntca

SEQ ID NO: 30206 - DNA, 606 bp, Macaca Mulatta
tgacagctatttgatgaaaaataaattgttttagatattagaactttgatgtttaatgctctcaatttagaactctgaacttggaacaaagtgctgtggtttataagacctcattggggaggagtgggttaattttagtaatcagtacaatgatttagacactaagatttcattttataaaattatggataaatttggcttgtaatgttctctctttccatttgaagtctctccattattatattcctctatgtaaactacattcaaataacaaccttaaacacagatcaatattgaatatttaaaaaccagttgaaaacttcattaaaatcagcttatttgaattaacaatggtttctccctacagaaggaccctatgagcaaccaactgcccatgttatgtgtcattttctaatacttaaaaaaaatccattaaaaacatacaaagtattagggcagcattactcacttttctcaaagttctcattaaccttgaaaaaagataccaaaaaaaaaaggtattttaatgactctatcaccaatagctacatggatgtggtaagaagtgatgtgtctgtttataataacagtgtacacatttttcta

SEQ ID NO: 30207 - DNA, 704 bp, Macaca Mulatta
  misc_feature (1)...(704): n = A,T,C or G
cctgggggtgatcttgaagactctgagaaggaagatgatgaagccggtggtgatgaagctatcattcttgatagtataaaaatggacactggagtagaagtctctgatattggaagccaaggtaggtgacactttgtggcacacttattactatatattacatatatgtagtattttatatatacaataatgcataaaatgtgtatattaatttatattatcactatatatagtaatatatagcatatcagctatatagagatgtatactagataaataacatacaggatactatatagagagaatatagatatatagttaaatatagggatataagtattgcatttttagaggggctaaatattgtgatttaaatttcaactaaattattgtggctaactgcagtactaacacgacttgctaaaagaatatgcatatctttgtagagtagtggtacactttggcataaaatgatagtgacattttnnnnnnnnnnnnnnnnnnnnnnntaatgtatttgggtgggttttaagggaatgagtttctggaagatcttattcctccgtgctgtctttttttgtggtttctagactgaaacaaaaagcccatcctttatcggaacatgtaatactgtctaaataaactttctgggatagacacattacactggtatagcagccactagcgcccacngtggctactga

SEQ ID NO: 30208 - DNA, 812 bp, Macaca Mulatta
ggggacacttcctggtgggatccgagtgaggcagcggggtagggggaggcgctcaggcggtgaccatggcgtatcaaggcctcacggtgcctctcattgtgatgagcgtgttctggggctttgtcggcttcttggtgccttggttcatccctaagggtcctaaccggggagttatcattaccatgttggtgacctgttcggtttgctgctatctcttttggctgattgcaattctggcccaactcaaccctctctttggaccacaattgaaaaatgaaaccatctggtatctgaagtatcattggccttgaggaagaagacatgctctacagtgctcagtctttgaggtcgcgagaagagaatgccttctagatgcaaaatcacctccaaacctgctacctttcttgacttgcctgttttggccatcagctgccttaaacgttaacagcacatttgaatgccttattctacaatgcagcgtgttttacttcgccttttttacactttggtgaattacgtgcctacgtaacctgaactgtgccgactccacaagacgattatgtactcttctaagatagaagatgctgttcttctgagagatacattactctctccttggaatctgtggatttgaagatggctcctgccttctcacatgggaatcagtgaagtgttggagaaactgctgcaagacaaacaagactccagtggggtggtcagtaggagagcacgttcagagggaagagccatctcaacagaattacgcccaaacttactttcaggatgaatttcttatttctgccatcttttgg

SEQ ID NO: 30209 - DNA, 675 bp, Macaca Mulatta
aagcctaccttttataactgggtgtttagtgctaaaccttcagaaccacagagacagtattgtatgaccaaagcatttgatgccaaaatttgacgttaaagtaatgatttgatttcctgccctggttttgaaggtccattttttttcccttttgcattgatttgcttgtttccccctttgaaacacctaaaaatacctttccaaaacattgcaagagcataaatagacaaaaatgaaatagaaagctcttgcatgcttgagtccaccattgggggaaatgacagaaaactggacctgagggcattaggaacatcctacagagttgtgtttttagtgtcgtttgccatggtatttcacagtgaaacattgatactctccacacatcatttacttcatgcattatgtactggtttttgcattttactcacttgataagtctgctgcactggtttcatcagatagacttgctgctactggcttttccattgtagattgggttattttacacacagttcgccaaatgggattactctatatagtcaaattggtgatggacagatgggcagaatgcagaggtacatagatgagctgaggctgatccagctcccctgatattcagagtgttaactttgtagaccctgcacaacctcttggtgctatctagccattacccca

SEQ ID NO: 30210 - DNA, 676 bp, Macaca Mulatta
acaactggaaaagaacctctgggcttgtcgtgttagtatgaattcctaatattgtgctgtggagaagagattaatgggtaggtgcctgggagataaagggaatcaccaccactaatggggaagacttctatagatgtcctcagaggtttgtcagttggtgtcgtcttattcagaatttgattattgtgtttgtaaagtgaataattttgctaaatttgtttgttttatgctgtagagataaagggccagaagtttcattttcatagcttgttagtttactttgatatttgagagtgttaagtggtataagaaatcacggatgcaagaggtatcatctttttagtctctttttctctttagtgaggactcttgtgaagatatgagttgtggacgaggagagtctcagcagctctcctcccagtgatcaagagtgcaccttctttttcaacttcaaagtggcacaaacactgtgctttccatcttagaaatctgattattctgtcagaatttatatgtacaggtttcaaagcaataaatgggggaataggtagttttctggtttagcccccatctagtcaggaattacatatactggaatacctaccttctatttgttattcagatcagatctggcctattttcttatttatcctaagccatcaaatgaggtagtgcc

SEQ ID NO: 30211 - DNA, 261 bp, Macaca Mulatta
  misc_feature (1)...(261): n = A,T,C or G
agtttcctgtgggccgcattcacagacacttgaagactcgcaccacaagccatggaagggtgggtgccactgctgccgtgtacagtgctgcgattctggagtacctcactgcagaggtnctnnnnnnnaggtgctggagctggcaggtaatgcttctaaggatctcaaagtaaagcgtatcactccgcgtcacttgcagcttgcaatccgtggtgatgaagagttggattctcttatcaaggctaccatagctgggggtgg

SEQ ID NO: 30212 - DNA, 679 bp, Macaca Mulatta
cctgtgtgagaagttgctctgtgcctgtgaccagacggcagctgagtgcatggcctctgcctcctttaaccaaagtctcaagtccccaagcagactcgggtgccctgggcaaccagagacctgtcaagacagcctgcaccatgtgcctgcagcccccaccctgggctccagctctgaggaggacagccaggaggaccctccccaggaggaccttggcagagccaagaggtttctgcagaagtcactgggtccgttggggaccaggcccctccatggaagatagatgcccagagaaaatggtgaacaccctcagtagcgcagctcctgctccaacttcagctctttagctctcagcctcctctgtcccttggagccttcttcccttcctttaacccagaggccaggagggaacagaggccgtgagctctgcccatgcaccatcagctgtggtcatctcacaagccaatgtgcatttggagaaggcagaccacggtacctctatactcctttagtgcactgtggaagctcaataaatactccaatcaacgtgctctgatagttttgcttttaagacatgtttagatactgtctcatgagtagattataaaagtggagatagagacaatgaaggaaaaaatatctcaactccctaatcacagaaagctacttctccttttct

SEQ ID NO: 30213 - DNA, 720 bp, Macaca Mulatta
  misc_feature (1)...(720): n = A,T,C or G
gggctagccaaaatatttttgtcctgaataacgtcactgggccaaaagatagatcagtaccgcagcctttagtttcctgaaatcaccaggtcaggcacaaggagaagagaggttcctggatactgactaacttgggtgggcctagccaggagaaagacagtaacatgtgttctgtactttctgagtcgcccatctgttgctggagtgggaatggattgctgaaggagagggagctttgctctctctaggtgggcaagtttcctgggctctctgtgttgcctccctctggcttcttcctcccgtgccctctccccgtgtgccccagggggatcagggatcctcaccctcctgaggcccagtgcggaagaatgaacatggctgcgtccaggttaactgaagctgccatttgcccagccttttccatcccagccctgtcagtgagccctggtctggtgcaactgctgcaggatgcctgtagtagggaactctggaagtgtactggtctgaggtgggattttccctccccacagtgcactgagcaacaaanggtggtgaggggtgagggagccatgctgctgaattctggttggcattcccccattatgtaaagtggggtgttggcgtggggcagactctgcttgggtttggttgtaagataaaacctggaggagaagcacagtttgtccccattgaattatttggagcaaaaaactactgtta

SEQ ID NO: 30214 - DNA, 738 bp, Macaca Mulatta
  misc_feature (1)...(738): n = A,T,C or G
ggcggcagaggatcctgtgacagcacgtggaggctcccacaggctctcccacaggtaccatgaaggtctccgtggctgccctcgctgtcatcctcgttgctacagccctctgcgctcctgcatctgcctccccacatgcctcagacaccacaccctgctgctttgcctacattgcccgcccactgccccgtgcccacatcaaggagtatttctacaccagtggcaagtgctccaacccagcagtcgtctttgtcacccgaaagaatcgccaagtgtgtgccaacccagagaagaaatgggttcgggagtacatcaactctttggagatgagctaggatggagagcccttgaacctgaacttacacaaattcgcctgtttctgcttgctcttgtcctagcttgggaggcttcccctcactatcctaacccaacccctccttgaagggcccagattctaacacacagcagcagttataaaaacctttcccaggctggatgtggtggcgcatgcctgtgatcccaacactttgggagaccannnnnnnnnnnnnnnnnnnnnnnnnnnnnnnnnnnnnnnnnnnnnnnnnnnnatgaaaacccatctctactgagaatacaccaattaccctggcatggtgggtgcatgcctggtaatcccaaactactcggggaggcgtaaaggcaagaaaaatcctttttgaaagccacagaaaggtgggaaaggcctggccaatggaa

SEQ ID NO: 30215 - DNA, 711 bp, Macaca Mulatta
  misc_feature (1)...(711): n = A,T,C or G
cggcgcgggcccgcagccgggcgccctgctcagccagcgccagcggccgccgcacccaaccgcgccggtgaggatatgggcagccgtggcgcgcccgccccgcgcgccggnnnnnnnnnnnnnnnnnnnnnnnnnnnnnnnnnnnnnnnnnnnnnnnnnnnnnnnnnnnnnnnnnnnnnnnnnnnnnnnnnnnnnnnnnnnnnnnnnnnnnnnnnnnnnnnnnnnnnnnnnnnnnnnnnnnnnnnnnnnnnnnnnnnnnnnnnnnnnnnnnnnnnnnnnnnnnnnnnnnnnnnnnnnnnnnnnnnnnnnnnnnnnnnnnnnnnnnnnnnnnnnnnnnnnnnnnnnnnnnnnnnnnnnnnnnnnnnnnnnnnnnnnnnnnnnnnnnnnnnnnnnnnnnnnnnnnnnnnnnnnnnnnnnnnnnnnnnnnnnnnnnnnnnnnnnnnnnnnnnnnnnnnnnnnnnnnnnnnnnnnnnnnnnnnnnnnnnnnnnnnnnnnnnnnnnnnnnnnnnnnnnnnnnnnnnnnnnnnnnnnnnnnnnnnnnnnnnnnnnnnnnnnnnnnnnnnnnnnnnnnnnnnnnnnnnnnnnnnnnnnnnnnnnnagatgtgatgccagcatagccagactttctgcagagcacaaaacgacctatgaggggctccagcactgaacaaagggcagcaggctgccaaacttatcctgaaacgaaaatca

SEQ ID NO: 30216 - DNA, 170 bp, Macaca Mulatta
gcagaccaattagaagttatctgggactgcacattttcagtcagccaacataaagactgaagattatttgtgttcatttattgcatggcagtgctgtgaagagactgcattcagtgactgagcccagatccttgaggtgaccctggtttatgtgtttcagcatcttccat

SEQ ID NO: 30217 - DNA, 95 bp, Macaca Mulatta
atgatctattacagactgtacagagcacatctggattagctattattctttttattaagactatgtttcacccatctgaaaagattcctcatttg

SEQ ID NO: 30218 - DNA, 800 bp, Macaca Mulatta
aagcctccccttgccatcttagctgtgggggaccccttttccaccctctccctgagcacaggctgatggaggtggttcacatcctctggaacatagcccagacaggagaagagagagcacttccttcccagagctctgagctctccaggccactgtctgggcttccctttcttgaggaccctgtgttcctggcaggtcacttgcttgtggtgtttgtttctttttcatctccccccacccacaaagagcacgcagccagccttccactttcccaggggggcttgctactgaggaggaggaagaaacgaagactgattgcccacgctaggcactcgcggtccctggcaggcgctgggatgggggcttatggggtggcaccgtctccgggccctcctttcccccttcacctgtttttggatctgtggttcctttaaaggccagaaccatggattggcttccttacccagcacccctccggcaggtgggtggccacgtggatgcctcgctggggcggtcttggaggcctggtctctgcctcgacgggagatccccgatcactggcattcaccccctgcaaaaatcggggcgacaatagctcgccgcctacttgctgcagggagatgaaaggctttgcagaaagctttgagctccgtgggggagcgcactagagaaccaaaaatgtgattatccggtgatataaaaatccctttcctctgtgtttaccgccacctgtcttcctgtagacttttgttctgtccctggggtgtgtgagttcctaccccaaactgaagcagggagtg

SEQ ID NO: 30219 - DNA, 6590 bp, Macaca Mulatta
  misc_feature (1)...(6590): n = A,T,C or G
gtgtgtggctgtgacctggcacaaggaggcttcttcataaagaacggagagtatctctgcaccctggactaccagcggatgtacgggacacgctgccatggctgtggggagttcgtggagggcgaagtggtgaccgctctgggcaagacctaccatcccaattgctttgcttgtaccatctgcaagnnnnnnnnnnnnnnnnnnnnnnnnnnnnnnnnnnnnnnnnnnnnnnnnnnnnnnnnnnnnnnnnnnnnnnnnnnnnnnnnnnnnnnnnnnnnnnnnnnnnnnnnnnnnnnnnnnnnnnnnnnnnnnnnnnnnnnnnnnnnnnnnnnnnnnnnnnnnnnnnnnnnnnnnnnnnnnnnnnnnnnnnnnnnnnnnnnnnnnnnnnnnnnnnnnnnnnnnnnnnnnnnnnnnnnnnnnnnnnnnnnnnnnnnnnnnnnnnnnnnnnnnnnnnnnnnnnnnnnnnnnnnnnnnnnnnnnnnnnnnnnnnnnnnnnnnnnnnnnnnnnnnnnnnnnnnnnnnnnnnnnnnnnnnnnnnnnnnnnnnnnnnnnnnnnnnnnnnnnnnnnnnnnnnnnnnnnnnnnnnnnnnnnnnnnnnnnnnnnnnnnnnnnnnnnnnnnnnnnnnnnnnnnnnnnnnnnnnnnnnnnnnnnnnnnnnnnnnnnnnnnnnnnnnnnnnnnnnnnnnnnnnnnnnnnnnnnnnnnnnnnnnnnnnnnnnnnnnnnnnnnnnnnnnnnnnnnnnnnnnnnnnnnnnnnnnnnnnnnnnnnnnnnnnnnnnnnnnnnnnnnnnnnnnnnnnnnnnnnnnnnnnnnnnnnnnnnnnnnnnnnnnnnnnnnnnnnnnnnnnnnnnnnnnnnnnnnnnnnnnnnnnnnnnnnnnnnnnnnnnnnnnnnnnngtctccaaggactttgtctcctactccatcagcagaagnnnnnnnnnnnnnnnnnnnnnnnnnnnnnnnnnnnnnnnnnnnnnnnnnnnnnnnnnnnnnnnnnnnnnnnnnnnnnnnnnnnnnnnnnnnnnnnnnnnnnnnnnnnnnnnnnnnnnnnnnnnnnnnnnnnnnnnnnnnnnnnnnnnnnnnnnnnnnnnnnnnnnnnnnnnnnnnnnnnnnnnnnnnnnnnnnnnnnnnnnnnnnnnnnnnnnnnnnnnnnnnnnnnnnnnnnnnnnnnnnnnnnnnnnnnnnnnnnnnnnnnnnnnnnnnnnnnnnnnnnnnnnnnnnnnnnnnnnnnnnnnnnnnnnnnnnnnnnnnnnnnnnnnnnnnnnnnnnnnnnnnnnnnnnnnnnnnnnnnnnnnnnnnnnnnnnnnnnnnnnnnnnnnnnnnnnnnnnnnnnnnnnnnnnnnnnnnnnnnnnnnnnnnnnnnnnnnnnnnnnnnnnnnnnnnnnnnnnnnnnnnnnnnnnnnnnnnnnnnnnnnnnnnnnnnnnnnnnnnnnnnnnnnnnnnnnnnnnnnnnnnnnnnnnnnnnnnnnnnnnnnnnnnnnnnnnnnnnnnnnnnnnnnnnnnnnnnnnnnnnnnnnnnnnnnnnnnnnnnnnnnnnnnnnnnnnnnnnnnnnnnnnnnnnnnnnnnnnnnnnnnnnnnnnnnnnnnnnnnnnnnnnnnnnnnnnnnnnnnnnnnnnnnnnnnnnnnnnnnnnnnnnnnnnnnnnnnnnnnnnnnnnnnnnnnnnnnnnnnnnnnnnnnnnnnnnnnnnnnnnnnnnnnnnnnnnnnnnnnnnnnnnnnnnnnnnnnnnnnnnnnnnnnnnnnnnnnnnnnnnnnnnnnnnnnnnnnnnnnnnnnnnnnnnnnnnnnnnnnnnnnnnnnnnnnnnnnnnnnnnnnnnnnnnnnnnnnnnnnnnnnnnnnnnnnnnnnnnnnnnnnnnnnnnnnnnnnnnnnnnnnnnnnnnnnnnnnnnnnnnnnnnnnnnnnnnnnnnnnnnnnnnnnnnnnnnnnnnnnnnnnnnnnnnnnnnnnnnnnnnnnnnnnnnnnnnnnnnnnnnnnnnnnnnnnnnnnnnnnnnnnnnnnnnnnnnnnnnnnnnnnnnnnnnnnnnnnnnnnnnnnnnnnnnnnnnnnnnnnnnnnnnnnnnnnnnnnnnnnnnnnnnnnnnnnnnnnnnnnnnnnnnnnnnnnnnnnnnnnnnnnnnnnnnnnnnnnnnnnnnnnnnnnnnnnnnnnnnnnnnnnnnnnnnnnnnnnnnnnnnnnnnnnnnnnnnnnnnnnnnnnnnnnnnnnnnnnnnnnnnnnnnnnnnnnnnnnnnnnnnnnnnnnnnnnnnnnnnnnnnnnnnnnnnnnnnnnnnnnnnnnnnnnnnnnnnnnnnnnnnnnnnnnnnnnnnnnnnnnnnnnnnnnnnnnnnnnnnnnnnnnnnnnnnnnnnnnnnnnnnnnnnnnnnnnnnnnnnnnnnnnnnnnnnnnnnnnnnnnnnnnnnnnnnnnnnnnnnnnnnnnnnnnnnnnnnnnnnnnnnnnnnnnnnnnnnnnnnnnnnnnnnnnnnnnnnnnnnnnnnnnnnnnnnnnnnnnnnnnnnnnnnnnnnnnnnnnnnnnnnnnnnnnnnnnnnnnnnnnnnnnnnnnnnnnnnnnnnnnnnnnnnnnnnnnnnnnnnnnnnnnnnnnnnnnnnnnnnnnnnnnnnnnnnnnnnnnnnnnnnnnnnnnnnnnnnnnnnnnnnnnnnnnnnnnnnnnnnnnnnnnnnnnnnnnnnnnnnnnnnnnnnnnnnnnnnnnnnnnnnnnnnnnnnnnnnnnnnnnnnnnnnnnnnnnnnnnnnnnnnnnnnnnnnnnnnnnnnnnnnnnnnnnnnnnnnnnnnnnnnnnnnnnnnnnnnnnnnnnnnnnnnnnnnnnnnnnnnnnnnnnnnnnnnnnnnnnnnnnnnnnnnnnnnnnnnnnnnnnnnnnnnnnnnnnnnnnnnnnnnnnnnnnnnnnnnnnnnnnnnnnnnnnnnnnnnnnnnnnnnnnnnnnnnnnnnnnnnnnnnnnnnnnnnnnnnnnnnnnnnnnnnnnnnnnnnnnnnnnnnnnnnnnnnnnnnnnnnnnnnnnnnnnnnnnnnnnnnnnnnnnnnnnnnnnnnnnnnnnnnnnnnnnnnnnnnnnnnnnnnnnnnnnnnnnnnnnnnnnnnnnnnnnnnnnnnnnnnnnnnnnnnnnnnnnnnnnnnnnnnnnnnnnnnnnnnnnnnnnnnnnnnnnnnnnnnnnnnnnnnnnnnnnnnnnnnnnnnnnnnnnnnnnnnnnnnnnnnnnnnnnnnnnnnnnnnnnnnnnnnnnnnnnnnnnnnnnnnnnnnnnnnnnnnnnnnnnnnnnnnnnnnnnnnnnnnnnnnnnnnnnnnnnnnnnnnnnnnnnnnnnnnnnnnnnnnnnnnnnnnnnnnnnnnnnnnnnnnnnnnnnnnnnnnnnnnnnnnnnnnnnnnnnnnnnnnnnnnnnnnnnnnnnnnnnnnnnnnnnnnnnnnnnnnnnnnnnnnnnnnnnnnnnnnnnnnnnnnnnnnnnnnnnnnnnnnnnnnnnnnnnnnnnnnnnnnnnnnnnnnnnnnnnnnnnnnnnnnnnnnnnnnnnnnnnnnnnnnnnnnnnnnnnnnnnnnnnnnnnnnnnnnnnnnnnnnnnnnnnnnnnnnnnnnnnnnnnnnnnnnnnnnnnnnnnnnnnnnnnnnnnnnnnnnnnnnnnnnnnnnnnnnnnnnnnnnnnnnnnnnnnnnnnnnnnnnnnnnnnnnnnnnnnnnnnnnnnnnnnnnnnnnnnnnnnnnnnnnnnnnnnnnnnnnnnnnnnnnnnnnnnnnnnnnnnnnnnnnnnnnnnnnnnnnnnnnnnnnnnnnnnnnnnnnnnnnnnnnnnnnnnnnnnnnnnnnnnnnnnnnnnnnnnnnnnnnnnnnnnnnnnnnnnnnnnnnnnnnnnnnnnnnnnnnnnnnnnnnnnnnnnnnnnnnnnnnnnnnnnnnnnnnnnnnnnnnnnnnnnnnnnnnnnnnnnnnnnnnnnnnnnnnnnnnnnnnnnnnnnnnnnnnnnnnnnnnnnnnnnnnnnnnnnnnnnnnnnnnnnnnnnnnnnnnnnnnnnnnnnnnnnnnnnnnnnnnnnnnnnnnnnnnnnnnnnnnnnnnnnnnnnnnnnnnnnnnnnnnnnnnnnnnnnnnnnnnnnnnnnnnnnnnnnnnnnnnnnnnnnnnnnnnnnnnnnnnnnnnnnnnnnnnnnnnnnnnnnnnnnnnnnnnnnnnnnnnnnnnnnnnnnnnnnnnnnnnnnnnnnnnnnnnnnnnnnnnnnnnnnnnnnnnnnnnnnnnnnnnnnnnnnnnnnnnnnnnnnnnnnnnnnnnnnnnnnnnnnnnnnnnnnnnnnnnnnnnnnnnnnnnnnnnnnnnnnnnnnnnnnnnnnnnnnnnnnnnnnnnnnnnnnnnnnnnnnnnnnnnnnnnnnnnnnnnnnnnnnnnnnnnnnnnnnnnnnnnnnnnnnnnnnnnnnnnnnnnnnnnnnnnnnnnnnnnnnnnnnnnnnnnnnnnnnnnnnnnnnnnnnnnnnnnnnnnnnnnnnnnnnnnnnnnnnnnnnnnnnnnnnnnnnnnnnnnnnnnnnnnnnnnnnnnnnnnnnnnnnnnnnnnnnnnnnnnnnnnnnnnnnnnnnnnnnnnnnnnnnnnnnnnnnnnnnnnnnnnnnnnnnnnnnnnnnnnnnnnnnnnnnnnnnnnnnnnnnnnnnnnnnnnnnnnnnnnnnnnnnnnnnnnnnnnnnnnnnnnnnnnntcagttctgcactccaacttgagaagaaaaaacgtttctttccatatcaagtccaatatgagttcatttgaactgcaccttgcagaaatgcattgccagaaagcaccagtagcctcctgtctgcaagcagaataatgctgtgctctggggaggggtcattggaaaccataatgcagagtgggccccctactccatttcccagcagaaggctccagctggagggatgggtcatggggcaacctggttcttgctaactgccagatcgaatgtgtgggctagaatgcctgtccatttggttaaaccaggctcagcatgtttgccctcaaaatgtccatccaggtcacagcacacaagatgggtattggtctgctttcaccccaccctgtactacacatgaaaatttcaattattaacacactcaaactaatggagcttgttcaccctaggaaggggattatatatatggcaggctgccctggtgcctatgtaaagggctacattttggaacatatgacttccttgggactcttaagtgcatactgatggcatgaagtaaaaggggcctctatgatgataggaaaatcagttcttttaaaatttcttcaagaaagtccaggctatcacatagtctttctgtgtgacttattaggagataggaagagcattgggaaacttgcacagctagctatgcatctacattnnnnnnnnnnnnnnnnnnnnnnnnnnnnnnnnnnnnnnnnnnnnnnnnnnnnnnnnnnnnnnnnnnnnnnnnnnnnnnnnnnnnnnnnnnnnnnnnnnnnnnnnnnnnnnnnnnnnnnnnnnnnnnnnnnnnnnnnnnnnnnnnnnnnnnnnnnnnnnnnnnnnnnnnnnnnnnnnnnnnnnnnnnnnnnnnnnnnnnnnnnnnnnnnnnnnnnnnnnnnnnnnnnnnnnnnnnnnnnnnnnnnnnnnnnnnnnnnnnnnnnnnnnnnnnnnnnnnnnnnnnnnnnnnnnnnnnnnnnnnnnnnnnnnnnnnnnnnnnnnnnnnnnnnnnnnnnnnnnnnnnnnnnnnnnnnnnnnnnnnnnnnnnnnnnnnnnnnnnnnnnnnnnnnnnnnnnnnnnnnnnnnnnnnnnnnnnnnnnnnnnnnnnnnnnnnnnnnnnnnnnnnnnnnnnnnnnnnnnnnnnnnnnnnnnnnnnnnnnnnnnnnnnnnnnnnnnnnnnnnnnnnnnnnnnnnnnnnnnnnnnnnnnnacagaaccctttttcctgactgtcatggaagatggtagaaggaaaatggactgtctcatcaatactcctgtgtcctctgaagcaatctcagtttttattaaccacctcttctgtgtttcgggtagctatttaatctgtatttaatctgtacttcttatgccagcctcgattttatttgatttttaaaattagtctcttctaaccaatgaagtgtttgtcagtatgccccaaagcttgctcttttgtgcccccttttgaataactttctatccagaaaaagagattatttgggacttgagatctgcagtgataccaacttatagcaatgatgtactttaagggaactacccactatgttgtgataggagaaagagaaaccttcactttgnnnnnnnnnnnaatcgctgtttatttttccgtttgctgcccaggaagcagtgggaggtggtgacagatacgctttgcatatggattgttatgttttttatttgggcaagtttaatcatggaaaactcaaaaagaaagggggaaatggtcagtttaagccaaaagaaactttctaaacaatgtatatgtacacggcaaaattaaacaaatccaacaatttctgaagcttagtgtaattgagtggtggttgttactcaataaaattatcccaaaagtgtttctcctaagagtgaagttcccatgagtcacttccgtgaacccattg

SEQ ID NO: 30220 - DNA, 223 bp, Macaca Mulatta
agaagctgatggcgttccagccagcccccaaagtgattcgctgcatgaccaacacacctgtggtagtgcgggaaggcgctacagtgtacgccatgggcacccatgctctggtggaggatgggcagctcctggagcaactcatgagcagcgtgggcttctgcactgaggtggaagaggacctcatcgatgccgtcacggggctcagtggcagcgggcctgccta

SEQ ID NO: 30221 - DNA, 789 bp, Macaca Mulatta
aggcggttgcggttgctccggccaggtcgggtaggggtgctgttgccgtcatggctgaccccgactcccggtacccttgctcctcgatcgaggacgacttcaactatggcagcagcgtggcctccgccagcgtgcacatccgaatggcctttctaagaaaagtctacagcattctttctctgcaagttctcttaactacagtgacttcaacagtttttttatactttgagtctatacggacatttgtacatgagagtcctgccttaattttgctgtttgccctcggatctctgggtttgatttttgcattgactttaaacagacataagtatccccttaacctgtacctactttttggatttacgctgttggaagctctgactgtggcagttgttgttactttctatgatgtatatattattctgcaagctttcatactgactactacagtattttttggtttgactgtgtatactctacaatctaagagggatttcagcaaatttggcgctgggctctttgctcttttgtggatattgtgcctgtcaggattcttgaagttatttttttatagtgagacaatggagttggtcttagctgctgcgggagcccttcttttctgtggattcatcatctatgacacacactcactgatgcataaactgtcacctgaagagtacgtatttagctggccatcagccctctaactttgggatattcatcaatcctatttcctgccaccctggttacgggttttctgggaaaaccagtttaataaaaaaagtaaaa

SEQ ID NO: 30222 - DNA, 1434 bp, Macaca Mulatta
  misc_feature (1)...(1434): n = A,T,C or G
tggtcctgacccttcggcgaatcctttccacttgtctggggatgtggatttcttcttgctcagagatcaggagcggaataaggctctctccnnnnnnnnnnnnnnnnnnnnnnnnnnnnnnnnnnnnnnnnnnnnnnnnnnnnnnnnnnnnnnnnnnnnnnnnnnnnnnnnnnnnnnnnnnnnnnnnnnnnnnnnnnnnnnnnnnnnnnnnnnnnnnnnnnnnnnnnnnnnnnnnnnnnnnnnnnnnnnnnnnnnnnnnnnnnnnnnnnnnnnnnnnnnnngaaaagaatgtggagcctgagaacatgagtggctaccttaagcagaagcggcaaatgttcctcctccagnnnnnnnnnnnnnnnnnnnnnnnnnnnnnnnnnnnnnnnnnnnnnnnnnnnnnnnnnnnnnnnnnnnnnnnnnnnnnnnnnnnnnnnnnnnnnnnnnnnnnnnnnnnnnnnnnnnnnnnnnnnnnnnnnnnnnnnnnnnnnnnnnnnnnnnnnnnnnnnnnnnnnnnnnnnnnnnnnnnnnnnnnnnnnnnnnnnnnnnnnnnnnnnnnnnnnnnnnnnnnnnnnnnnnnnnnnnnnnnnnnnagtgagatctccagatttgaagacactctgcagcattacaaggtctacaaggatttcctatacaagctgtcgcccaaggagtggcttgaagaacaggaaaagaaacacttgtttctcaaaaacgccaaggagatctccgaggcttccaaagacggcagtgttaactccacaccaggggacaaagnnnnnnnnnnnnnnnnnnnnnnnnnnnnnnnnnnnnnnnnnnnnnnnnnnnnnnnnnnnnnnnnnnnnnnnnnnnnnnnnnnnnnnnnnnnnnnnnnnnnnnnnnnnnnnnnnnnnnnnnnnnnnnnnnnnnnnnnnnnnnnnnnnnnnnnnnnnnnnnnnnnnnnnnnnnnnnnnnnnnnnnnnnnnnnnnnnnnnnnnnnnnnnnnnnnnnnnnnnnnnnnnnnnnnnnnnnnnnnnnnnnnnnnnnnnnnnnnnnnnnnnnnnnnnnnnnnnnnnnnnnnnnnnnnnnnnnnnnnnnnnnnnnnnnnnnnnnnnnnnnnnnnnnnnnnnnnnnnnnnnnnnnnnnnnnnnnnnnnnnnnnnnnnnnnnnnnnnnnnnnnnnnnnnnnnnnnnnnnnnnnnnnnnnnnnnnnnnnnnnnnnnnnnnnnnnnnnnnnnnnnnnnnnnnnnnnnnnnnnnnnnnnnnnnnnnnnnnnnnnnnnnnnnnnnnnnnnnnnnnnnnnncaggataagctgctagagagcctgaactggaaggtgctggacgtgtatcggaactgcatcggcacccagcaggaggccaacctgggcaccgtgcagatgctgaccatcattgagcaccagctggatgagctgctagagaacctggagcgcgt

SEQ ID NO: 30223 - DNA, 1404 bp, Macaca Mulatta
  misc_feature (1)...(1404): n = A,T,C or G
ttttaatctagacaacgagcaaccagattatgatatggattcagaagatgagactttattaaatagacttaacagaaagatggaaattaagcctttgcaatttgaaattatgattgacagacttgaaaaagccagttctaatcagnnnnnnnnnnnnnnnnnnnnnnnnnnnnnnnnnnnnnnnnnnnnnnnnnnnnnnnnnnnnnnnnnnnnnnnnnnnnnnnnnnnnnnnnnnnnnnnnnnnnnnnnnnnnnnnnnnnnnnnnnnnnnnnnnnnnnnnnnnnnnnnnnnnnnnnnnnnnnnnnnnnnnnnnnnnnnnnnnnnnnnnnnnnnnnnnnnnnnnnnnnnnnnnnnnnnnnnnnnnnnnnnnnnnnnnnnnnnnnnnnnnnnnnnnnnnnnnnnnnnnnnnnnnnnnnnnnnnnnnnnnnnnnnnnnnnnnnnnnnnnnnnnnnnnnnnnnnnnnnnnnnnnnnnnnnnnnnnnnnnnnnnnnnnnnnnnnnnnnnnnnnnnnnnnnnnnnnnnnnnnnnnnnnnnnnnnnnnnnnnnnnnnnnnnnnnnnnnnnnnnnnnnnnnnnnnnnnnnnnnnnnnnnnnnnnnnnnnnnnnnnnnnnnnnnnnnnnnnnnnnnnnnnnnnnnnnnnnnnnnnnnnnnnnnnnnnnnnnnnnnnnnnnnnnnnnnnnnnnnnnnnnnnnnnnnnnnnnnnnnnnnnnnnnnnnnnnnnnnnnnnnnnnnnnnnnnnnnnnnnnnnnnnnnnnnnnnnnnnnnnnnnnnnnnnnnnnnnnnnnnnnnnnnnnnnnnnnnnnnnnnnnnnnnnnnnnnnnnnnnnnnnnnnnnnnnnnnnnnnnnnnnnnnnnnnnnnnnnnnnnnnnnnnnnnnnnnnnnnnnnnnnggcgggcaggatgccagtattatgctnnnnnnnnnnnnnnnnnnnnnnnnnnnnnnnnnnnnnnnnnnnnnnnnnnnnnnnnnnnnnnnnnnnnnnnnnnnnnnnnnnnnnnnnnnnnnnnnnnnnnnnnnnnnnnnnnnnnnnnnnnnnnnnnnnnnnnnnnnnnnnnnagggtcataatggaccgaatatccacagaacatgacccagtcctaaaacagatagaccctgaaatgctgaatagtttttcaagctcttcccaaactatagacttttcttctaatttctctcggaccaatgcttccagtaaacattgtgaaaatagactgtccctttctgaaatattaagcaatatcagatcatgtcgactacagtgtttccagccaaggctactaaatttacaggacagtgatagtgaagaatgtacctcaagaaaaccagggcagactgtgaacaataaaagagtttctgcagcatctgtagctttattgaacaccagcaagaatggcatatca

SEQ ID NO: 30224 - DNA, 208 bp, Macaca Mulatta
tgtgtgcgctgcttcacctgcagcaagactgtgggcaacacgtgggaggcctacctggggctgctgcaggccaagtacactgatagggacgccctgcgcctgaagcactacagccactgctgcatgctgctggcccacgtggacctgatccagaagctgctcaattatgccctcctggggaagtgacctcgctggacccacccacctg

SEQ ID NO: 30225 - DNA, 459 bp, Macaca Mulatta
gctcagagggttttgttttcctttctttttttctaagaaaaaattattttcaggagaatattcttctgatagctttcatcattgaacttaataaactgaccttaaaatttcaaatataaaatgttcaaggcttcttactggtgagcacaaggttacgtatttaaaatcacctaatattgagagagaacctgcctataacaccaagacttgaaggtaggctggtgctgtgcacatgagcgagtttatacacaggaaactggagtaacttggaatttctgtgctggagactgtggctacttctggttttcaagcattgtcttttatatgaagtgtgagaaaactgaggtgactagcacattaaaccatctagattctagcctccaggcacactaaatttaagtcttcacaaaaccaggaggcccatattatgatcaggaataaaatgaagtttagccttcg

SEQ ID NO: 30226 - DNA, 1029 bp, Macaca Mulatta
  misc_feature (1)...(1029): n = A,T,C or G
aaaattcgggctgccagcctctgcagaaccaaaagnnnnnnnnnnnnnnnnnnnnnnnnnnnnnnnnnnnnnnnnnnnnnnnnnnnnnnnnnnnnnnnnnnnnnnnnnnnnnnnnnnnaagatgacgagagaattttctataatcgattaacgaagctttttgatgagagcggacaaggagaaccccaagnagatgagagtggccgggaggagaatctgaattccgaagcacctgggagttccaatcagagtcacgaaatccaccaagaagccagcgaagcctcccctgcttaccttgaggagttccaaannnnnnnnnnnnnntaattctgcttgggagttctccactagaacagnnnnnnnnnnnnnnnnnnnnnnnnnnnnnnnnnnnnnnnnnnnnnnnnnnnnnnnnnnnnnnnnnnnnnnnnnnnnnnnnnnnnnnnnnnnnnnnnnnnnnnnnnnnnnnnnnnnnnnnnnnnnnnnnnaggccagactccaaacatctaggaatgaaaaactcccgtaggcgttaagtgtcctgaacattcttatggatttgggnnnnnnnnnnnnnnnnnnnnnnnnnnnnnnnnnnnnnnnnnnnnnnnnnnnnnnnnnnnnnnnnnnnnnnnnnnnnnnnnnnnnnnnnnnnnnnnnnnnnnnnnnnnnnnnnnnnnnnnnnnnnnnnnnnnnnnnnnnnnnnnnnnnnnnnnnnnnnnnnnnnnnnnnnnnnnnnnnnnnnnnnnnnnnnnnnnngttcctgcgtaattcaagaaccccaccttttgtggagaatgagcagcctcaaccacctcagcctctgcaaatctggatcagatgcctgaggggatttaaagacaaggctcctccaggctcttatgtcctcaaagtgtccctgcttggtcgactgggaggctgtgtcttgcagtggcggcaaatggagcaactgaagaccagaacacgctccgtcaggcacaacggaaacttttatgacgtggggctgtatttccacgaaaacctttatgtggt

SEQ ID NO: 30227 - DNA, 765 bp, Macaca Mulatta
  misc_feature (1)...(765): n = A,T,C or G
gggatagttccgcttcctgtccgattctggtatctttgctgagggtgacattgagctgcaagttgcatctggggtgcctttaggattcagcaccatggcggaagaagacattgagaccaaaatcaagaactacaagactgccccttttgacagccgcttccccaaccagaaccagaccaggaactgctggcagaactacctggacttccaccgctgccagaaggcaatgaccactaaaggaggcaatgtctctgtgtgcgaatggtaccagcgtgtgtaccagtccctctgccccacatcctgggtcacagactgggacgagcaacgggctgaaggcacgtttcccgggaagatctgaactggctgtacctccctgtcctctgtcctctgtccttctcccaggatggtgaagggggacctagtacctagtgatccccaccccgggatcctaaatcgtgacttacctgctaataaaaactcgttggaaaagtgaannnnnnnnnnnnnnnnnnnnnnnnnnnananannnnnnnnnnnnnnnnnnnnnnnnnnnnnnnnnnnnnnnnnnnnnnnnncccgcgataacaaccgcccacctcgccaggcatccgagnnnnnnnnnnnnnnnnnnnnnnnnnnnnnnnnnnnnnnnnnnnnnnnnnnnnnnnnnnnnnnnnnnnnnnnnnnnnnnnnnnnnnnnnnnnnnnnnnnnnnnnnnnnnnnnnnnnnnnnnnnnnnnnnnnnnnnnnnnnnnnnnnnnnnnnn

SEQ ID NO: 30228 - DNA, 150 bp, Macaca Mulatta
  misc_feature (1)...(150): n = A,T,C or G
gggtaaaaaccccaaagctgtcatcagcattaaggacttgaatgccaccttccagacagagaagatagggcacccccacgggctgcagatcacctacaggagagatggccacatcaggaacctgtttgtgtatcatgaaagtgggaaggn

SEQ ID NO: 30229 - DNA, 570 bp, Macaca Mulatta
  misc_feature (1)...(570): n = A,T,C or G
atggcccccaaaaagccagagcccaagaaggatgacaaggcggccgccaaggcagctccagctccagctcccgcacctccccctgaacctgagcgccctaaggaggtcgagtttgatgcttccaagatcaannnnnnnnnnnnnnnnnnnnnnnnnnagagttcaaggaagccttcatgctgttcgaccgcacacccaagtgtgagatgaagatcacctacgggcagtgtggggatgtcctgcgggcgctgggccagaaccccacacaggcggaggtgctccgtgtcctggggaagccaaaacaggaanntcaataccaagatgatggactttgaaactttcctgcccatgctccagcacatttccaaaaacaaggacacgggcacctatgaggacttcgtggaggggctacgggtcttcgacaaggagggcaatggcactgtcatgggtgctgagcttcgccacgtgttggccacgctgggtgagnnnnnnggtgagaggctgacagaagacgaagtggagaagttgatggctgggcaagaggactccaacggctgcatcaactacgaa

SEQ ID NO: 30230 - DNA, 2963 bp, Macaca Mulatta
  misc_feature (1)...(2963): n = A,T,C or G
ggagaagacgttggttacgttgccagtgaaataacaatgagcgatgaggagcggattcagctaatgatgatggtcaaggaaaagatgatcacgattgaggaagcacttgcnnnnnnnnnnnnnnnnnnnnnnnnnnnnnnnnnnnnnnnnnnnnnnnnnnnnnnnnnnnnnnnnnnnnnnnnnnnnnnnnnnnnnnnnnnnnnnnnnnnnnnnnnnnnnnnnnnnnnnnnnnnnnnnnnnnnnnnnnnnnnnnnnnnnnnnnnnnnnnnnnnnnnnnnnnnnnnnnnnnnnnnnnnnnnnnnnnnnnnnnnnnnnnnnnnnnnnnnnnnnnnnnnnnnnnnnnnnnnnnnnnnnnnnnnnnnnnnnnnnnnnnnnnnnnnnnnnnnnnnnnnnnnnnnnnnnnnnnnnnnnnnnnnnnnnnnnnnnnnnnnnnnnnnnnnnnnnnnnnnnnnnnnnnnnnnnnnnnnnnnnnnnnnnnnnnnnnnnnnnnnnnnnnnnnnnnnnnnnnnnnnnnnnnnnnnnnnnnnnnnnnnnnnnnnnnnnnnnnnnnnnnnnnnnnnnnnnnnnnnnnnnnnnnnnnnnnnnnnnnnnnnnnnnnnnnnnnnnnnnnnnnnnnnnnnnnnnnnnnnnnnnnnnnnnnnnnnnnnnnnnnnnnnnnnnnnnnnnnnnnnnnnnnnnnnnnnnnnnnnnnnnnnnnnnnnnnnnnnnnnnnnnnnnnnnnnnnnnnnnnnnnnnnnnnnnnnnnnnnnnnnnnnnnnnnnnnnnnnnnnnnnnnnnnnnnnnnnnnnnnnnnnnnnnnnnnnnnnnnnnnnnnnnnnnnnnnnnnnnnnnnnnnnnnnnnnnnnnnnnnnnnnnnnnnnnnnnnnnnnnnnnnnnnnnnnnnnnnnnnnnnnnnnnnnnnnnnnnnnnnnnnnnnnnnnnnnnnnnnnnnnnnnnnnnnnnnnnnnnnnnnnnnnnnnnnnnnnnnnnnnnnnnnnnnnnnnnnnnnnnnnnnnnnnnnnnnnnnnnnnnnnnnnnnnnnnnnnnnnnnnnnnnnnnnnnnnnnnnnnnnnngtcaaacagtgagcaccaccgattcctcagccagcaaccgggaaagcgtcaagtcggaagatggggatgacgaagagccgccttaccgaggcccgttctgcgggcgtgccagggtgcacaccgacttcacccccagtccctatgacacagactcactcaagctcaagnnnnnnnnnnnnnnnnnnnnnnnnnnnnnnnnnnnnnnnnnnnnnnnnnnnnnnnnnnnnnnnnnnnnnnnnnnnnnnnnnnnnnnnnnnnnnnnnnnnnnnnnnnnnnnnnnnnnnnnnnnnnnnnnnnnnnnnnnnnnnnnnnnnnnnnnnnnnnnnnnnnnnnnnnnnnnnnnnnnnnnnnnnnnnnnnnnnnnnnnnnnnnnnnnnnnnnnnnnnnnnnnnnnnnnnnnnnnnnnnnnnnnnnnnnnnnnnnnnnnnnnnnnnnnnnnnnnnnnnnnnnnnnnnnnnnnnnnnnnnnnnnnnnnnnnnnnnnnnnnnnnnnnnnnnnnnnnnnnnnnnnnnnnnnnnnnnnnnnnnnnnnnnnnnnnnnnnnnnnnnnnnnnnnnnnnnnnnnnnnnnnnnnnnnnnnnnnnnnnnnnnnnnnnnnnnnnnnnnnnnnnnnnnnnnnnnnnnnnnnnnnnnnnnnnnnnnggcaagactcggattgctagcctcctatctgccaagtcatccgccgagcccaacttgaagtcttttagcagaaaccagttgggcaattacccaacattgcctttaacgaaatcaggggatgcactgaagcagggacaggaggagggcaggctgggtggtggcctcgccccagacatgtccaagagctgtgacccacctggtgtgactggtttgaataaaaaccgaagaagcctcccagtttccatctgccggagctgtgagaccctcgagggcccccagactgtggacacttggcctcgatcccattccctggatgaccttcaagcagagtctggtgctgagcaagacgtgcctaccgaggtgacagaaccgccccctcagattgtacccaaagtgccacagaagatgactgcctcttcgacgaaagcccacccctggagcgagactctgctgtcgaacatgcgttgctactgacccaaaagaagagattttctgaacctcagaaattgacaactaagaaactggagggctcaatcgcaacctnnnnnnnnnnnnnnnnnnnnnnnnnnnnnnnnnnnnnnnnnnnnnnnnnnnnnnnnnnnnnnnnnnnnnnnnnnnnnnnnnnnnnnnnnnnnnnnnnnnnnnnnnnnnnnnnnnnnnnnnnnnnnnnnnnnnnnnnnnnnnnnnnnnnnnnnnnnnnnnnnnnnnnnnnnnnnnnnnnnnnnnnnnnnnnnnnnnnnnnnnnnnnnnnnnnnnnnnnnnnnnnnnnnnnnnnnnnnnnnnnnnnnnnnnnnnnnnnnnnnnnnnnnnnnnnnnnnnnnnnnnnnnnnnnnnnnnnnnnnnnnnnnnnnnnnnnnnnnnnnnnnnnnnnnnnnnnnnnnnnnnnnnnnnnnnnnnnnnnnnnnnnnnnnnnnnnnnnnnnnnnnnnnnnnnnnnnnnnnnnnnnnnnnnnnnnnnnnnnnnnnnnnnnnnnnnnnnnnnnnnnnnnnnnnnnnnnnnnnnnnnnnnnnnnnnnnnnnnnnnnnnnnnnnnnnnnnnnnnnnnnnnnnnnnnnnnnnnnnnnnnnnnnnnnnnnnnnnnnnnnnnnnnnnnnnnnnnnnnnnnnnnnnnnnnnnnnnnnnnnnnnnnnnnnnnnnagcatggccgctgtgggattcctgaagccctggtgcagagatacgcagaggacttggatcagcctgagagggacgtcgccatcaacatggaccagatccgggtgaagcagcttcggaagcagcaccgcatggc

SEQ ID NO: 30231 - DNA, 3615 bp, Macaca Mulatta
  misc_feature (1)...(3615): n = A,T,C or G
agactcaagagatggtgtccaactttgacctgaacagccccctaaacaacgaggcattggagggttttgatgagatgcgactagagctggaccagttggaggtgcgggagaagcagctacaggagcgcatgcagcagctggacagagagaaccaggagctgagggcagctgtcagcctacaagaggagcaactgcagacagagagggagaggggacgcactgcagcagaggacaacgttcgcctcacttgcttggtggctgagctccagaagcagtgggaggtcacccaggccacccagaacactgtgaaggagctgcagacgtgcctacaggccctggagctaggagcagcagagaaggaggaggactaccacacagccctgcggcggctggagtccatgctgcagcccttggcacaggagcttaaggccacacgggactcactgggccagaagaaccagcatttagccagcatcccagactggctagccatggctcagcagaaggcagatacagcaccagacacaaagggccagcaagaacctattcccagtgatgcggcccgggagatccaggagctaggggagaagcttcgagccctagaaagggagagaaccaaggtcgaggaggtcaacaggcagcagagtgcccagctggagcagctggtcaaggagctgcagctgaaggaggatgcctgggccagcctggagcgcctggtgaaggagacggccccactccaggaggagttgtctgggaagggacaggaggcagaccagctctggcaacggctacaggagttgctggtgcactcgagctcccgggagcaggagctagcagagttgaggcgggagaaaaaacagcaacaggaggaaaaggagctgctggagcaggaggtcaggtccctgacccggcagctgcagttcctggagacccagctggcacaggtgagccaacatgtgagtgacttggaggagcagaagaagcagctcatccaggacaaagaccacctcagccagaaggtgggtgcgctcgagcggcttgctgggcagcccggcccagaactgccagtggcaggtgaaaagaatgaggccctggtccctgtgaactccagtctgcaagaggcctgtgggaagccagaggaggagcagaggggcctgcaggaggcacagttagatgataccaaggtgcaggagggcagccaggaggaagagctccggcaggccaacagggaactggagaaggagctgcagaatgtggtcgggcgtaaccagctcctggagggcaagctgcaagccctgcaggccgattaccaggctttgcagcagcgggaagcagccatccagggctccttggcctccctggaggccgagcaggccagcatccggcacttgggcgaccagatggaggcaagcttgctggnnnnnnnnnnnnnnnnnnnnnnnnnnnnnnnnnnnnnnnnnnnnnnnnnnnnnnnnnnnnnnnnnnnnnnnnnnnnnnnnnnnnnnnnnnnnnnnnnnnnnnnnnnnnnnnnnnnnnnnnnnnnnnnnnnnnnnnnnnnnnnnnnnnnnnnnnnnnnnnnnnnnnnnnnnnnnnnnnnnnnnnnnnnnnnnnnnnnnnnnnnnnnnnnnnnnnnnnnnnnnnnnnnnnnnnnnnnnnnnnnnnnnnnnnnnnnnnnnnnnnnnnnnnnnnnnnnnnnnnnnnnnnnnnnnnnnnnnnnnnnnnnnnnnnnnnnnnnnnnnnnnnnnnnnnnnnnnnnnnnnnnnnnnnnnnnnnnnnnnnnnnnnnnnnnnnnnnnnnnnnnnnnnnnnnnnnnnnnnnnnnnnnnnnnnnnnnnnnnnnnnnnnnnnnnnnnnnnnnnnnnnnnnnnnnnnnnnnnnnnnnnnnnnnnnnnnnnnnnnnnnnnnnnnnnnnnnnnnnnnnnnnnnnnnnnnnnnnnnnnnnnnnnnnnnnnnnnnnnggcccagcagattcatgaggagctgcgggccctgcagaagttgtcccaggccaaatgcagctccaaggatgcacagctggagcacgctgagctgcaggagcagctgcaccgggccaacacggacacagccgagctgggcatccaggtttgcacactgaccatggaaaaggagcaagtggagaaggcactggcctgtgctgtccaggagctccaggacgccaaagaggcagcctcaagggagcgagagggcctggagcgccaagtagctgggctgcagcaagagaaggagagcttgcaggagaagctgaaggcagccaaagcagcagccgactcactgcctggcctgcaggcccagctcacccaggccgagcagcgggcccagagcctccaagaggctgcacgccaggagctcgacaccctcaagttccagctgagcgctgaaatcatggactaccagagcagacttaagnnnnnnnnnnnnnnnnnnnnnnnnnnnnnnnnnnnnnnnnnnnnnnnnnnnnnnnnnnnnnnnnnnnnnnnnnnnnnnnnnnnnnnnnnnnaggccacccaagcagacatgggagagaagctgagctgcaccagcaaccatattgcagagtgccaggcagccatgctgaggaaggacgaggaggggtctgccttgcgtgaannnnnnnnnnnnnnnnnnnnnnnnnnnnnnnnnnnnnnnnnnnnnnnnnnnnnnnnnnnnnnnnnnnnnnnnnnnnnnnnnnnnnnnnnnnnnnnnnnnnnnnnnnnnnnnnnnnnnnnnnnnnnnnnnnnnnnnnnnnnnnnnnnnnnnnnnnnnnnnnnnnnnnnnnnnnnnnnnnnnnnnnnnnnnnnnnnnnnnnnnnnnnnnnnnnnnnnnnnnnnnnnnnnnnnnnnnnnnnnnnnnnnnnnnnnnnnnnnnnnnnnnnnnnnnnnnnnnnnnnnnnnnnnnnnnnnnnnnnnnnnnnnnnnnnnnnnnnnnnnnnnnnnnnnnnnnnnnnnnnnnnnnnnnnnnnnnnnnnnnnnnnnnnnnnnnnnnnnnnnnnnnnnnnnnnnnnnnnnnnnnnnnnnnnnnnnnnnnnnnnnnnnnnnnnnnnnnnnnnnnnnnnnnnnnnnnnnnnnnnnnnnnnnnnnnnnnnnnnnnnnnnnnnnnnnnnnnnnnnnnnnnnnnnnnnnnnnnnnnnnnnnnnnnnnnnnnnnnnggagcaaatacagactacaggccaccggacgacgctgtgtttgatatcatcacagatgaggaattgtgccagatacaggagtctggctcctcgttgcctgaaacacccactgaaactgattctcttgacccaaatgtggctgaacagnnnactacatcaacctcgctaacgcctgaggacactgaagacatgcccgtggggcaggatgcggaaatctgcctgctgaagtctggagaacnnnatcaaagtacccctcacagtggatgagattgccagcttcggggagggtagcagggagctgtttgtgcggtccagcacctacagcctgatccccatcactgtggccgaagcaggcctcaccatcagctgggtcttctcctctgaccccaagagcatctccttcagcgtggtcttccaggaggctgaggacacaccgctggatcagtgtaa

SEQ ID NO: 30232 - DNA, 1318 bp, Macaca Mulatta
  misc_feature (1)...(1318): n = A,T,C or G
ggttgcaggctgcctgcaactcaatcctcggacttttctgcctgaacagaaccaggacatgcccccgcacctgccgacggccagcgcttccttccctgtacacccctactcctaccagtcgcctgggctgcccagtccgccttacggcaccatggacagctcccatgtcttccacgtcaagccgccgccgcacgcctacagcgcagcgctggagcccttctttgaaagccctctgactgattgcaccagcccttcctttgatggacccctcagcccgccgctcagcatcaatggcaacttctctttcaaacacgaaccgtccgccgagtttgagaaaaattatgcctttaccatgcactatcctgcagcgaccctggcaggggcccaaagccacggatcaatcttctcgggcaccgctgcccctcgctgcgagatccccatagacaatattatgtccttcgatagccattcacatcatgagcgagtcatgagtgcccagctcaatgccatctttcatgattagaggcacgccagtttcaccatttccgggaaacgaacccactgtgcttacagtgactgtcgtgtttacaaaaggcagccctttgggtactactgctgcaaagtgcaaatactccaagcttcaagtgatatatgtatttattgtcattactgcctttggaagaaacaggggatcaaagttcctgttcaccttatgtattattttctatagctcttctattnnnnnnnnnnnnnntacagtaaagttaaagaaatgcaccacgaatttggtgtagcagtagtcagatcgtattaattatctgatnnnnnnnnnnnnnnnnnnnnnnnnnnnnnnnntatgcaatttttaaactagtaatgggccaattaaannnnnnnnnnnnnnnnnntttcaaccagaattttactacttgttacctttcccatgctgaattattttgttgtgattttgtacagaatttttaatgactttttataatgcgaatttcctattttaaaaccatgcagcttcttcagtttttatacatatcagagaagtagaattatatctgatttatacgaaataatttaactaatttaaaccatcagaaaagtgcttagaaagttattgtgttgccttagcacttctttcctctctaattgtnnnnnnnnnnnnnnnnnnnnnnnnnnnnnnnnattgcacgatttgagcaattcatttcactttaaagtctttccctctccctaaaatattaaccagaatcatacttttcaagagaataagaaattaagagatgctttccctatcaaaacatatcaa

SEQ ID NO: 30233 - DNA, 825 bp, Macaca Mulatta
ggagccatcctgaggagcaatagcaatatccaataaatataccctatgatctggcagttccactccttgatttgttaagagaaattctcaaacatgagacatttatttgaatatccgcagtaccactgtttacaaaaacagctatagcaaacactggggaacacgtaaatttcaacaggatatattcctataagggaccattatatagcaatataagtgaacaaaccgggattatatgtgtatatataaatttcacatgactgtgtaaaaaaatatatatacagattacagctacttcatgattgatagtgagtggaacttctacttgacatatgtccctattacactgtgaaaatgtacaaatatctgaaatgtaaaaatgagcctcatgttaagatggatgggaaggacactgtgactggttgtgtgtggagttcggcagcaccgtgaatcacctgatgcttttcccaaccaccacaaccaccctttagagcacctatggactctgggctcctaacgtgaccaactagattccgagcacactggccatatcctgaagaactccttccttgggaataccaacaggcacgttcccctcctctggactcccatgggagttccccaacggggcatccaacctcgcttctcgtacagcgtccccgtgccccttttccacaatatgacaacctgagccccctttttcttgccacctaactacacccccccttcaacgacgccagggccacgcggcttgccctgccccattcttacacccgcgcccgacccctcgttataaccccatcccgcagcgcgtatacccccatc

SEQ ID NO: 30234 - DNA, 1141 bp, Macaca Mulatta
  misc_feature (1)...(1141): n = A,T,C or G
ggcaaaatcaagaacgtgattggtgacggtggcatcagctcatctgctgtaatggtgctggtgaacgctgtgtacttcaaaggcaagtggcaatcagccttcaccaagagtgaaaccacaaattgccgtttcaaatctcccaannnnnnnnnnnnnnnnnnnnnnnnnnnnnnnnnnnnnnnnnnnnnnnnnnnnnnnnnnnnnnnnnnnnnnnnnnnnnnnnnnnnnnnnnnnnnnnnnnnnnnnnnnnnnnnnnnnnnnnnnnnnnnnnnnnnnnnnnnnnnnnnnnnnnnnnnnnnnnnnnnnnnnnnngaatctaatggaatggaccaatccaaggcgaatcacttctaagtatgttgaggtattttttcctcagttcaagatcgtgaagaattatgaaatgaaacaatatttgagacccctagggctgaaagatatctttgatgaatccaaagcagatctctctgggattgcttcagggggtcgtctgtatatatcaagactgatgcacaaatcttacatagaggtcaatgaggagggcaccgaggctactgctgccacaggaagtaatattgtagaaaagcaactccctgagtccacgctgtttagagccgaccacccattcctatttgtcatcaggaaggatgacatcatcttattcagtggcaaagtttcttgcccttgaaaatccaactggtttctattacagcagtccccacaacatcaaagaaccaccacaagtcaatagatttgagtttaattagaaaaatgtggtgtttcctttgagtttatttcttcctaccattggtcagcagatgacactggtgacttgtcccttcctagacacctggttgattgtcctgatccctgctcttagcattccaccaccatgtgcctcgcccatttctaatttcattgtctttcttcccacactcgtttcttccccatgacccatctggaaattatggagagtgctcaactgggaaggagaatgtagaagtagccctagggatcctttttgaaactctacagttattgcagatattctagcttcattgtaaacaatctaggaaataagcccagctgctttctagaaataagtgtgaaggataaatttttgttgttgacctatgaagat

SEQ ID NO: 30235 - DNA, 796 bp, Macaca Mulatta
agatcccctgggaaaggtgtgaaggcagctgggtaagggggatgggccctagagtcccagccccagcgccctgcttgtctgtgtctaggatgtcctgttcaaggttgtccgctacgagggcttcttcagcctgtggaagggcttcacaccgtactatgcccgcctgggtccccacaccgtcctcaccttcatcttcttggagcagatgaacaaggcctacaggcgtctcttcctcagtggctgaagcggccgggggctcccacttgcctgctgcatctatggccactgcgccctgggggcctgggctctgctgccctggacccctctatttatttcccttccacagtgtggtttcttcctctgcggtaaaggacttggtctgttctaccccctgctccagcttgccctgctcatcctgatcctgtgatttctctgtccctggctattcttgcagggagctggaaaacttcctgaggatttctggcctccccctgggttttagtttcagggcacacaggacagcagaagatcccccttctcattggggaaaccaaggcagaactgaggggatagggaggagcagaagccatcaagatggtcaaaggacctacagagggagatgtggcccttcctccccctcactgaggacttaataaatcggattgatgataccagccccaaatctggagagtctggggggtggctaggagaggggaggagactggacaaagaagctggtgtccctggagaataggaactggagtttttaagaaaaattgataaagaaaaagcagcc

SEQ ID NO: 30236 - DNA, 961 bp, Macaca Mulatta
aaagccttggtggttttgtggtgctccaggtgcccgggcagcgggagtccgggccatgcgggagacaactcgagttcggtggattttgcggatctgccagcgctgttcggcgtcccgctggcccccgagggcaaagggggctaccctgatggaggtcaagccagccaacgcgtgccatcccgtcgagggcccgcgactgggcaaccgctctctgggcgccatcgcactgattcgccgctacgattgcaccttcgacctcaaggtactgaacgcccagcgcgccggcttcgaggcggccatcgtgcacaacgtccactccgacgacctcgtgagcatgacccacgtctccgaggacctgaggggccagatcgccatcccctcggtgttcgtgggcgaggccgcctcgcaggaccttcgggtcatcctgggctgcgacaagtcggcccacgtgctgctcctgccggacgacccgccgtgccgcgacctggactgtcaccccgtgctgaccgtgtcctgggcgctgggccgcccccccgccctggtcgtatccaccctctttgtcctgaaccgcctgtggctctgggcccaggcctgctgcagccacagacggccggtgaagacgtctacctgccagaaggcgcaggtccgcaccttcacgcgacgcaacgacctgtgtgccatctgcctggacgagtacgaggagggcgaccaactcaagatcctgccctgctcccacacctacccccccccccccattgacccctggttctcccaagccccccggcgctcctgccccgtgtgcaaacagtcggtggccggcacggaagatagctttgactccaccaccgacagcttcagcgacgaggacccctccctaccgggccaccggccccccatctgggccattcaagcccggctacgctcccggaggctggagctgccggccgcgccagcccccact

SEQ ID NO: 30237 - DNA, 513 bp, Macaca Mulatta
cgtggcagattatgaagtatggatcattacttttgggatgtggatatattcagtgaacaaggagcagcttgcaagagctggattttatgctttaggtgaaggtgataaagtaaagtgctttcactgtggagggagggtaactgattggaagcccagtgaagacccttgggaacaacatgctaaatggcatccagggtgtaaatatctgctagaacagaagacatgagaatatataaacaatattcatttatcctattcacttgaggagtgtctggtaagaactgttgaaaaaacaccatcactaactagaaaaattgataccatcttccataatcctatggtacgagaagctatatgaatggggttcagtttcaaggacattaagaaaataatggaggaaaaaattcagacatctgggagcaactataaatcacttgagtttctggttgcagatccagtgaaggctcagaaagatagtacacaagatgaatcaagtcagacttcatgcagaaa

SEQ ID NO: 30238 - DNA, 116 bp, Macaca Mulatta
tcagacgacaacggtgctggagaagtacgaggtccacaaccccacccccctcatcgtaggcagctccattgggggtctgctgctgctggcgctcatcacagcagcactgtacaaag

SEQ ID NO: 30239 - DNA, 1713 bp, Macaca Mulatta
  misc_feature (1)...(1713): n = A,T,C or G
gtcacacttgcagggccagggcgtgcatggcctcagggatggcctgttcagctgctgagtgactcggtcccggtgcctcaccacctgatgagctctgtgtgctttctgggcacttctgctcattgcctttgggttcagtgaagagtctggagtttatccggagtgaggtgnnnnnnnnnnnnnnnnnnnnnnnggacagcatctggctccttccctcggttggtggacctcagggtccgcgtcacacacaccccagctctcctgactggtctctgcactcggtgttgcctccgactggaacagtcttcctcctggtgtcatcatctccggggcgcgtccttcctgaccttccacctccaccagnnnnnnnnnnnnnnnnnnnnnnnnnnnnnnnnnnnnnnnnnnnnnnnnnnnnnnnnnnnnnnnnnnnnnnnnnnnnnnnnnnnnnnnnnnnnnnnnnnnnnnnnnnnnnnnnnnnnnnnnnnnnnnnnnnnnnnnnnnnnnnnnnnnnnnnnnnnnnnnnnnnnnnnnnnnnnnnnnnnnnnnnnnnnnnnnnnnnnnnnnnnnnnnnnnnnnnnnnnnnnnnnnnnnnnnnnnnnnnnnnnnnnnnnnnnnnnnnnnnnnnnnnnnnnnnnnnnnnnnnnnnnnnnnnnnnnnnnnnnnnnnnnnnnnnnnnnnnnnnnnnnnnnnnnnnnnnnnnnnnnnnnnnnnnnnnnnnnnnnnnnnnnnnnnnnnnnnnnnnnnnnnnnnnnnnnnnnnnnnnnnnnnnnnnnnnnnnnnnnnnnnnnnnnnnnnnnnnnnnnnnnnnnnnnnnnnnnnnnnnnnnnnnnnnnnnnnnnnnnnnnnnnnnnnnnnnnnnnnnnnnnnnnnnnnnnnnnnnnnnnnnnnnnnnnnnnnnnnnnnnnnnnnnnnnnnnnnnnnnnnnnnnnnnnnnnnnnnnnnnnnnnnnnnnnnnnnnnnnnnnnnnnnnnnnnnnnnnnnnnnnnnnnnnnnnnnnnnnnnnnnnnnnnnnnnnnnnnnnnnnnnnnnnnnnnnnnnnnnnnnnnnnnnnnnnnnnnnnnnnnnnnnnnnnnnnnnnnnnnnnnnnnnnnnnnnnnnnnnnnnnnnnnnnnnnnnnnnnnnnnnnnnnnnnnnnnnnnnnnnnnnnnnnnnnnnnnnnnnnnnnnnnnnnnnnnnnnnnnnnnnnnnnnnnnnnnnnnnnnnnnnnnnnnnnnnnnnnnnnnnnnnnnnnnnnnnnnnnnnnnnnnnnnnnnnnnnnnnnnnnnnnnnnnnnnnnnnnnnnnnnnnnnnnnnnnnnnnnnnnnnnnnnnnnnnnnnnnnnnnnnnnnnnnnnnnnnnnnnnnnnnnnnnnnnnnnnnnnnnnnnnnnnnnnnnnnnnnnnnnnnnnnnnnnnnnnnnnnnntctctcaggtgcagtcatgagccaggtgctgggaagatcacgatgatccagctccttctggtcctttctttagctggttagaggctgggaggacacacaagttcagctccagccgtctggggcattggtggtagcccctggagaacttgtgcaatgggcctatgagggtgaatctggctccaggaaagcatgttgcaatcctacgagtgatgtctgccatgcgcacaggcatggagagtgaggcacctgtgctgtcttctagtaggcgctagactggcggggcctctgaaacgcacccagacactgttctg

SEQ ID NO: 30240 - DNA, 689 bp, Macaca Mulatta
  misc_feature (1)...(689): n = A,T,C or G
cgctccgggccagcggncggtgtctcaccgcccactggggaagacatgtaaggaattacataagacagctatgcaaaatggagctggaggagctttatttgtgcacagagatactcctgaaaataaccctgatactccatttgatttcacaccagaaaactataagaggatagaggcaatagtaaaaaactatccagaaggccataaagcagcagctgttcttccagtcctggatttagcccaaaggcagaatgggtggttgcccatctctgctatgaacaaggttgcagaagttttacaagtacctccaatgagagtatatgaagtagcaactttttatacaatgtataatcgaaagccagttggaaagtatcacattcaggtctgcactactacaccctgcatgcttcgcaactctgacagcatactggaggccattcagaaaaagcttggaataaaggttggggagactacacctgacaaactttttactcttatagaagtggaatgtttaggggcctgtgtgaacgcaccaatggttcaaataaatgacaattactatgaggatttgacacctaaggatattgaagaaattattgatgagctcaaggctggcaaaatcccaaaacctgggccaaggagtggacgcttctcttgtgagccagctggaggtcttacctctttgactg

SEQ ID NO: 30241 - DNA, 845 bp, Macaca Mulatta
ccagcttcccgtggaggatgacattgacctcagtgatgtggaacttgatgacttggggaaagatgagttgtgagagccacaacagaggcttcagaccattttcttttcttgggagccagcggatttttccagcagtgaagggacattgtctacgatcagatgactctcccagtggccttttaaccaagaagtagtacttgattggtcatttgacaacactgcaacagtgaacttttgcatctcaagaaaacattgaaaaattctatgaattgttgtagccagtgaattgtatcgtattctgtcacattaatattttgaagaaaactcggctgtcgaaacgtttttccctctctctgactgctgcttggatgttcttggaggctgtttcttatgtatgggttttttaatgtgattccttcatttgaatattaatggctttttccattaaagaataaaatattttggataatgccgataaatgtatgaaattagtatctacatcatgaattcagagtgatgtttagcagtaaattaatattttgaagtgatacacagatatctttcctcccccacaaacttttttaaacaaaaaacaagatctctttgcttcagatggtgccatcaatgcctccccacaacagagattttacatggaaaccggactcagtgagcactgatttcctgcccaatatttgtctttgggctgtctctagtgactaattattaaggaatctagctggttatacagtgcaaggctttctatgttgttatgaacatgagaatagccattaagacatgaaatacagcagcaggtaaacgatgcgaacacatagttcgcatttatg

SEQ ID NO: 30242 - DNA, 1302 bp, Macaca Mulatta
  misc_feature (1)...(1302): n = A,T,C or G
ggatggtcctttgattctctgctgtggcagtaggtgcctcatgcccttccagtgcaatgcaagccctccagcctcacccccgcgaggatgtcagcagcagcctgaggctaaatccaggttgaaaaaagagtaacttgaaaaaatatatttgcacacacagaattttgtttttcttccaagttggttaagacatatannnnnnnnnnnnnnnnnnnnnnnnnnnnnnngttggtcttgctctgtagcccaggctgaagcgcagtggcatgatctcggctcaattcaggctccgccttcgtgagttcacgtcattctcctgccaccgccttataggtagctgggactatacgcgcccgccaccgtgtcccagcctaattttagtattatttaagtggaagacgggtttcacccgcggttgggccaagggaagggtctccacatcatccgtggaccctcaagaaaattaggccccccccactatgtgcccctacacaacaagtaggcctgtataattttactatgcggccttgtggacgcccaaactatgcccttccctcgggcgcgcgaactcaccaatcactcatataaatacatgttctgttgtaacctgatacatactgtgtgaaactccatctcctcacatagagcgggtgtaagggagaggggtcttgggaatcgagccctgtantatattntatagaagaacgtttatcgtgttggaccttatanatatactaaaggcggcaatatccaaaatggagctttttaacattctcgatcgactatgagaattcactttttatcctccacccantgtcgatgtatcggagggccctatattcttccgtcccacgcagatggcaaaaatgataaaacaaacccacaacgggacgcgataaacataaaaacgctttttaccacacccctgtgaagaggatgctgatagtgaaagggcaccccccctaattggaaagagactttttatactacacnaacctctattacaaacantaattanttgtctacacgccagcgctctagtttacttttcaacaaagaacgtgaggcnaccaacgcataaaaacgagcggatttcaatgcactagacgctagtatagagtgttcgttatctcacacatatacaagaaaacaaaatacaccaagtcagtaaaatataacatagatatctacccgccgttgtgtagttcgtatgtgagcgcctagcccttttctngctccctctacgcttacgattattcgaccgcacaaaagaatatgtatacatcttctctaaatgagtgn

SEQ ID NO: 30243 - DNA, 505 bp, Macaca Mulatta
agcgtggcgtgtgttgggttcttcttggtccagagggcctgtccacacacgggagtccacagaaaaccttccctcctggccctcccaggtcccctggtgaaatcaggagagacggtcaccctacaatgttcatcagataccgtgtttgagcacttctttctgcacagtgaggtgaactttgagaagcccttgcaccttgttggagagctccatggtgggggttcccaggccaactattccatcaattccaagacgtctgaccttgcagagacctacagatgctacggttctgtcactcactccccctatgtgttgtcagctcccagtgaccccctggacatcgtgatcacaggactctgaagaacaagaccctcaggaggtgacatacgcacagttggatcactgcgctttcacacggggaaaaatcactcgcccttctcagaggcccaagagacccccaacagataccagcgtgtacatagagcttccagatgctgagcccaga

SEQ ID NO: 30244 - DNA, 841 bp, Macaca Mulatta
ctgcaaagctaagacctcccgcagccaagaacgtccaaggagcccgctggcaaagaaggaagaccccacgctttagagatccatctgtcttcactcaccgcagcgtacttggcacttcagtttcaaacacgtggccctcgaaaacttgatccgacagctttaatacggccagtcctctctcagtcaggaaaagcgcacggacggacggtggtgagaagggcagagctgccgcatgacttcctccccacgcggggagctctgtgtctgcttggcgacccccccgcgtgcacggcccaggaggtgcacctgacgcagcaggggagactcgtcaaaggtgtggaccaccggagtcacaccggcactagaaagaaaagcaaaagcgttgccctgctgatttctccctccccctccccagtttgtaactttaactgatggggaaatgcaggttgggtgggatatgccgaaacgtgatgctgacgtggagtcacgggtgaggaaggtacaagtcctttgagatcaaaacccaaacgggccattctttttaaggtgtcggtgtgcggggagtggtccccaatggtctgatgctccttaacttccaaaacattcactttttacaacttcaaggaattacgcataaaaaagggtggtgaaaaagctttggtttctagtaaaggttagtgcgtgtggtttttttaagaagctgttttgctaaattatttttacttggaatgtttcaaacagatttcaggctgcaaacttgttaagttttataatcattcgcttctccaagtgaagctcagaagtacttaaaaatagctgtaacgttcgcggttaggaaaga

SEQ ID NO: 30245 - DNA, 3251 bp, Macaca Mulatta
  misc_feature (1)...(3251): n = A,T,C or G
aggttcaggaacaagtgcatcccacnnnnnnnnnnnnnnnnnnnnnnnnnnnnnnnnnnnnnnnnnnnnnnnnnnnnnnnnnnnnnnnnnnnnnnnnnnnnnnnnnnnnnnnnnnnnnnnnnnnnnnnnnnnnnnnnnnnnnnnnnnnnnnnnnnnnnnnnnnnnnnnnnnnnnnnnnnnnnnnnnnnnnnnnnnnnnnnnnnnnnnnnnnnnnnnnnnnnnnnnnnnnnnnnnnnnnnnnnnnnnnnnnnnnnnnnnnnnnnnnnnnnnnnnnnnnnnnnnnnnnnnnnnnnnnnnnnnnnnnnnnnnnnnnnnnnnnnnnnnnnnnnnnnnnnnnnnnnnnnnnnnnnnnnnnnnnnnnnnnnnnnnnnnnnnnnnnnnnnnnnnnnnnnnnnnnnnnnnnnnnnnnnnnnnnnnnnnnnnnnnnnnnnnnnnnnnnnnnnnnnnnnnnnnnnnnnnnnnnnnnnnnnnnnnnnnnnnnnnnnnnnnnnnnnnnnnnnnnnnnnnnnnnnnnnnnnnnnnnnnnnnnnnnnnnnnnnnnnnnnnnnnnnnnnnnnnnnnnnnnnnnnnnnnnnnnnnnnnnnnnnnnnnnnnnnnnnnnnnnnnnnnnnnnnnnnnnnnnnnnnnnngatattgaaaagatttttagtaatatttcagatatacatgaattgactgtgaaacttttaggtttgattgaagacacagttgaaatgactgatgaaagcagtcctcatcccttagctggcagctgttttgaagatttggcagaannnnnnnnnnnnnnnnnnnnnnnnnnnnnnnnnnnnnnnnnnnnnnnnnnnnnnnnnnnnnnnnnnnnnnnnnnnnnnnnnnnnnnnnnnnnnnnnnnnnnnnnnnnnnnnnnnnnnnnnnnnnnnnnnnnnnnnnnnnnnnnnnnnnnnnnnnnnnnnnnnnnnnnnnnnnnnnnnnnnnnnnnnnnnnnnnnnnnnnnnnnnnnnnnnnnnnnnnnnnnnnnnnnnnnnnnnnnnnnnnnnnnnnnnnnnnnnnnnnnnnnnnnnnnnnnnnnnnnnnnnnnnnnnnnnnnnnnnnnnnnnnnnnnnnnnnnnnnnnnnnnnnnnnnnnnnnnnnnnnnnnnnnnnnnnnnnnnnnnnnnnnnnnnnnnnnnnnnnnnnnnnnnnnnnnnnnnnnnnnnnnnnnnnnnnnnnnnnnnnnnnnnnnnnnnnnnnnnnnnnnnnnnnnnnnnnnnnnnnnnnnnnnnnnnnnnnnnnnnnnnnnnnnnnnnnnnnnnnnnnnnnnnnnnnnnnnnnnnnnnnnnnnnnnnnnnnnnnnnnnnnnnnnnnnnnnnnnnnnnnnnnnnnnnnnnnnnnnnnnnnnnnnnnnnnnnnnnnnnnnnnnnnnnnnnnnnnnnnnnnnnnnnnnnnnnnnnnnnnnnnnnnnnnnnnnnnnnnnnnnnnnnnnnnnnnnnnnnnnnnnnnnnnnnnnnnnnnnnnnnnnnnnnnnnnnnnnnnnnnnnnnnnnnnnnnnnnnnnnnnnnnnnnnnnnnnnnnnnnnnnnnnnnnnnnnnnnnnnnnnnnnnnnnnnnnnnnnnnnnnnnnnnnnnnnnnnnnnnnnnnnnnnnnnnnnnnnnnnnnnnnnnnnnnnnnnnnnnnnnnnnnnnnnnnnnnnnnnnnnnnnnnnnnnnnnnnnnnnnnnnnnnnnnnnnnnnnnnnnnnnnnnnnnnnnnnnnnnnnnnnnnnnnnnnnnnnnnnnnnnnnnnnnnnnnnnnnnnnnnnnnnnnnnnnnnnnnnnnnnnnnnnnnnnnnnnnnnnnnnnnnnnnnnnnnnnnnnnnnnnnnnnnnnnnnnnnnnnnnnnnnnnnnnnnnnnnnnnnnnnnnnnnnnnnnnnnnnnnnnnnnnnnnnnnnnnnnnnnnnnnnnnnnnnnnnnnnnnnnnnnnnnnnnnnnnnnnnnnnnnnnnnnnnnnnnnnnnnnnnnnnnnnnnnnnnnnnnnnnnnnnnnnnnnnnnnnnnnnnnnnnnnnnnnnnnnnnnnnnnnnnnnnnnnnnnnnnnnnnnnnnnnnnnnnnnnnnnnnnnnnnnnnnnnnnnnnnnnnnnnnnnnnnnnnnnnnnnnnnnnnnnnnnnnnnnnnnnnnnnnnnnnnnnnnnnnnnnnnnnnnnnnnnnnnnnnnnnnnnnnnnnnnnnnnnnnnnnnnnnnnnnnnnnnnnnnnnnnnnnnnnnnnnnnnnnnnnnnnnnnnnnnnnnnnnnnnnnnnnnnnnnnnnnnnnnnnnnnnnnnnnnnnnnnnnnnnnnnnnnnnnnnnnnnnnnnnnnnnnnnnnnaggaaagttcaaccatctgaacttgtaggaagtgtgtggaccaaagaagataaagaaataaattctccaaatttattaaaaatgattcgccataccacaaatctcaccctctggtttgaaannnnnnnnnnnnnnnnnnnnnnnnnnnnnnnnnnnnnnnnnnnnnnnnnnnnnnnnnnnnnnnnnnnnnnnnnnnnnnnnnnnnnnnnnnnnnnnnnnnnnnnnnnnnnnnnnnnnnnnnnnnnnnnnnnnnnnnnnnnnnnnnnnnnnnnnnnnntttaaggcactgcaggaaagaaaaaggaaaattttggatgaagctgtggaattaagtcaagatcactttaaaaaatacctagtaaaacttaagtcaatcaatccaccttgtgtgccnnnnnnnggaatatatttaacaaatattctgaagactgaagaagggaataatgattttttaaaaaagaaagggaaagatttaatcaatttcagtaagaggaggaaagtagctgaaattactggagaaattcagcagtatcagaatcagccttactgtttacggatagaaccagatatgagnnnnnnnnnnnnnnnnnnnnnnnnnnnnnnnnnnnnnnnnnnnnnnnnnnnnnnnnnnnnnnnnnnnnnnnnnnnnnnnnnnnnnnnnnnnnnnnnnnnnnnnnnnnnnnnnnnnnnnncctagaaaatcaactttctccttgaaatctcctggaataaggcctaacacaggccgacatggctctacctcaggtactttacgaggtcacccaacaccattagaaagagaaccatgtaaaataagctttagtcggattgctgaaactgagctggaatcaacagtgtcagcaccaacttctccaaatacaccatctactccaccagtatctgcttcttcagaccttagtgtatttttagatgtggatctcaacagctcctgtg

SEQ ID NO: 30246 - DNA, 764 bp, Macaca Mulatta
  misc_feature (1)...(764): n = A,T,C or G
ttgtgtgtaacaaggtggcccagggcattgtctcctatggacaaagaaatggcaagcctccacgagtctgcaccaaagtctcaagctttgtacgctggataaagaaaaccatgaaacgccactaactacagaaagcaaactaagcccccgctgtgatgaaccaccttctcagagccgagtccagatttacactgggagaggtgccagcaactgaataaatacctcttggttgagtggaaaggctggtttctcgtttattcattgaccctcattctcaggcaccagttctgtgctatgcaggccaatgacacaattttgctgtcttctgctttctcctctcccctcaccccttgccaccttcccaaacccccacgcaaagctgctattcagctctttcctatccacaccagtttctctagggcctgcccttctgccagggctgaagctgagcaccatcaggagacaacatggaccactttggtcctggggcttagcgaaaacttcttacctccttctccagtgttacatgacagagaanaaaggtataataccatgggacctaactcctcatcccccactggggctcctcattctcccccgggcttagtttctctaccctcctctgagctcanagctcaactcgtcctccagcctcttggctgccccttctcttcatccctgctgagtgttctcagaatccaccaacttttgtcctctccagtccacgctgaactgatctgggcccttcctcatatctacccact

SEQ ID NO: 30247 - DNA, 288 bp, Macaca Mulatta
  misc_feature (1)...(288): n = A,T,C or G
ggtactgcaatgctttcatcttccacctggtttacaagcgtgcgcaagggagcggnnnnnnnnnnnnnnnnnnnnnnnnnnnnnnnnnnnaactccgtccgctcgtcctgcccttaccggaaggcgccgaggagaaaagaaacctgggcggggggcccgccggcggagatgaatggtgataccatagtagaccccctcccaaacactgagaggaaaacgtgaaaacactcaaggtcgagggggaggacaggttggtaaaacacgaaaaggtaaataaaattacatgtt

SEQ ID NO: 30248 - DNA, 641 bp, Macaca Mulatta
  misc_feature (1)...(641): n = A,T,C or G
ntctggggctgaaccggtacaaaacaatgttaagaatatagccaggtgtgatgtcacacccctgtgnnnnnnnnnnnnnnnnnnnnnnnnnnnnnnagatggcttgaggctaggatttgaaggccagcctgggctacgtggcgagacgctgtctcatgtgcgtcttcacatgcactgcccagcatgccgccatcaaccagggccaggtatggacagctgaaagcccaggtccctgaaggcaaggtgacctgatgtccagcaggcctgtcttcaaatggccatctcatggcatctgggtcgccgccagccagacatggtgagaggggactctcgggagagggaaatgacagttggaaaggaaatattagagtgggggctgggctcttagaaactgactgatcctttgttctgtctcaggtgcctctggggcatcacaaagaaaaatatttctcaggccccaagcccaaagcggtgctaaaccaattccgaacagatttggaaaaccatttccccaacacaggagagactaaggaatttcaggtaaaaatcggatggttccaatcctccgatcctaagagaccatcgccccagttcccaagagctccgccagttcgacttttttgcccaacgcctggttcccc

SEQ ID NO: 30249 - DNA, 2251 bp, Macaca Mulatta
  misc_feature (1)...(2251): n = A,T,C or G
ggcagtccagccgcaggggccacccgaacagtctctcctcctcacagaagcctgnnnnnnnnnnnnnnnnnnnnnnnnnnnnnnnnnnnnnnnnnnnnnnnnnnnnnnnnnnnnnnnnnnnnnnnnnnnnnnnnnnnnnnnnnnnnnnnnnnnnnnnnnnnnnnnnnnnnnnnnnnnnnnnnnnnnnnnnnnnnnnnnnnnnnnnnnnnnnnnnnnnnnnnnnnnnnnnnnnnnnnnnnnnnnnnnnnnnnnnnnnnnnnnnnnnnnnnnnnnnnnnnnnnnccaagatccaggctcctgaatttcagcctggccctttctatctgtctgatacctcctttaggagtctttctgcctcggttgggtggagcggggctgttgctggttgggggagtttgcaggttgcccctgttccacaggatgcatgactgggcatgtgaggtgttcaagaaagccaggaaaaggtggaacagactgctacctctgtctgaagtggtttggagggaaggcctcagggacagggcatacctagcagtagctggcaagcccatgggagaaaaggcaaggggtttaccatctgccaggacacagaggccagtggatggccacaagtagtctccagaggccagtgggagtcacgcaaactggaacggggcctgggaaaggcccttctgtgtgcccaggcctgctcccccaacaccgtgagcctacaaacaaagggaccattctctctaggatttgatgctgccatctccggctggcagtgccaggtggtgggggcatcgggggtgtcaatccattatcccccccaactcctaggtcctctggggctggatgttggggaggtgggtgttccatgctatgttgccatggcaaccnnnnnnnnnnnnnnnnnnnnnnnnnnnnnnnnnnnnnnnnnnnnnnnnnnnnnnnnnnnnnnnnnnnnnnnnnnnnnnnnnnnnnnnnnnnnnnnnnnnnnnnnnnnnnnnnnnnnnnnnnnnnnnnnnnnnnnnnnnnnnnnnnnnnnnnnnnnnnnnnnnnnnnnnnnnnnnnnnnnnnnnnnnnnnnnnnnnnnnnnnnnnnnnnnnnnnnnnnnnnnnnnnnnnnnnnnnnnnnnnnnnnnnnnnnnnnnnnnnnnnnnnnnnnnnnnnnnnnnnnnnnnnnnnnnnnnnnnnnnnnnnnnnnnnnnnnnnnnnnnnnnnnnnnnnnnnnnnnnnnnnnnnnnnnnnnnnnnnnnnnnnnnnnnnnnnnnnnnnnnnnnnnnnnnnnnnnnnnnnnnnnnnnnnnnnnnnnnnnnnnnnnnnnnnnnnnnnnnnnnnnnnnnnnnnnnnnnnnnnnnnnnnnnnnnnnnnnnnnnnnnnnnnnnnnnnnnnnnnnnnnnnnnnnnnnnnnnnnnnnnnnnnnnnnnnnnnnnnnnnnnnnnnnnnnnnnnnnnnnnnnnnnnnnnnnnnnnnnnnnnnnnnnnnnnnnnnnnnnnnnnnnnnnnnnnnnnnnnnnnnnnnnnnnnnnnnnnnnnnnnnnnnnnnnnnnnnnnnnnnnnnnnnnnnnnnnnnnnnnnnnnnnnnnnnnnnnnnnnnnnnnnnnnnnnnnnnnnnnnnnnnnnnnnnnnnnnnnnnnnnnnnnnnnnnnnnnnnnnnnnnnnnnnnnnnnnnnnnnnnnnnnnnnnnnnnnnnnnnnnnnnnnnnnnnnnnnnnnnnnnnnnnnnnnnnnnnnnnnnnnnnnnnnnnnnnnnnnnnnnnnnnnnnnnnnnnnnnnnnnnnnnnnnnnnnnnnnnnnnnnnnnnnnnnnnnnnnnnnnnnnnnntgtaagatggctgcctgaccaggtgtgcaatgaaagcctgctctggttagtggacagggaagagactgaggccctaagaaggacttcctggctgaccagaaatactgttgaatcttcctgctaatggaattgggaagagaggatggagagagaaggaaggagggaaagaccaggaatggcggcccccagaaaagatgtaaggttgagcacaggagcaggggtggtagagaggcctcagcacgtggcttagttcccagaggacttagaggactgtgagtaataagaaaagtactggaggaatcagaatggggaatatcagcaggaggagtgagagggtaggatgtggccaggcagtatcatttgccagtttgagggtctctctggggcctgtgaaaggtgactgtgtaaaagaggaaatgctccaccttctctcctcagcccagcactc

SEQ ID NO: 30250 - DNA, 512 bp, Macaca Mulatta
cctcaaacagataacaatcttcactcctatgctgatttttctggtgccactgaagttattttggaagcagaattaagcagaggagatggtgatgtcgcttggcaacacacccagctgtttagacaaagcttaaatgaccatgaagaaaattgtttggagataattataaaatttagtgacctttgagatcctgaacattatagaaaagctagcaataatcaaggacttactaaagtagtctgttggttcagtgcatgcttagttggcagttaccaccctgtgctagcatatttcttttgctagctatccatcatgtaaccctcatgaaaattatctttatactgtggactataataaaatattgaattaaaaactttcttccatatgtgactataatttggagtaaagtctcattgacccaatatgggattttaatctaaaaactataaatatagttttaaaagttaatgatattcatgattaaatgctattcatgattatgataaaatctt

SEQ ID NO: 30251 - DNA, 307 bp, Macaca Mulatta
cagttcgtggtcgtggtcagcatcgtgaccttcaggccattccaccacggaggctacatcttccccgactgggccaacgcgctgggctgggtcatcggcacatcctccatggccatggagaccatctatgcggtctacaagttctgcagcctgactgggtcctttcgagaggtgggtatttggacgcggcgccttcacctgagagcgaggccatcagaaaggctccgtgactgtccgtgtttttttcctcacctgcctgggtcatctgtgaccaagaggaggataatggaggtggccaccacaacag

SEQ ID NO: 30252 - DNA, 201 bp, Macaca Mulatta
ttgcatacagatgagttggtagccagtctgagctggcccacagactcataaaatcaacagggcctcaggtaccctcacccagcacatccaaactcttgcatcaaaggtgcaaggacttgctcacatcgagaatctggctgctttcttggagaccaagaaaatgagtttttgtttctacatttactccagcaatccatgagg

SEQ ID NO: 30253 - DNA, 479 bp, Macaca Mulatta
  misc_feature (1)...(479): n = A,T,C or G
agaggctatttggaggctccaaactgtttagaagacctggacagccagaaagtcattagtcctatccaaaatgaagcaatttgtgcaggaaaaacagatattttatggaagaactgtgagtttctggtaaatcgaatgtgtcgtcttgaaagcctcattcagtccttgaagatgaacatcttccggctgcaaactgaaaaggatttgaatcctcagaaaacagnagcttttctgaaagatcgactgaatacagtacaggaagagcattctaaggacctgaagctgttgcatcttgaagtgatgaatttgcgccnnnnnnnnnnnnnnnnnnnnnnnnnnnnnnnnnnnnnnnnnnnnnnnnnnnnnnnnnnnnnnnnnnnnnnnnnnnnnnnnnnnnnnnnnnagaagaatgcagccattgttgaagaggaactgaagaccacaaaacgtaaaatgaaccttaaaattcaagaggtaag

SEQ ID NO: 30254 - DNA, 245 bp, Macaca Mulatta
cttgactctttctgttgtttctctcaatatccccaagcagtgtgattgtttggcttatatacagacagagatggccatgtgttacccgaattttggctgtgtctcccttcatccttcttgaatgagaatgaaaattcttgataaagaagaatccgtggtctagacaaaaaaaagatggtgagcaatcctgcaagagcaaggtacaaaaacaagtcctcagtggttggcaattttttcaaccagtt

SEQ ID NO: 30255 - DNA, 828 bp, Macaca Mulatta
  misc_feature (1)...(828): n = A,T,C or G
gggctctttcccatcttgcaagatggcgggtgaaaaagttgagaagccagatactaaagagaagaaacccgaagccaagaaggctgatgctggtggcaaggtgaaaaagggtaacctcaaggctaagaagcccaagaaggggaagccccattgcagccgcaaccctgtccttgtcagaggaattggcaggtattcccgatccgccatgtattccagaaaggccatgtacaagaggaagtactcagccgctaaatccaagnnnnnnnnnnnnnnnnnnnngaaggttcttgcaactcttacaaaaccagttggtggtgacaagaacggcggtacccgggtggttaaacttcgcaaaatgcctagatattatcctactgaagatgtgcctcgaaagctgttgagccacggcaaaaaacccttcagtcagcacgtgagaaaactgcgagccagcattacccccggggaccattctgatcatcctcactggacgccacaggggcaagagggtggttttcctgaagcagctggctagtggcttgttacttgtgactggacctctggtcctcaatcgagtttcctctacgaaagaacacccccgaaatttgtcatttgccacctcaacccaaattcgatatccgcagtgtccaaaatcccaaaaaaatcctttaccgattgcttaacttcaagaaaaaaaaaactggcggaaagccctagaacaccccaggaagggggagaatctttccgcctccggaaaaaagagagaaatcccgagatttccagaagacatcgccaaggaatttgttaataaaaggctggtgggaacttccc

SEQ ID NO: 30256 - DNA, 550 bp, Macaca Mulatta
  misc_feature (1)...(550): n = A,T,C or G
tggagatccctgggagcctgtgcaagaaagtcaagctgagcaataacgcgcagaactgggnnnnnnnnnnnnnnnnnnnnnnnnnnnnnnnnnnnnnnnnnnnnnnnnnnnnnnnnnnnnnnnnnnnnnnnnnnnnnnnnnnnnnnnnnnnnnnnnnnnnnnnnnnnnnnnnnnnnnnnnnnnnnnnnnnnnnnnnnnnnnnnnnnnnnnnnnnnnnnnnnnnnnnnnnnnnnnnnnnnnnnnnnnnnnnnnnnnnnnnnnnnnnnnnnnnnnnnnnnnnnnnnnnnnnnnnnnnnnnnnnnnnnnnnnnnnnnnnnnnnnnnnnnnnnnnnnnnnnnnnnnnnnnnnnnnnnnnnnnnnnnnnnnnnnnnnnnnnnnnnnnnnnnnnnnnnnnnnnnnnnnnnnnnnaggatcgcaacaatgcaaggcagattcatgagggtgcaagtttaccgttttttgaagtatttgttgatgctcctctgcatgtttgtgaacagagggatgtcaaaggactctacaaaaaagcccgggcaggagaaattaaagg

SEQ ID NO: 30257 - DNA, 169 bp, Macaca Mulatta
gtgggctggcagctttcaaagctttcttgaagtctgaatatagtgaggagaatattgacttctggatcagctgtgaagagtataagaaaatcaaatcaccatctaaactaagtcccaaggccaaaaagatctataatgaattcatctcagtccaggcaaccaaagaggt

SEQ ID NO: 30258 - DNA, 2040 bp, Macaca Mulatta
  misc_feature (1)...(2040): n = A,T,C or G
cagagcggagcgcggctccctgccccgcccctccccctcggcctcgcggcgacggcggcggtggcggcttggacgactcggagagccgnnnnnnnnnnnnnnnnnnnnnnnnnnnnnnnnnnnnnnnnnnnnnnnnnnnnnnnnnnnnnnnnnnnnnnnnnnnnnnnnnnnnnnnnnnnnnnnnnnnnnnnnnnnnnnnnnnnnnnnnnnnnnnnnnnnnnnnnnnnnnnnnnnnnnnnnnnnnnnnnnnnnnnnnnnnnnnnnnnnnnnnnnnnnnnnnnnnnnnnnnnnnnnnnnnnnnnnnnnnnnnnnnnnnnnnnnnnnnnnnnnnnnnnnnnnnnnnnnnnnnnnnnnnnnnnnnnnnnnnnnnnnnnnnnnnnnnnnnnnnnnnnnnnnnnnnnnnnnnnnnnnnnnnnnnnnnnnnnnnnnnnnnnnnnnnnnnnnnnnnnnnnnnnnnnnnnnnnnnnnnnnnnnnnnnnnnnnnnnnnnnnnnnnnnnnnnnnnnnnnnnnnnnnnnnnnnnnnnnnnnnnnnnnnnnnnnnnnnnnnnnnnnnnnnnnnnnnnnnnnnnnnnnnnnnnnnnnnnnnnnnnnnnnnnnnnnnnnnnnnnnnnnnnnnnnnnnnnnnnnnnnnnnnnnnnnnnnnnnnnnnnnnnnnnnnnnnnnnnnnnnnnnnnnnnnnnnnnnnnnnnnnnnnnnnnnnnnnnnnnnnnnnnnnnnnnnnnnnnnnnnnnnnnnnnnnnnnnnnnnnnnnnnnnnnnnnnnnnnnnnnnnnnnnnnnnnnnnnnnnnnnnnnnnnnnnnnnnnnnnnnnnnnnnnnnnnnnnnnnnnnnnnnnnnnnnnnnnnnnnnnnnnnnnnnnnnnnnnnnnnnnnnnnnnnnnnnnnnnnnnnnnnnnnnnnnnnnnnnnnnnnnnnnnnnnnnnnnnnnnnnnnnnnnnnnnnnnnnnnnnnnnnnnnnnnnnnnnnnnnnnnnnnnnnnnnnnnnnnnnnnnnnnnnnnnnnnnnnnnnnnnnnnnnnnnnnnnnnnnnnnnnnnnnnnnnnnnnnnnnnnnnnnnnnnnnnnnnnnnnnnnnnnnnnnnnnnnnnnnnnnnnnnnnnnnnnnnnnnnnnnnnnnnnnnnnnnnnnnnnnnnnnnnnnnnnnnnnnnnnnnnnnnnnnnnnnnnnnnnnnngaaggtgatgcttccgacaggagccgccttccggtggtttcagtgacggcggcggaacccaaagctgccctctccgtgcaatgtcactgctcgtgtggtctccagcaagggattcgggcgaagacaaacggatgcacccgtctttagaaccaaaaatattctctcacagatttcattcctgnnnnnnnnnnnnnnnnnnnnttgtcgttttaacatctccacgtccctagnnnnnnnnnnnnnnnnnnnnnnnnnnaactgctttttcggaagaacaacaacaaaaaagaggtaaagacgaatctataaagtaccgagacttcctgggcaaagaatggacaatcagtttccttcctgtgtcgatgtcgatgttgtctgtgcaggagatgcagtttttgtgtagagaatgtaaattttctgtaaccttttgaaatctagttactaataagcactactgtaatttagcacagtttaactccaccctcatttaaacttcctttgattctttccgaccatgaaatagtgcatagtttgcctggagaatccactcacgttcataaagagaatgttgatggcgccgtgtagaagcccctctgtatccatccacgcgtgcagagctgccagcagggagctcacagaaggggagggagcaccaggccggctgagctgcacccacagtccccagactgggatcccctaccccaacagtgatgattttgaaaaaaaaaatgaaagttctgttcgtttatcctttgcgatctggggagccccgtctcgatatttccaatcctggctacttttcttagagaaaataagtcctttttttctggcctctctaatggcaacagaagaaagggcttctttgcgtgg

SEQ ID NO: 30259 - DNA, 386 bp, Macaca Mulatta
gtctaaaccttacatgtgtaaaggctttatgttcactgtgagtgaaaatttttacattcatcaatatccttcttgtaagtcttaataaatattatagtgaattacctgtctcaatatgtcacttaattggagtggtttattctcgataatgtgcaatggaaaaaatatgcagcaatattaatactgcattggggcctcaaggtttcctatacttgttaaaatctttttcttaaggaaagaaagtaaatactacctcaagattctctcttccagaatttcattaaaatcaggagatgttccaaggaaattattctgtcattttcttaaggaaatatgttcaggaaatgagaatagcattaagaaaaagtttacctatagatgaccta

SEQ ID NO: 30260 - DNA, 170 bp, Macaca Mulatta
caagcccatgtgtatggatgcctagggagtggggaagactgcctccttgccctttctggatatggggagggcacccagggcaaaggatgtacacgctacaggcttgtttggtaccttttgcgatactgggtgggtgtgacctccccccctgtgtaggcagggttagcccc

SEQ ID NO: 30261 - DNA, 482 bp, Macaca Mulatta
  misc_feature (1)...(482): n = A,T,C or G
ggaaaaacatataagcattgaagaagagcacttaaggaggaccgaagaggccagattgcagctcaaggatcaacttctttgcttggagactgaacaggaatccattcttggtgtgataggaaaggaaattgatgcagcctgtaaaacattctccaaggactcaatggagaaattaaaagtnnnnnnnnnnnnnnnnnnnnnnnnnnnnnnnnnnnnnnnnnnnnnnnnnnnnnnnnnnnnnnnnnnnnnnnnnnnnnnnnnnnnnnnnnnnnnnnnnnnnnnnnnnnnnnnnnnnnnnnnnnnnnnnnnnnnnnnnnnnnnnnnnnnnnnnnnnnnnnnnnnnnnnnnnnnnnnnnnnnnnnnnnnnnnnnnnnnnnnnnnnnnnnnnnnnnnnnnnnnnnnnnnnnnnnnnnnnnnnnnnnnnnnnnnagatctactggaagagacccaaagaaaagatgaagaaatgggatctctgcagg

SEQ ID NO: 30262 - DNA, 550 bp, Macaca Mulatta
aaaccacaactgcttcttttatatgtgccttaacaatgatattatttatcatggcaagtggtagaaagactgttgtccttttacataattgttttttaggatttgcttttgatacctatatcaatttataattctttgtttgaaatgaagtatttacatggttcattgaagagacagattggttatttcatactgataagcattctactcctatttgttatgcattttccttagtgatagattttacttgtactgaacctgaaaatataaaggagaatacatttgtaaattattttaaatggccaacactgtgatttgttttatttaaatagaagtctctgtaccagtaagattaatacagtatgtgaatgtctatttttttatatcataactcaatgaatatatgaaagataatacatgaatatattacattattcatttttagacataagtttatttcaagaagtttttctaattgtagatgttgttttttattctttccttgtatctaaatataaatcaaccattaaaatcgttctaactttaacct

SEQ ID NO: 30263 - DNA, 596 bp, Macaca Mulatta
  misc_feature (1)...(596): n = A,T,C or G
cctttcttgttcatggagagctctatgttttaggaagattgtaaacatgattgtctccaccagcctaatcaacctaactaatctcattgttgaagggcaaacctcataggagaaggtaactgaattggcaagtacagagtttaaaagcatggctataaagcacgaatattatcttaaacatactccagtcttcagaaaaccatagctaatgtgacagaagcagacctgactaaaacctgacccagctccatgtatttagttggcttaaggtaaatttcattttccatttcattttaaggttttgtcagtttataggacttttttgtctgtaaaggaaggagagtggaggaggggctgctttgagacagcatggcctctgatgcaaacagatagtttgatgttattataaacgttcaaaattctgtgcagaacagatgctctatgctttctttttgcctctgntggnnctcttttggctctcntagaagcaccnangcctgtgtagtcacctctggcactctcattctgctccccaggncacagctgaagtcccagaatgtcccannggctgcanctggtgtggatgcagncccaaa

SEQ ID NO: 30264 - DNA, 793 bp, Macaca Mulatta
gcattaaatcaacaaaattttactaagtattaccctattttgttctagacgagggtgcctttgggaatatagtaaagaaactgcactgcatatagtctctactgccatgaaaaacactgtctagtaatggtgacatgtaagtaaaaataagcacaatactatgtgatcacatatgtgatattataacaggaaatttataagatatgggaataccacaggctgattaacaaatttgaaaagaacagaaaaatttttttcagagaaagcaatatctacagaaaaacttaaagggtaagtaggagcaaataaacagaagaggataggatagaggtatgtggagaagaggcaggggaattcaaacttgagagaaacacatgggcttaggtctgtgtgagcacagttccaaggaagaaggccttaagatgaatctaaaagcaaaagcagaagccaaataatacagtgttgtataataggcaatgtgtgtcttaatacaggcaatcctcacattgcagttctgatatgcaaaaatttcagataccatgattgtactaaataacaccagtcccccacaacacagttcaaatgccaatgaccccagtattatatattaaactatgagtaattgtataaagtacaaactctgctgctaactcatcagtccacaaatcactatataaataacagatgtgcatcatgatcagtgaccaatcacatcggttctgtcagtgacaggtcactcactgcaaattggtgttcttcagggcatgcacagacaggaaaccatggagttgcc

SEQ ID NO: 30265 - DNA, 551 bp, Macaca Mulatta
  misc_feature (1)...(551): n = A,T,C or G
aatgacatctaccaaggagtgtttccttcagaagcctgatcctaagaattccaggggctccttggccaaaaggcagattcctcagctccccactgaacaggcaaaatcgagaccccaggaaaggggcttaggactctgcatgttgctgaggaaaatctggaaaccctaatttagagtcctttcgagtcctgccactttggaaccagaataaactcaccatctacctgtactctgagctgtattcctttagctaaagcaagatgtgagtttctagaaaaataaattgttcttctgcttcatccctggtgttttagggggagctgaatgggcagaaaggccttgtgccctcaaacttcttggaagaagtgcctgacgatgtagaagtctatctttctgatgctccatcccactactctcaagatacaccaatgcgctcaaaggcaaaaagggtaagcaaacctatttagccttttaaatctctgtcccgttctgccatatgtggtctaantacatctctgcactggtatttttatatcttgggncgaaaagca

SEQ ID NO: 30266 - DNA, 1709 bp, Macaca Mulatta
  misc_feature (1)...(1709): n = A,T,C or G
aacagctccacaggaaaaggaagcttattatggattccaaagagcgtttggannnnnnnnnnnnnnnnnnnnnnnnnnnnnnnnnnnnnnnnnnnnnnnnnnnnnnnnnnnnnnnnnnnnnnnnnnnnnnnnnnnnnnnnnnnnnnnnnnnnnnnnnnnnnnnnnnnnnnnnnnnnnnnnnnnnnnnnnnnnnnnnnnnnnnnnnnnnnnnnnnnnnnnnnnnnnnnnnnnnnnnnnnnnnnnnnnnnnnnnnnnnnnnnnnnnnnnnnnnnnnnnnnnnnnnnnnnnnnnnnnnnnnnnnnnnnnnnnnnnnnnnnnnnnnnnnnnnnnnnnnnnnnnnnnnnnnnnnnnnnnnnnnnnnnnnnnnnnnnnnnnnnnnnnnnnnnnnnnnnnnnnnnnnnnnnnnnnnnnnnnnnnnnnnnnnnnnnnnnnnnnnnnnnnnnnnnnnnnnnnnnnnnnnnnnnnnnnnnnnnnnnnnnnnnnnnnnnnnnnnnnnnnnnnnnnnnnnnnnnnnnnnnnnnnnnnnnnnnnnnnnnnnnnnnnnnnnnnnnnnnnnnnnnnnnnnnnnnnnnnnnnnnnnnnnnnnnnnnnnnnnnnnnnnnnnnnnnnnnnnnnnnnnnnnnnnnnnnnnnnnnnnnnnnnnnnnnnnnnnnnnnnnnnnnnnnnnnnnnnnnnnnnnnnnnnnnnnnnnnnnnnnnnnnnnnnnnnnnnnnnnnnnnnnnnnnnnnnnnnnnnnnnnnnnnnnnnnnnnnnnnnnnnnnnnnnnnnnnnnnnnnnnnnnnnnnnnnnnnnnnnnnnnnnnnnnnnnnnnnnnnnnnnnnnnnnnnnnnnnnnnnnnnnnnnnnnnnnnnnnnnnnnnnnnnnngaggttgcctcatggttttctgccaaatatgaaacttgaagttgtggataaacggaaccccaggttaattcgtgttgctacgattgtagatgttgatgaccaaagagtaaaggtnaggttcattttgatggttgggaccataagtatgactactgggtggaggcagacagccctgacatccacccgatcggatggtgtgatgtcacagggcatccactggaagtgccgcagcgnnngaatgacctgaagatccttccaggtcaagctgtctgtcctactcccgggtgccgaggaataggccatatccgtggtccacgttattcaggacatcacagncagtgcttttggctgcccatattcagacatgaacttgaaaaaggaggcaacacttcatgatcgtttgagagaacaaacacaggcaaatttggaatcagactcttcacattcgaaatcaaaaaacctctgtagtttgaacttcaatggaaaacatgaaaaggtgaacagtcaacccagnnnnnnnnnnnnnnnnnnnnnnnnnnnnnnnnnnnnnnnnnnnnnnnnnnnnnnnnnnnnnnnnnnnnnnnnnnnnnnnnnnnnnnnnnnnnnnnnnnnnnnnnnnnnnnnnnnnnnnnnnnnnnnnnnnnnnnnnnnnnnnnnnnnnnnnnnnnnnnnnnnnnnnnnnnnnnnnnnnnnnnnnnnnnnnnnnnnnnnnnnnnnnnnnnnnnnnnnnnnnnnnnnnnnnnnnnnnnnnnnnnnnnnnnnnnnnnnnnnnnnnnnnnaggtggctgagtttgtacagtctcttctgggctgtgaagaacatgccaagtgctttaagaaagag

SEQ ID NO: 30267 - DNA, 720 bp, Macaca Mulatta
  misc_feature (1)...(720): n = A,T,C or G
ggatcttgagaaatttgggacataaaagttttcatagtagacaggtcatgcagtatatgaattgacataatggaaaaatctgattttatttttacaactagtgaatccattccccttcatttaaacaccttttgtgttttacttcagtgaggagattggagtctgaatggatctgttttccaagagattctgagaaattttttgtattcaacagttggaaagctctctattctagctgataaaacttcccttttttttgatgtagatgcagatattctatacagttctgttgtcttttactaggactgttaacttttatgataaaattcaaataagattttatttcttggtaattttggctttcacaatttatctttaaatccttgagcaatctgtatgcaattaagagatttctgacatttattcttacactaagtggatcaactctaggatttaggcacgttaactttatttctgttgtgttttgaatctctccggagttgcatgtagatagcattgatttctgtgtacttaaacccatttagaaaataactacaaagtanaaatggagaggaaatcgaaatgtattttttcatgaacattttgatacaaagttcatcattatgtccatctgtatgatagctatcaaagactcttgtaggcttaacctaaacagtgccatatacgatccacctaatattatgaaatggtttaacggtt

SEQ ID NO: 30268 - DNA, 249 bp, Macaca Mulatta
accttaagtgctgagatcctcatttatgtttgtagttggaaagcaaaactagccatttcttctgctataccaagttataatagcattcatttccctttatatttccctgaaataaagcactacccaattctgcagtgtttgctttggtaacttctattcctatcacaaggaaactgagagggatcagatgcttctattcactccctgggggagctccactggctataatgaaatttcttttatatttat

SEQ ID NO: 30269 - DNA, 959 bp, Macaca Mulatta
  misc_feature (1)...(959): n = A,T,C or G
tccacttgttatttcttgaaatctttctttatcaatatgtattgagctctcttgttcatttgaatacccctgtgtttctgatttgaattccagtgggtattaatgtcagggataggcgttttggttttccctaggccttttttcattgttacaatagtgctcatattggtacatgtgacccaccaaaaaggtagcatagattaagggtggcgttgcatagtcagcgtgtctgtcctggggtagtaatggagagcacctgttcttctcccaccccaggtgccttcaggacaatgagtggaactacactagagctggtcaggtcttcactatgctccaggtgaggtctgggaatcaagtgggtaaaagacagctgtctctgggtcgtcaggagggccaagaagatggaggccgggtagtgtggggatggaacccagggcacctggctttattaacatcccaactcctgttctttactttctctagaccgagggcaagatcccagcggaggccttcaagcaaatctcctaaaaggagcccttcgatgtcttctttgtcttcgttcacatcctctttgtttccttttttcaccagcgtaaggcctggctgaccaggaagccagagttaacttgcaggccgcatgacataaccacccagagagccagttgctctgtgtattcgccccactcatgatcaccgttttattttcataataaagggtgacgttacatgttgtatgttgtgtgccctggattgctcttcccctgccccaaccgtgagccagcggggccaggactgaaagcactgcatccctgttcatccctggctggccttagcagatacatcaatctggcttgccttcatnaggtattttgtcaataaatcctgatgaagaaggacacacgctccttccagaagatggccttgagagacagtgggactctgtcagatgctcgacctgn

SEQ ID NO: 30270 - DNA, 789 bp, Macaca Mulatta
gggctcgcacccggaacaacaaagcaaggaagacggagtccgagcctcgggggctcctagcaacgggccggggcgggagttccatggagactggggagcgcgcccgtctcatcctcatccttgtcctccagcttctccttcgcatccgacgcaaccggcagcagcgctgccgccgcgtcctcagccaccgctccctcttcccacggatgtgatcttcgtggtggaaagctaaattttaaaaccaccccaatggatgcagacagtgatgttgcattggacattctaattacaaatgtagtctgtgtttttagaacaagatgccatttaaacttaaggaagattgctttggaaggagcaaatgtaatttataaacgtgatgttggaaaagtattaatgaagcttagaaaacctagaattacagctacaatttggtcctcaggaaaaattatttgcactggagcaacaagtgaagaagaagctaaatttggtgccagacgcttagcccgcagtctgcagaaactaggttttcaggtaatatttacagattttaaggttggtaatgttctggcagtgtgtaacatgccatttgaaatccgtttgccagaattctcaaagaacaatagaacctcatggccagttatgaaacctgaacttcatccctgctgtgggctatccggataaaaatccctaaggagctacggttaaccggatttctttccaaccggaaactaatccccagtaaaccgggggcccaaatggtaaaaggcgcggttggcctacctggcgggt

SEQ ID NO: 30271 - DNA, 754 bp, Macaca Mulatta
gggggtctttaccacctggagctggtggacagcagccagtgtgtctggacatcgcaggagcgttgagactacatgtcacataaccacttttcacacatctgcttttggtgcctggtgaaaaatagaccttggcctcacaatgtgactgtctccgccacctcagtgtagggatggggtccaggccagtgaaggagcaccctctagtggaggcgggggtgaattcttatgtcgagctgatgcaagaatctctagtagccagcctgtgtgaccttgtacatgagtttggtgtgcctattgtgatttaaaacaggtgggttatcaagaggaacttgggatctctttattacgtggacatttacttcaggggggaccgttgtaagaaaagccaaactccaagatcaagtgaggtgagtcttaaattttttagaagatttcactgaggagttctgtccaccctttgccctaatgaatttgaatgggtttaatttgcgaatttggatttagacccattgtttttgaagcacatcagctgaataaagttgaggtttattttacctagaaaatcacattttgtaatggaatttgatactcatttttataactaatggccccccttttttatgtttctagaccagaagattctcaaacactactcacatggcccagggcctggggcttggctggctttcagaagcagtgggggaaaacttttttaaaatttacaatatttccctggggggccttaccccccaaa

SEQ ID NO: 30272 - DNA, 859 bp, Macaca Mulatta
caaaagtatattttaccaaattgctgtaaagtataaatagcctaaaagagaaagttcacaaatctggagattaaaacattcaaagaatcaacacattctcaaataaaatattatgaaaacattatcgttttgattatttagtgcaataaaactgaggtttttttcttctttgtcttgaatttcatgaaggtatcagactgttcattaaaattttgaaagttctcagagagtccagtggtatgatcttgaagttatcaaaacttgtattcaagagtcgttgtcagaatgttttccatatatctcctcaaagaaaaagcaattttggactgtagctgattataaatacttcaaggaagaatcaaagcaactatctgtcagtcttcccgaaatacagaaatgacatcatggctgctatattggactaacgccattatggacgtcctattgttgaacgagtcacgactgtgatcctcttgaatgtggaacgttcgctgccagtggctgagttacgagcagagcaaccatagagcccactatgctttgtagtaatttgggggatagagagcttttgtcctgattgcagaaacttcccattcatcgtccaagaatactctgccggtgggttagagttcgcgaagcaagacaattacgagggtatatcctgaacggtaatagttaaatggagagacaatcctggggacttgtggaccatggtacaaggtgaatgtacagttactcctttagtctcctccattcgattcatgatttttcggttggatcctgtgtcctgcttggtgacttccggatcagcagggatccattggaatatagtgtttctcttccactgtatgcataccca

SEQ ID NO: 30273 - DNA, 591 bp, Macaca Mulatta
  misc_feature (1)...(591): n = A,T,C or G
ccttgcagccctttcactctgcgattcgtgtaagtgtgactcgatttcagggaaagggaattcgcgtggtctgagaaggaggccggagtggacgggctggggaaggcaccgtgatgccctcaaccccgtccctgaaagtggtccacgagctgcccgcctgtaccctctgtgtggggccgctggaggnnnnnnnnnnnnnnnnnnnnnnnnnnnnnnnnnnnnnnnnnnnnnnnnnnnnnnnnnnnnnnnnnnnnnnnnnnnnnnnnnnnnnnnnnnnnnnnnnnnnnnnnnnnnnnnnnnnnnnnnnnnnnnnnnnnnnnnnnnnnnnnnnnnnnnnnnnnnnnnnnnnnnnnnnnnnnnnnnnnnnnnnnnnnnnnnnnnnnnnnnnnnnnnnnnnnnnnnnnnnnnnnnnnnnntgtgtgttctgcagagaaggtcccacccaccaggcgcacaccgtgggatttctggacgaagccattcagccctaccggngatcgtctcaggagtcgactggaagctctgagcatggagagagatgagattgaggatgtaaagtgtcgagaagaccagaagcttcaagtgctgctg

SEQ ID NO: 30274 - DNA, 615 bp, Macaca Mulatta
atacacgaaaatgtttattactagtaacctgagtgttggagtatggtattatcagtaattttctgaacttctatcatatacacattctgtttttgtaataacaagattattttgaatcttttagattaataaactaattttaattttggaatgccgatacagctatattttctatgttcaaatgaaaagtttgtttcctttaaattaggtgacttgggcagatttctactgggagatttgcagtaccacgcttttggtctttaaacctgacctgttggacatccatccaaggctggtgactttacggaagaaagtccaagccattcctgccatcgctaactggataaaacgaagaccccaaaccaaactctagttgatccatgttgccttcaagtttgttgttctcggggcatctctcttaccagataagacaggtacatcagcctgccagataatccatatgctcccttcccaactccaccaagatttccactttaagccatattctgatttttaaaaaggaaaacacaaacacaagcaaatctttctgcagtacctttttctttcagaatagcttcgcatcatttacaatggcggaaaaatagtatgtaatac

SEQ ID NO: 30275 - DNA, 820 bp, Macaca Mulatta
ctctgcctcccctcacagagcccgaggaggctgctgggtgagaggggcctccacgtcctgggcggtggctgtgcccacgggggccaggcactaactcggtgcccttcctccgcctccttcctccacaggatcctcagctacaatgccctgcagtgcatcccgcctctggctttccagggactccgctccctgcgcctgctgtaagtctcctcactcgccatcccgccaggaaatccaccccaccgagggtcccgccacccacctggtggacagaaatgttctcatgtctagggtccacactgtgccgtggtggagtccagagcgttgtcacttaagctcctgtggatactctcattcccaagaagctagggcgtgcataggaaatgatctgagaaatgggggttgctgtcacccccaagatgagtttgtggtgttggcggggggacatccaaaataaggtggcccttcatttgcatgtgagacttctgttcagatttaaaaatgtttgcaagggatttgtgaacctcttctatgagttctcactgggaggttttgccctgggatcaaagccctcgatccgtccatgatgatggcctcagtcagcccaccagggtcaaggtgacgttctcccagccctaacctgtggctggccttcttaacttccttactaagaagaagtgcctcccacttaggctcctctgctaaaagagggagggctgtgggtgcacaggtcctgtttgtaatataaacgcggtgtttcagtcctttgaagggctgggggacagggcggtccacctcaagggtttcttccctgtggcca

SEQ ID NO: 30276 - DNA, 668 bp, Macaca Mulatta
  misc_feature (1)...(668): n = A,T,C or G
ggggagtgcagtctgggggatcgtttcctggtcctcgcctcctccgcagtctccctggagttcttgcaaggcggccaggatgtctcaggctgagtttgagaaagctgcagaggaggttaagcgccttaagaccaagccagccgatgatgagatgctgttcatctatggccgctacaaacaagcaaccgtgggcgacataaatacagaacggcccgggatgttggacttcacgggcaaggccaagtgggatgcctggaatgagctgaaagggactaccaaggaagatgccatgaaagcttacatcgacaaagtagaagagctaaagaaaaaatacgggatatgagtgactggatttggttactaggccatgtgtttctcctaaactgagacaatgccttgttttttctaataccatggatggtgggaattccggaaaataaccagttagcccagctactcaaggctgctcaccatacggctctaacagattagaggctaaaacgattactgaccttccttgagtagtttttatctgagatcaattaaaaagtgtatttgttactgtggnaccaattcataatttttactgcancctttgtcggcccccccccgcccctcnnnnnnnnnnnnnnnnnnnnnnnnnnnnnnnnnnncatggaatttgntgt

SEQ ID NO: 30277 - DNA, 1139 bp, Macaca Mulatta
  misc_feature (1)...(1139): n = A,T,C or G
tcggcacgagcggaccttacaggnagccatgattatccagccaagaagatgaaaactacagagaagggatttggcttggtggcttatgccgcagattcatctgatgaagaggaggaacatggaggtcataaaaatgcaagtagttttccacagggctggagtttgggataccaatatccttcatcacaaccacgagctaaacaacagatgccattctggatggctccctaggaaacagtggaacagagttttgaccctcagtgactcttcttagcaataatgcatgcatttgatttaacaagactctggggcctgtgctgggaaccaacctggactttgcagaagtttgagattcagtgccgccctttcttaaaggggttccttaacaacaacaacgacaaatatccttatttctgcagtggcatagaatctgttaaaatttaattagaatcacaaacttgtctcagaagctttttaacagttcgtgaaatgtgcttgtccaacaaagcattctaacagggtcgttcccatacacttttgacctggtccagccttttccaaatgaatagaccccaattctgacataaagaaagttttatttgtattttactactgctttggtcaattttgatacatatctggttacacacaagagccttactattttattagttgggggaaattttttttaagacccggccgttttcagtattttaattcctgacagaattctgcatcccctggtttcattattggaaatacgtttcggggttagggcaaaaaggctggtcttacttttaaaaactgttggggatagaatatgggaatccctggtataggaaaaaaatgcaagataatctcgcccacantttttagggttttaacttgggggaggaaccccacaaatttgggcacctttgctggtaaactttggtattttataacgccaataaattgtttcttcaatagaccccttttataagaaccctggtcattcacgtacggggaccagaaaaaatattatctccataatctaaaaaacggggttcaagaaacttagatccgcacaaaaaggaaatcgcctgcggggtggtgtttctactctgtgaaaccctgtttttcagaacacaagacatggg

SEQ ID NO: 30278 - DNA, 89 bp, Macaca Mulatta
ccctaccggcacagcagcgaggcgcagttggattaccgtgtgcctccgacccccagcatcaagttgccgccggaagagcggctcatctg

SEQ ID NO: 30279 - DNA, 681 bp, Macaca Mulatta
  misc_feature (1)...(681): n = A,T,C or G
nnnnnnnnnnnnnnnnnnnnnnnnnnnnnnnnnnnnnnnnnnnnnnnnnnnnnnnnnnnnnnnnnnnnnnnnnnnnnnnnnnnnnnnnnnnnnnnnnnnnnnnnnnnnnnnnnnnnnnnnnnnnnnnnnnnnnnnnnnnnnnnnnnnnnnnnnnnnnnnnnnnnnnnnnnnnnnnnnnnnnnnnnnnnnnnnnnnnnnnnnnnnttcaaagcctttatttttatgttatctatttagaaacttaacaaaatgactacgtctttatacatttctatagaaatcgattacagatttctgtaaattgaggcagcatgacaattccaggtaactttagaacagagttgaataaatcacagtaattggactaaaacattacacagataattgtgtaattttagaacttacttgcatagttaacactgtataatactcttataaaatatatgcctacaacgaagtttcctgggaatcattaagcaagcaacataattatttttctgtagtaattcagatcaagtatgtagtacaatttatcattgtgctgttagaaacttaaaagttttaaagtgctgtcagcagagtacaccagcacttgaaagaatgctgttaagacacacagctgccagtgagcaggagagaaaaaggcttaaaaaagccaaattccagaatgggtttgacttt

SEQ ID NO: 30280 - DNA, 115 bp, Macaca Mulatta
ggggtgctggcttgcttggatggctacatgaatatagccctggagcagacagaagaatatgtaagtggacaactgaagaataagtatggggatgcatttatccgaggaaacaatg

SEQ ID NO: 30281 - DNA, 3708 bp, Macaca Mulatta
  misc_feature (1)...(3708): n = A,T,C or G
agtattacagagaggcttgaacatgctttggaaaaggcagctcctctccttcgtgagatttttgtggattttgcaccttttctttctcgtacacttnnnnnnnnnnnnnnnnnnnnnnnnnnnnnnnnnnnnnnnnnnnnnnnnnnnnnnnnnnnnnnnnnnnnnnnnnnnnnnnnnnnnnnnnnnnnnnnnnnnnnnnnnnnnnnnnnnnnnnnnnnnnnnnnnnnnnnnnnnnnnnnnnnnnnnnnnnnnnnnnnnnnnnnnnnnnnnnnnnnnnnnnnnnnnnnnnnnnnnnnnnnnnnnnnnnnnnnnnnnnnnnnnnnnnnnnnnnnnnnnnnnnnnnnnnnnnnnnnnnnnnnnnnnnnnnnnnnnnnnnnnnnnnnnnnnnnnnnnnnnnnnnnnnnnnnnnnnnnnnnnnnnnnnnnnnnnnnnnnnnnnnnnnnnnnnnnnnnnnnnnnnnnnnnnnnnnnnnnnnnnnnnnnnnnnnnnnnnnnnnnnnnnnnnnnnnnnnnnnnnnnnnnnnnnnnnnnnnnnnngtcgtcctcgtgagttctggcgccttgactactgggaagatgacttgcggcgccggcgacgatttgtgcgtaaccctctaggatcgacacatcctgaagcgacactaaaaacagccgtggaacatgnnnnnnnnnnnnnnnnnnnnnnnnnnnnnnnagccacagatgaagatatccttgctaaaggaaaacagtccatcaagagtcaggctttaggaaatcagaactcagaaaacgagatcctcctggaaggcgatgatgatactctgtcatccgtggatgagaaagatttagagaatcttgnnnnnnnnnnnnnnnnnnnnnnnnnnnnnnnnnnnnnnnnnnnnnnnnnnnnnnnnnnnnnnnnnnnnnnnnnnnnnnnnnnnnnnnnnnnnnnnnnnnnnnnnnnnnnnnnnnnnnnnnnnnnnnnnnnnnnnnnnnnnnnnnnnnnnnnnnnnnnnnnnnnnnnnnnnnnnnnnnnnnnnnnnnnnnnnnnnnnnnnnnnnnnnnnnnnnnnnnnnnnnnnnnnnnnnnnnnnnnnnnnnnnnnnnnnnnnnnnnnnnnnnnnnnnnnnnnnnnnnnnnnnnnnnnnnnnnnnnnnnnnnnnnnnnnnnnnnnnnnnnnnnnnnnnnnnnnnnnnnnnnnnnnnnnnnnnnnnnnnnnnnnnnnnnnnnnnnnnnnnnnnnnnnnnnnnnnnnnnnnnnnnnnnnnnnnnnnnnnnnnnnnnnnnnnnnnnnnnnnnnnnnnnnnnnnnnnnnnnnnnnnnnnnnnnnnnnnnnnnnnnnnnnnnnnnnnnnnnnnnnnnnnnnnnnnnnnnnnnnnnnnnnnnnnnnnnnnnnnnnnnnnnnnnnnnnnnnnnnnnnnnnnnnnnnnnnnnnnnnnnnnnnnnnnnnnnnnnnnnnnnnnnnnnnnnnnnnnnnnnnnnnnnnnnnnnnnnnnnnnnnnnnnnnnnnnnnnnnnnnnnnnnnnnnnnnnnnnnnnnnnnnnnnnnnnnnnnnnnnnnnnnnnnnnnnnnnnnnnnnnnnnnnnnnnnnnnnnnnnnnnnnnnnnnnnnnnnnnnnnnnnnnnnnnnnnnnnnnnnnnnnnnnnnnnnnnnnnnnnnnnnnnnnnnnnnnnnnnnnnnnnnnnnnnnnnnnnnnnnnnnnnnnnnnnnnnnnnnnnnnnnnnnnnnnnnnnnnnnnnnnnnnnnnnnnnnnnnnnnnnnnnnnnnnnnnnnnnnnnnnnnnnnnnnnnnnnnnnnnnnnnnnnnnnnnnnnnnnnnnnnnnnnnnnnnnnnnnnnnnnnnnnnnnnnnnnnnnnnnnnnnnnnnnnnnnnnnnnnnnnnnnnnnnnnnnnnnnnnnnnnnnnnnnnnnnnnnnnnnnnnnnnnnnnnnnnnnnnnnnnnnnnnnnnnnnnnnnnnnnnnnnnnnnnnnnnnnnnnnnnnnnnnnnnnnnnnnnnnnnnnnnnnnnnnnnnnnnnnnnnnnnnnnnnnnnnnnnnnnnnnnnnnnnnnnnnnnnnnnnnnnnnnnnnnnnnnnnnnnnnnnnnnnnnnnnnnnnnnnnnnnnnnnnnnnnnnnnnnnnnnnnnnnnnnnnnnnnnnnnnnnnnnnnnnnnnnnnnnnnnnnnnnnnnnnnnnnnnnnnnnnnnnnnnnnnnnnnnnnnnnnnnnnnnnnnnnnnnnnnnnnnnnnnnnnnnnnnnnnnnnnnnnnnnnnnnnnnnnnnnnnnnnnnnnnnnnnnnnnnnnnnnnnnnnnnnnttccagctcatcaaggtgctgtacaagaccagccataccagctgccagtggaaatcgatcctctcatannnnnnnnnnnnnnnnnnnnnnnnnnnnnnnnnnnnnnnnnnnnnnnnnnnnnnnnnnnnnnnnnnnnnnnnnnnnnnnnnnnnnnnnnnnnnnnnnnnnnnnnnnnnnnnnnnnnnnnnnnnnnnnnnnnnnnnnnnnnnnnnnnnnnnnnnnnnnnnnnnnnnnnnnnnnnnnnnnnnnnnnnnnnnnnnnnnnnnnnnnnnnnnnnnnnnnnnnnnnnnnnnnnnnnnnnnnnnnnnnnnnnnnnnnnnnnnnnnnnnnnnnnnnnnnnnnnnnnnnnnnnnnnnnnnnnnnnnnnnnnnnnnnnnnnnnnnnnnnnnnnnnnnnnnnnnnnnnnnnnnnnnnnnnnnnnnnnnnnnnnnnnnnnnnnnnnnnnnnnnnnnnnnnnnnnnnnnnnnnnnnnnnnnnnnnnnnnnnnnnnnnnnnnnnnnnnnnnnnnnnnnnnnnnnnnnnnnnnnnnnnnnnnnnnnnnnnnnnnnnnnnnnnnnnnnnnnnnnnnnnnnnnnnnnnnnnnnnnnnnnnnnnnnnnnnnnnnnnnnnnnnnnnnnnnnnnnnnnnnnnnnnnnnnnnnnnnnnnnnnnnnnnnnnnnnnnnnnnnnnnnnnnnnnnnnnnnnnnnnnnnnnnnnnnnnnnnnnnnnnnnnnnnnnnnnnnnnnnnnnnnnnnnnnnnnnnnnnnnnnnnnnnnnnnnnnnnnnnnnnnnnnnnnnnnnnnnnnnnnnnnnnnnnnnnnnnnnnnnnnnnnnnnnnnnnnnnnnnnnnnnnnnnnnnnnnggtgcatcatttctggcatggcttcaggaagcatcgtgctattttacaacgactttaaccggtggcatcatgaataccaaacccgctactgatggtgacagctgtgcattcactctgcccctaggatgagcagaagtatctggagcatcattctcttctaccacatctgaatgtaacttaaatttgctcaaagcagcaaaatattttttaaagttattaataattgctatttttgtagtctttgcttgacttttttggggggattagcaaagcagaaaactggctgctgggttctgtagttttaaaaaatctatatttttagtcataatgagaagtctattttcaccaattatggaaacgtacagtggagcaagtaaaccacttattccagctataatattatgaagaacatttcccatgcatctacaagcttgagaaataggattttcacagtggggaagtgggttataatattggaatagaaaaatttgatgctgtaatttgggtcctgtatttttccaaactgtgcttcttcagcactaatatttctgggatttaaatagtaatgtttaaattatggtaaatgtaatttaaa

SEQ ID NO: 30282 - DNA, 586 bp, Macaca Mulatta
atgagttggagcttcctgactcgcctgctagaggagattcacaaccattccacatttgtggggaagatctggctcactgttctgattgtcttccggattgtccttacagctgtaggaggagaatccatctattatgatgagcaaagcaaatttgtgtgcaacacagaacagccgggctgcgagaatgtctgctatgatgcgtttgcacccctctcccatgtacgcttctgggtgttccagatcatcctggtggcaactccctctgtgatgtacctgggttatgctatccacaagattgccaaaatggagcacggtgaagcagacaagaaggcggctcggagcaagccctatgcaatgcgctggaaacaacaccgggctctggaagaaacagaggaggataacgaagaggatcctatgatgtatccagagatggagttagaaagtgataaagaaaataaagagcagagccaacccaaacctaagcatgatggccgacgacggattcgggaagatgggctcatgaaaatctatgtgctgcagttgctggcaaggaccgtgtttgaggtgggttttctgatagggcagt

SEQ ID NO: 30283 - DNA, 425 bp, Macaca Mulatta
acagaatcaggtaaaactgctatgtgattaaaatatttcaactcttcagcaattacctggttttctaacttgaatcatgcatctatttataattataattattttgtaaaagaagaaaaaattatgaatcttaaatatttgctccaagtttttctctgtaaaggtggagaggctgcctgtaattcatctccacatggagccaagtttaatgtttctagttcacattttgaacttccatcatgcttatttcagactccctgagtgatgggtaaacaatcaaatcaaacattgcctcagtggtatcaagagaactttggtggtggtttctttagaatcatgaagttctttttatagacaaatattttgatattattttccttatttttaatataaaggataggtttgaattatacttaaaatgcata

SEQ ID NO: 30284 - DNA, 387 bp, Macaca Mulatta
aagatatctagcaatattaaattgaaacattaataaatgtaatttgtattgactcattcatttttgaaaccttgaaatgtcttattaaaaggaagcaccaagtttcaggccaggagtggtggctcatgcctataatcccagcactttgggaggccgagacaggcggatcacctgaggtcaggaattcgagaccagcctggacaatatgatgagaccccatctctactaaaaatacaaaaattagctggctggtggtgtgtgcctgtggtcccggctacttgggaggttgacgcactagaatcgcttgaacctgggaagaggaggttgtagtgagccgagatctcaccactgcactccagcctgggtgacagagcgagaccctgtctc

SEQ ID NO: 30285 - DNA, 84 bp, Macaca Mulatta
gctgaccagtggtgagtacatcggagccctggctatgagtgagcccaattcaagctctgacgttgtctctatgaagctcaaagc

SEQ ID NO: 30286 - DNA, 600 bp, Macaca Mulatta
tgtatcccccagaaaggtgatgaataaatagaactgagagtcacagtgagtgtggcgtgcacatctgtgtcacatgacatacgtgagtctcagcatgtcacggtgggtggctgtgtctgaggacctccaggtgtcactctgagtgtgggtgttggtgacatgcattgcacgggcctgtctccctgtttgtgtaaacgtacccgagtgtactgtggcgtgttttgtgtctacacatgtcatgatgggggagatgtatctctgcacatgtgggtgtcaccgtgtgtgccctgtcactgtgcctgggtgaacggctgtgtcattataagtgtgccaagttatgtcaccctgtgtgctcagggcacatgcacacagacagtcatttatctctgcactcacattttgtgactcatgaagataaataaagtcaagggaaaacagcgtcgctatgggacctgttattggggcaactagaggggctttgggacctggggagagggagagtctgcacgtgacaatgaccccggggcacaagggtgggtgagactgagtgccctgcgtgagtacctgtgtgtctgtgaatgagtaactcgttccatgtgt

SEQ ID NO: 30287 - DNA, 143 bp, Macaca Mulatta
ggcaaatcggaggtggaagagtggtcagacatgtacactgtgaccagtcagctgatgctgaaagtgcacaaggaggacgatggggtcccagtgatctgccaggtggagcaccctgcggtcactggaaacctgcagacccagcg

SEQ ID NO: 30288 - DNA, 798 bp, Macaca Mulatta
  misc_feature (1)...(798): n = A,T,C or G
ngaacagcagctgtactaaatgaactcatctgagaggcttaaatcattntgaagcaaataatactttatttggccccaggtaagtcaatcacaaaaatttatagcttttagcgatttgctatcaaagtaggataatatacaggtggtgatattcctagattggtgttaggaagggaatgtgagaataatcacagcacattaatgtctttggaagaaaattcctatctcaatgaagaggatttgaatgaaaaggaaaacacttacatttgaaaagaaatcactcaagtgtttcttttgatctgatgatgagtttgaattctatgttagtgctatgaaacaatcagatttattatgtctgtacacagcttacaggtttacgtgtgtgacacaacccataatgtataaaatcaataatgatcacttttgtattctctcctccaacatcaaaccttttcctgttccaggccctgattacacatccatagctatcgcagttgccacactaagtatcttagttctcatgggcgtactgatttggttcgtcttccaaaggcaccgtttgcacctggcgggcttctcagcagttcgatatgcacaaggagtgaatgaagatgagattatgcttccttctttccatgactaaattcttctcaaagttttctaatttgcactaatatgttacaaaaaattagtcacttaaaatgtcccagtgtcagtattttctcagcttcaaagtagaactcttaagtactttttcagttgtttagatcttaggcatgtgctggtatccacagttaa

SEQ ID NO: 30289 - DNA, 356 bp, Macaca Mulatta
  misc_feature (1)...(356): n = A,T,C or G
tttttttttcacaggcaggttgcaggactttatttcagcaacagtcatacagagccacacagcaggcgcacccacagatgcctcaggaggtggcagcggcggcctctcttgcagcttttctctcttccagcatcctctccttttgtttggccaggcacttcctggcagaatagtgggcccccaggtcctgatagcggtcctggtaggccttggccacctgggtgaactgctccacttccttgctgcagntctgcttgtagttgngtccttccctctgctgacaggccttgagtcnagcctgtataatgttgacaatttctcggtcgacttggtagtccctcctncactgcatttcn

SEQ ID NO: 30290 - DNA, 1277 bp, Macaca Mulatta
  misc_feature (1)...(1277): n = A,T,C or G
ggtgaatgtgtttgtgatggggatgaccaagactttggcaattttctttgtggtctttcaagaagagttggaaggcacctcagagcaaattggttggattggatccatcatgtcatctcttcgtttttgtgcaggtnnnnnnnnnnnnnnnnnnnnnnnnnnnnnnnnnnnnnnnnnnnnnnnnnnnnnnnnnnnnnnnnnnnnnnnnnnnnnnnnnnnnnnnnnnnnnnnnnnnnnnnnnnnnnnnnnnnnnnnnnnnnnnnnnnnnnnnnnnnnnnnnnnnnnnnnnnnnnnnnnnnnnnnnnnnnnnnnnnnnnnnnnnnnnnnnnnnnnnnnnnnnnnnnnnnnnnnnnnnnnnnnnnnnnnnnnnnnnnnnnnnnnnnnnnnnnnnnnnnnnnnnnnnnnnnnnnnnnnnnnnnnnnnnnnnnnnnnnnnnnnnnnnnnnnnnnnnnnnnnnnnnnnnnnnnnnnnnnnnnnnnnnnnnnnnnnnnnnnnnnnnnnnnnnnnnnnnnnnnnnnnnnnnnnnnnnnnnnnnnnnnnnnnnnnnnnnnnnnnnnnnnnnnnnnnnnnnnnnnnnnnnnnnnnnnnnnnnnnnnnnnnnnnnnnnnnnnnnnnnnnnnnnnnnnnnnnnnnnnnnnnnnnnnnnnnnnnggttgatctgtgtaggaattctacagtaaacaggtttttgggacttgccagcttctttgctgggatggctgtcctttctggaccacctatagcagnnnnnnnnnnnnnnnnnnnnnnnnnnnnnnnnnnnnnnnnnnnnnnnnnnnnnnnnnnnnnnnnnnnnnnnnnnnnnnnnnnnnnnnnnnnnnnnnnnnnnnnnnnnnnnnnnnnnnnnnnnnnnnnnnnnnnnnnnnnnnnnnnnnnnnnnnnnnnnnnnnnnnnnnnnnnnnnnnnnnnnnnnnnnnnnnnnnnnnnnnnnnnnnnnnnnnnnnnnnnnnnnnnnnnnnnnnnnnnnnnnnnnnnnnnnnnnnnnnnnnnnnnnnnnnnnnnnnnnnnnnnnnnnnncccaggctggagtgcagtggcacaatctcggcttactgcaaccttcaccttctgggttcaagtgattctcctgcctcagtctcccaggtagctgggactacaggcatgtgccaccacgcccagctaatttttttttgtatttttagtagagatggggtttcaccatgctggccaggctggtcttgaactcctgacctcaagtgatctgcccacctcggcctcccaaagtgctgggattacag

SEQ ID NO: 30291 - DNA, 593 bp, Macaca Mulatta
gtgtgccaattgagtcccaacccccaccctcaacattgcctccttttctggcccctgagtgggaccttctgtccccccgagtggtcctgtctaggggtgcccctgctgggccccctctgctcttcctgctggaggctggggcctttcgagagtcagcaggcaccccggccaaccgcagccggcgtggggtgagcgaaactgcaccagcgagtcgtcggggtgaactggccgtgtgcgatgcagtcagcggctgggtgacagaccgccggaccgctgtggacttgcgtgggcgcgaggtggaggtgttgggcgaggtgcctgcagctggcggcagtcccctccgccagtacttctttgaaacccgctgcaaggctgataacactgaggaaggtggcccgggggcaggtggagggggctgccggggtgtggaccgaaggcactgggtgtctgagtgcaaggccaagcagtcctatgtacgagcattgaccgctgatgcccagggccgtgtgggctggcgatggattcgaattgacactgcctgcgtctgcacactcctcagccggactggtcgggcctgagacccatgcccagga

SEQ ID NO: 30292 - DNA, 1855 bp, Macaca Mulatta
  misc_feature (1)...(1855): n = A,T,C or G
atgtggtagtaagcaaggtgaagaagattacagaccactgtttgaaaattttgttcaagaccttctttcaacagtcaataagcctgaatggccagctgctgaactactccttagtttgttagggagactgttggnnnnnnnnnnnnnnnnnnnnnnnnnnnnnnnnnnnnnnnnnnnnnnnnnnnnnnnnnnnnnnnnnnnnnnnnnnnnnnnnnnnnnnnnnnnnnnnnnnnnnnnnnnnnnnnnnnnnnnnnnnnnnnnnnnnnnnnnnnnnnnnnnnnnnnnnnnnnnnnnnnnnnnnnnnnnnnnnnnnnnnnnnnnnnnnnnnnnnnnnnnnnnnnnnnnnnnnnnnnnnnnnnnnnnnnnnnnnnnnnnnnnnnnnnnnnnnnnnnnnnnnnnnnnnnnnnnnnnnnnnnnnnnnnnnnnnnnnnnnnnnnnnnnnnnnnnnnnnnnnnnnnnnnnnnnnnnnnnnnnnnnnnnnnnnnnnnnnnnnnnnnnnnnnnnnnnnnnnnnnnnnnnnnnnnnnnnnnnnnnnnnnnnnnnnnnnnnnnnnnnnnnnnnnnnnnnnnnnnnnnnnnnnnnnnnnnnnnnnnnnnnnnnnnnnnnnnnnnnnnnnnnnnnnnnnnnnnnnnnnnnnnnnnnnnnnnnnnnnnnnnnnnnnnnnnnnnnnnnnnnnnnnnnnnnnnnnnnnnnnnnnnnnnnnnnnnnnnnnnnnnnnnnnnnnnnnnnnnnnnnnnnnnnnnnnnnnnnnnnnnnnnnnnnnnnnnnnnnnnnnnnnnnnnnnnnnnnnnnnnnnnnnnnnnnnnnnnnnnnnnnnnnnnnnnnnnnnnnnnnnnnnnnnnnnnnnnnnnnnnnnnnnnnnnnnnnnnnnnnnnnnnnnnnnnnnnnnnnnnnnnnnnnnnnnnnnnnnnnnnnnnnnnnnnnnnnnnnnnnnnnnnnnnnnnnnnnnnnnnnnnnnnnnnnnnnnnnnnnnnnnnnnnnnnnnnnnnnnnnnnnnnnnnnnnnnnnnnnnnnnnnnnnnnnnnnnnnnnnnnnnnnnnnnnnnnnnnnnnnnnnnnnnnnnnnaattagtacatgaaacattccagaaactctgggtttactccaactccacacaatgacaaagaagcaatgacaaggaaaattttaaacattaccgatgtggtnnnnnnnnnnnnnnnnnnnnnnnnnnnnnnnnnnnnnnnnnnnnnnnnnnnnnnnnnnnnnnnnnnnnnnnnnnnnnnnnnnnnnnnnnnnnnnnnnnnnnnnnnnnnnnnnnnnnnnnnnnnnnnnnnnnnnnnnnnnnnnnnnnnnnnnnnnnnnnnnnnnnnnnnnnnnnnnnnnnnnnnnnnnnnnnnnnnnnnnnnnnnnnnnnnnnnnnnnnnnnnnnnnnnnnnnnnnnnnnnnnnnnnnnnnnnnnnnnnnnnnnnnnnnnnnnnnnnnnnnnnnnnnnnnnnnnnnnnnnnnnnnnnnnnnnnnnnnnnnnnnnnnnnnnnnnnnnnnnnnnnnnnnnnnnnnnnnnnnnnnnnnnnnnnnnnnnnnnnnnnnnnnnnnnnnnnnnnnnnnnnnnnnnnnnnnnnnnnnnnnnnnnnnnnnnnnnnnnnnnnnnnnnnnnnnnnnnnnnnnnnnnnnnnnnnnnnnnnnnnnnnnnnnnnnnnnnnnnnnnnnnnnnnnnnnnnnnnnnnnnnnnnnnnnnnngtgccatttcaaaattaaaaagtcaacaccaagaggacccaaataacacttcacttctaacaaacaaaccagcacttcttagatcccttttcactgttggagcactatgtcggcattttgattttgatctggaagattttaaaggcaacagcaaggt

SEQ ID NO: 30293 - DNA, 3935 bp, Macaca Mulatta
  misc_feature (1)...(3935): n = A,T,C or G
tggggactctcaatacttctaggactgtgtattgctctgttttccctttaatgagaaatgtccagtttcctggaatggctcctcacattttgggaagggtagataaatttaatagctcttctttaaaggttgtgtatacaccaatatctaatttaacccattagataatgaataaaacagcacttgctcctcttttgaaaggnnnnnnnnnnnnnnnnnnnnnnnnnnnnnnnnnnnnnnnnnnnnnnnnnnnnnnnnnnnnnnnnnnnnnnnnnnnnnnnnnnnnnnnnnnnnnnnnnnnnnnnnnnnnnnnnnnnnnnnnnnnnnnnnnnnnnnnnnnnnnnnnnnnnnnnnnnnnnnnnnnnnnnnnnnnnnnnnnnnnnnnnnnnnnnnnnnnnnnnnnnnnnnnnnnnnnnnnnnnnnnnnnnnnnnnnnnnnnnnnnnnnnnnnnnnnnnnnnnnnnnnnnnnnnnnnnnnnnnnnnnnnnnnnnnnnnnnnnnnnnnnnnnnnnnnnnnnnnnnnnnnnnnnnnnnnnnnnnnnnnnnnnnnnnnnnnnnnnnnnnnnnnnnnnnnnnnnnnnnnnnnnnnnnnnnnnnnnnnnnnnnnnnnnnnnnnnnnnnnnnnnnnnnnnnnnnnnnnnnnnnnnnnnnnnnnnnnnnnnnnnnnnnnnnnnnnnnnnnnnnnnnnnnnnnnnnnnnnnnnnnnnnnnnnnnnnnnnnnnnnnnnnnnnnnnnnnnnnnnnnnnnnnnnnnnnnnnnnnnnnnnnnnnnnnnnnnnnnnnnnnnnnnnnnnnnnnnnnnnnnnnnnnnnnnnnnnnnnnnnnnnnnnnnnnnnnnnnnnnnnnnnnnnnnnnnnnnnnnnnnnnnnnnnnnnnnnnnnnnnnnnnnnnnnnnnnnnnnnnnnnnnnnnnnnnnnnnnnnnnnnnnnnnnnnnnnnnnnnnnnnnnnnnnnnnnnnnnnnnnnnnnnnnnnnnnnnnnnnnnnnnnnnnnnnnnnnnnnnnnnnnnnnnnnnnnnnnnnnnnnnnnnnnnnnnnnnnnnnnnnnnnnnnnnnnnnnnnnnnnnnnnnnnnnnnnnnnnnnnnnnnnnnnnnnnnnnnnnnnnnnnnnnnnnnnnnnnnnnnnnnnnnnnnnnnnnnnnnnnnnnnnnnnnnnnnnnnnnnnnnnnnntggagatgagcgccgttattctccattatttttcttgaattcatcatcttgtttccaacaccaagggacnnnnnnnnnnnnnnnnnnnnnnnnnnnnnnnnnnnnnnnnnnnnnnnnnnnnnnnnnnnnnnnnnnnnnnnnnnnnnnnnnnnnnnnnnnnnnnnnnnnnnnnnnnnnnnnnnnnnnnnnnnnnnnnnnnnnnnnnnnnnnnnnnnnnnnnnnnnnnnnnnnnnnnnnnnnnnnnnnnnnnnnnnnnnnnnnnnnnnnnnnnnnnnnnnnnnnnnnnnnnnnnnnnnnnnnnnnnnnnnnnnnnnnnnnnnnnnnnnnnnnnnnnnnnnnnnnnnnnnnnnnnnnnnnnnnnnnnnnnnnnnnnnnnnnnnnnnnnnnnnnnnnnnnnnnnnnnnnnnnnnnnnnnnnnnnnnnnnnnnnnnnnnnnnnnnnnnnnnnnnnnnnnnnnnnnnnnnnnnnnnnnnnnnnnnnnnnnnnnnnnnnnnnnnnnnnnnnnnnnnnnnnnnnnnnnnnnnnnnnnnnnnnnnnnnnnnnnnnnnnnnnnnnnnnnnnnnnnnnnnnnnnnnnnnnnnnnnnnnnnnnnnnnnnnnnnnnnnnnnnnnnnnnnnnnnnnnnnnnnnnnnnnnnnnnnnnnnnnnnnnnnnnnnnnnnnnnnnnnnnnnnnnnnnnnnnnnnnnnnnnnnnnnnnnnnnnnnnnnnnnnnnnnnnnnnnnnnnnnnnnnnnnnnnnnnnnnnnnnnnnnnnnnnnnnnnnnnnnnnnnnnnnnnnnnnnnnnnnnnnnnnnnnnnnnnnnnnnnnnnnnnnnnnnnnnnnnnnnnnnnnnnnnnnnnnnnnnnnnnnnnnnnnnnnnnnnagtttacataggaatgaaatatgtaatccagaacaaataacatccttcattactcatcacatccccgacgctaaattaaaaannnnnnnnnnnnnnnngcttgtatatactttgccattggaaaggacaaacatatttccannnnnnnnnnnnnnnnnnnnnnnnnnnnnnnnnnnnnnnnnnnnnnnnnnnnnnnnnnnnnnnnnnnnnnnnnnnnnnnnnnnnnnnnnnnnnnnnnnnnnnnnnnnnnnnnnnnnnnnnnnnnnnnnnnnnnnnnnnnnnnnnnnnnnnnnnnnnnnnnnnnnnnnnnnnnnnnnnnnnnnnnnnnnnnnnnnnnnnnnnnnnnnnnnnnnnnnnnnnnnnnnnnnnnnnnnnnnnnnnnnnnnnnnnnnnnnnnnnnnnnnnnnnnnnnnnnnnnnnnnnnnnnnnnnnnnnnnnnnnnnnnnnnnnnnnnnnnnnnnnnnnnnnnnnnnnnnnnnnnnnnnnnnnnnnnnnnnnnnnnnnnnnnnnnnnnnnnnnnnnnnnnnnnnnnnnnnnnnnnnnnnnnnnnnnnnnnnnnnnnnnnnnnnnnnnnnnnnnnnnnnnnnnnnnnnnnnnnnnnnnnnnnnnnnnnnnnnnnnnnnnnnnnnnnnnnnnnnnnnnnnnnnnnnnnnnnnnnnnnnnnnnnnnnnnnnnnnnnnnnnnnnnnnnnnnnnnnnnnnnnnnnnnnnnnnnnnnnnnnnnnnnnnnnnnnnnnnnnnnnnnnnnnnnnnnnnnnnnnnnnnnnnnnnnnnnnnnnnnnnnnnnnnnnnnnnnnnnnnnnnnnnnnnnnnnnnnnnnnnnnnnnnnnnnnnnnnnnnnnnnnnnnnnnnnnnnnnnnnnnnnnnnnnnnnnnnnnnnnnnnnnnnnnnnnnnnnnnnnnnnnnnnnnnnnnnnnnnnnnnnnnnnnnnnnnnnnnnnnnnnnnnnnnnnnnnnnnnnnnnnnnnnnnnnnnnnnnnnnnnnnnnnnnnnnnnnnnnnnnnnnnnnnnnnnnnnnnnnnnnnnnnnnnnnnnnnnnnnnnnnnnnnnnnnnnnnnnnnnnnnnnnnnnnnnnnnnnnnnnnnnnnnnnnnnnnnnnnnnnnnnnnnnnnnnnnnnnnnnnnnnnnnnnnnnnnnnnnnnnnnnnnnnnnnnnnnnnnnnnnnnnnnnnnnnnnnnnnnnnnnnnnnnnnnnnnnnnnnnnnnnnnnnnnnnnnnnnnnnnnnnnnnnnnnnnnnnnnnnnnnnnnnnnnnnnnnnnnnnnnnnnnnnnnnnnnnnnnnnnnnnnnnnnnnnnnnnnnnnnnnnnnnnnnnnnnnnnnnnnnnnnnnnnnnnnnnnnnnnnnnnnnnnnnnnnnnnnnnnnnnnnnnnnnnnnnnnnnnnnnnnnnnnnnnnnnnnnnnnnnnnnnnnnnnnnnnnnnnnnnnnnnnnnnnnnnnnnnnnnnnnnnnnnnnnnnnnnnnnnnnnnnnnnnnnnnnnnnnnnnnnnnnnnnnnnnnnnnnnnnnnnnnnnnnnnnnnnnnnnnnnnnnnnnnnnnnnnnnnnnnnnnnnnnnnnnnnnnnnnnnnnnnnnnnnnnnnnnnnnnnnnnnnnnnnnnnnnnnnnnnnnnnnnnnnnnnnnnnnnnnnnnnnnnnnnnnnnnnnnnnnnnnnnnnnnnnnnnnnnnnnnnnnnnnnnnnnnnnnnnnnnngaaacctgttataattgccagctgtctacacaaagaatatgcaggccagaagaaaagttgcttttcaaagaggaagaagaaaatagcagcaagaaatatctctttctgtgttcaagaaggtnnnnggtgaaattttgggattgctgggacccaatggtgctggaaaaagttcatctattagaatgatatctgggatcacaaagccaactgctggagaggt

SEQ ID NO: 30294 - DNA, 1350 bp, Macaca Mulatta
cttgccatccatataaccttactaaaaatattaagagttttttcttagccaagtcatgcaataattgaatgtacctcaaatttttagagaggggagggtgggttagggactgatactccctaataattgggtaataattgaattgattttaaaggcaacgtagcattctacagcagggttaaactattaccaagaacagtcaccctggttaataacaagttttactgatcagttgctgattggttggttggcgtgtgggcgtgtgggtgtgtaggtgtgtgtgggtatgggtgtgtgtgtgtatctttccccatgagccctttttgtaatcctgtggctttttcacttacaactagcctaaccctgtaattttcctatatccaagaacacaatcacaaagtagtggtttcaatactttgttgtatttggctaattttgctgtcttaatgcagcctattaagagttgggttaaaaatcagtaatcagtacttcattacatcactgaactaaaatatggagacatcctcattgaaaagggagggcactctatcagtctgtaactatcaacgtagtgcaacagggtgttttgatacctttgttttcacctcttgacataatgctatttaaaggcttgaattttttccctttacataattttcacctttactttcgaagtgttttgttgtagttggctattgcagagagtgcattgtcctatcattcctaaacctggtctgctttctacattcatggtatggaaaccatgtaattctttgtacagtttatcctgatgttccttgtaatgcagtagaggctatttcgccttccctcttctttctcaacctttttgtaaaccccataattatgaagctattgcttgagaaaataacatataaacatagaatagaatagactgaccaagatggttcacagtttctttttttaactaggttatttataatgtatttctgaaccacttggcagacaaattcacaacaacttaatgttcatatttttgagtaaagggaagctaaaaccatgtttgctttctggtactacatgcattagcaaaaggttaagtaagttttgttctccactgaagtaatacttaacatctcagaaaaaatcttgcatgttctgtagttttgtattaaatcagtcatttcatatgcactatatcaagtacaaacaggtagtttacctgtttatagtagtgtactaacaaagtctcccttgcagcttcagactggtatctataggcttatcgttcaaatacagcacttgaatatctcaagtagttcttctacgcatagctcacctttctaaacccagttaagcatggaagagagg

SEQ ID NO: 30295 - DNA, 4370 bp, Macaca Mulatta
  misc_feature (1)...(4370): n = A,T,C or G
gcctatgggcatcttctccatcctggaagaggagtgcatgtttcctaaggcaacagacacctccttcaagaacaagctgtatgaccagcacctgggcaagtctgccaacttccagaagcccaaggtggtcaaaggcaaagctgaggcccacttctctctgattcactatgctggcgttgtggactacaacatcactggctggctagagaaaaacaaagaccccctgaacgagactgtggtggggctgtaccagaagtctgcaatgaaaactctagctcacctcttctctgggactcaaactgctgaagnnnnnnnnnnnnnnnnnnnnnnnnnnnnnnnnnnnnnnnnnnnnnnnnnnnnnnnnnnnnnnnnnnnnnnnnnnnnnnnnnnnnnnnnnnnnnnnnnnnnnnnnnnnnnnnnnnnnnnnnnnnnnnnnnnnnnnnnnnnnnnnnnnnnnnnnnnnnnnnnnnnnnnnnnnnnnnnnnnnnnnnnnnnnnnnnnnnnnnnnnnnnnnnnnnnnnnnnnnnnnnnnnnnnnnnnnnnnnnnnnnnnnnnnnnnnnnnnnnnnnnnnnnnnnnnnnnnnnnnnnnnnnnnnnnnnnnnnnnnnnnnnnnnnnnnnnnnnnnnnnnnnnnnnnnnnnnnnnnnnnnnnnnnnnnnnnnnnnnnnnnnnnnnnnnnnnnnnnnnnnnnnnnnnnnnnnnnnnnnnnnnnnnnnnnnnnnnnnnnnnnnnnnnnnnnnnnnnnnnnnnnnnnnnnnnnnnnnnnnnnnnnnnnnnnnnnnnnnnnnnnnnnnnnnnnnnnnnnnnnnnnnnnnnnnnnnnnnnnnnnnnnnnnnnnnnnnnnnnnnnnnnnnnnnnnnnnnnnnnnnnnnnnnnnnnnnnnnnnnnnnnnnnnnnnnnnnnnnnnnnnnnnnnnnnnnnnnnnnnnnnnnnnnnnnnnnnnnnnnnnnnnnnnnnnnnnnnnnnnnnnnnnnnnnnnnnnnnnnnnnnnnnnnnnnnnnnnnnnnnnnnnnnnnnnnnnnnnnnnnnnnnnnnnnnnnnnnnnnnnnnnnnnnnnnnnnnnnnnnnnnnnnnnnnnnnnnnnnnnnnnnnnnnnnnnnnnnnnnnnnnnaagctgaaggcttggctgatgcagaggaaaggtgtgaccagctgattaaaaccaaaatccagctagaggccaaaatcaaagaggtgacagagagagctgaggatgaggaagagatcaatgctgagctgacnnnnnnnnnnnnnnnnnnnnnnnnnnnnnnnnnnnnnnnnnnnnnnnnnnnnnnnnnnnnnnnnnnnnnnnnnnnnnnnnnnnnnnnnnnnnnnnnnnnnnnnnnnnnnnnnnnnnnnnnnnnnnnnnnnnnnnnnnnnnnnnnnnnnnnnnnnnnnnnnnnnnnnnnnnnnnnnnnnnnnnnnnnnnnnnnnnnnnnnnnnnnnnnnnnnnnnnnnnnnnnnnnnnnnnnnnnnnnnnnnnnnnnnnnnnnnnnnnnnnnnnnnnnnnnnnnnnnnnnnnnnnnnnnnnnnnnnnnnnnnnnnnnnnnnnnnnnnnnnnnnnnnnnnnnnnnnnnnnnnnnnnnnnnnnnnnnnnnnnnnnnnnnnnnnnnnnnnnnnnnnnnnnnnnnnnnnnnnnnnnnnnnnnnnnnnnnnnnnnnnnnnnnnnnnnnnnnnnnnnnnnnnnnnnnnnnnnnnnnnnnnnnnnnnnnnnnnnnnnnnnnnnnnnnnnnnnnnnnnnnnnnnnnnnnnnnnnnnnnnnnnnnngcccgcatcgaggagctggaggaagaaattgaagcagagcgggcctcccgggccaaagcagagaagcagcgctctgacctctcccgggaactggaggagatcagcgagaggctggaagaagccggtggggccacttcagcccagattgagatgaacaagaagcgggaggctgagttccagaaaatgcgcagggacctggaggaggccaccctacagcatgaagccacggcagccaccctgaggaagaagcacgcagacagtgtggccgagcttggggagcagattgacaacctgcagcgggtcaagcagaagctggagaaggagaagagtgagatgaagatggagattgatgaccttgctagtaatgtagaaacggtctccaaagccaaggnngggaaacctagagaaaatgtgccggactctagaggatcaagtgagtgaactgaaatcaaaggaagaggagcagcagcggctgatcaatgacctgactgcgcagagggggcgcctgcagactgaatctggtnnnnnnnnnnnnnnnnnnnnnnnnnnnnnnnnnnnnnnnnnnnnnnnnnnnnnnnnnnnnnnnnnnnnnnnnnnnnnnnnnnnnnnnnnnnnnnnnnnnnnnnnnnnnnnnnnnnnnnnnnnnnnnnnnnnnnnnnnnnnnnnnnnnnnnnnnnnnnnnnnnnnnnnnnnnnnnnnnnnnnnnnnnnnnnnnnnnnnnnnnnnnnnnnnnnnnnnnnnnnnnnnnnnnnnnnnnnnnnnnnnnnnnnnnnnnnnnnnnnnnnnnnnnnnnnnnnnnnnnnnnnnnnnnnnnnnnnnnnnnnnnnnnnnnnnnnngaagaagctggcccagcggctccaggctgctgaggaacatgtagaagctgtgaacgccaaatgtgcttccctcgaaaagacgaagcagcggctgcagaatgaggtcgaggacctcatgcttgacgtggagaggacaaatgccgcctgtgccgcccttgacaaaaagcaaaggaacttcgataannnnnnnnnnnnnnnnnnnnnnnnnnnnnnnnnnnnnnnnnnnnnnnnnnnnnnnnnnnnnnnnnnnnnnnnnnnnnnnnnnnnnnnnnnnnnnnnnnnnnnnnnnnnnnnnnnnnnnnnnnnnnnnnnnnnnnnnnnnnnnnnnnnnnnnnnnnnnnnnnnnnnnnnnnnnnnnnnnnnnnnnnnnnnnnnnnnnnnnnnnnnnnnnnnnnnnnnnnnnnnnnnnnnnnnnnnnnnnnnnnnnnnnnnnnnnnnnnnnnnnnnnnnnnnnnnnnnnnnnnnnnnnnnnnnnnnnnnnnnnnnnnnnnnnnnnnnnnnnnnnnnnnnnnnnnnnnnnnnnnnnnnnnnnnnnnnnnnnnnnnnnnnnnnnnnnnnnnnnnnnnnnnnnnnnnnnnnnnnnnnnnnnnnnnnnnnnnnnnnnnnnnnnnnnnnnnnnnnnnnnnnnnnnnnnnnnnnnnnnnnnnnnnnnnnnnnnnnnnnnnnnnnnnnnnnnnnnnnnnnnnnnnnnnnnnnnnnnnnnnnnnnnnnnnnnnnnnnnnnnnnnnnnnnnnnnnnnnnnnnnnnnnnnnnnnnnnnnnnnnnnnnnnnnnnnnnnnnnnnnnnnnnnnnnnnnnnnnnnnnnnnnnnnnnnnnnnnnnnnnnnnnnnnnnnnnnnnnnnnnnnnnnnnnnnnnnnnnnnnnnnnnnnnnnnnnnnnnnnnnnnnnnnnnnnnnnnnnnnnnnnnnnnnnnnnnnnnnnnnnnnnnnnnnnnnnnnnnnnnnnnnnnnnnnnnnnnnnnnnnnnnnnnnnnnnnnnnnnnnnagaacactagcctgatcaacaccaagaagaagctggagacagatatttcccaaatgcaannnnnnnnnnnnnnnnnnnnnnnnnnnnnnnnnnnnnnnnnnnnnnnnnnnnnnnnnnnnnnnnnnnnnnnnnnnnnnnnnnnnnnnnnnnnnnnnnnnnnnnnnnnntaccagngcccaccttgagcggatgaagaagaacatggagcagacagtgaaggacctgcagctccgcctggatgaggctgagcagctggccctgaagggtgggaagaagcagatccagaaactggaggccagggnnnnnnnnnnnnnnnnnnnnnnnnnnnnnnnnnnnnnnnnnnnnnnnnnnnnnnnnnnnnnnnnnnnnnnnnnnnnnnnnnnnnnnnnnnnnnnnnnnnnnnnnnnnnnnnnnnnnnnnnnnnnnnnnnnnnnnnnnnnnnnnnnnnnnnnnnnnnnnnnnnnnnnnnnnnnnnnnnnnnnnnnnnnnnnnnnnnnnnngaggaacaatccaacaccaatctagctaaattccgcaagctccagcatgagctggaggaggctgaggaacgggctgacattgctgagtcccaggtcaacaaactgcgggtgaagagccgggaggttcacacaaaagtcataagtgaagagtgaccacgtcctgatgccatggagtgactgaagacaggcacaaaatgtgacatctttggtcatttccctctgtaattattgtgtattctaccctgttgcaaaggaaataaagcatagggtagtttgcaaaca

SEQ ID NO: 30296 - DNA, 350 bp, Macaca Mulatta
cggagctctccgcggtgctgaactggccgcaccttctaactctcattctgctgggtaccagggtggaccccaaggaggctgggctccagcgagtttcccctgccatctgcttagcctcacacacaatcacacgcagcgcccaccccaatcttcgagagtcctgtaagatattatgaatcgtgaaccaccttcccattccccaaagtcttcattccttcttgggcaatctatagaaaccctctggagtgtggagattccagtcacgtgtcccagaaagggatctatatctgcacgtgcctactgaacttcgttttattttctccccctactgcccatataaatgcagaaga

SEQ ID NO: 30297 - DNA, 783 bp, Macaca Mulatta
gggggatggagccctcgtgttcagctataacctgggcagtggtgtggcatccatcatggtgaatggctccttcaacgatggtcggtggcaccgagttaaggctgtttagggatggccagtcaggaaagataaccgtggatgactatggagccagaacgggcaaatccccgggcatgatgcggcagcttaacatcaatggaatctttgtatgtgggtggaatgaaggaaattgctctgcacactaacaggcaatatatgagagggcttgtgggctgtatctctcacttcaccctgtctaccgattaccacattgccctcttggaagatgctgcggatgggaaaaacatcaacacttgcggagccaagtaacaccagctggccttgcccaaggtacagagccttctattcttagaatcccaggggccctgatatcctgcctgatgctatatgcagaggcccaaggaccaggtgtgtgtcctctcaccaaaaaaaaagtacacactgaatgagaaactgataaacaagacagggcatccctgggtgggctttccctgctgacactccgctaagctgacccaacattaattctcctgtgtagtaagccatccggacctttgttctcattgaaatattgtaaattgggctggcccagaaaatccacacattccattggcaaaattttcagaagccccggttcttacctataaaccttccaaatggaacaggtcgtttagtggaatatcccttggggtcacctatcttgcaacgcgagaagtcattata

SEQ ID NO: 30298 - DNA, 725 bp, Macaca Mulatta
ggggggagtcccgtcagcggtcccggagccagtggccgcgcccgtgccggtagcgccgctgccaccgctcaccatgggcccgggtcctcggctgctgctacctctcttgctttgcgtggggctcggcgcgcttgtgtcttcttcgggggccgggggcttccgcaagcgaggcccctctgtgacagccaaggttttctttgatgtgaggattggagacagagatgttggcagaattgtgattggcctctttggaaaagttgtgcccaagacggtagaaaattttgttgctctagcaacaggagagaaaggatatggatataaaggaagcaagtttcatcgtgtcatcaaggatttcatgattcaaggaggtgacatcaccgctggagatggcactgggggtgtgagcatctatggtgagacatttccagatgagaacttcaagctgaagcactatggcattgggtgggtcagtatggccaatgctgggcctgacaccaatggctctcagttctttatcaccttgaccaagcccacctggttggacggcaaacatgtggtatttggaaaagtcatcgatgggatgacagtggtgcactccatagagctcccaagcaactgattggggcacgaaccgttccaactcacccaacctggctcaatttggtcaaacagttggggcaaggataggaatggtggaaaaaacgcccccttttttgttggggttg

SEQ ID NO: 30299 - DNA, 1939 bp, Macaca Mulatta
  misc_feature (1)...(1939): n = A,T,C or G
tccaggacaaccctccatatgataagggggccttcagaatcgaaatcaactttccagcagagtacccattcaaaccaccgaagatcacatttaaaacaaagatctatcacccgaacattgacgaaaaggggcaggtctgtctgccagtaattagcgctgaaaactggaagccagcaaccaaaaccgaccaaggtaannnnnnnnnnnnnnnnnnnnnnnnnnnnnnnnnnnnnnnnnnnnnnnnnnnnnnnnnnnnnnnnnnnnnnnnnnnnnnnnnnnnnnnnnnnnnnnnnnnnnnnnnnnnnnnnnnnnnnnnnnnnnnnnnnnnnnnnnnnnnnnnnnnnnnnnnnnnnnnnnnnnnnnnnnnnnnnnnnnnnnnnnnnnnnnnnnnnnnnnnnnnnnnnnnnnnnnnnnnnnnnnnnnnnnnnnnnnnnnnnnnnnnnnnnnnnnnnnnnnnnnnnnnnnnnnnnnnnnnnnnnnnnnnnnnnnnnnnnnnnnnnnnnnnnnnnnnnnnnnnnnnnnnnnnnnnnnnnnnnnnnnnnnnnnnnnnnnnnnnnnnnnnnnnnnnnnnnnnnnnnnnnnnnnnnnnnnnnnnnnnnnnnnnnnnnnnnnnnnnnnnnnnnnnnnnnnnnnnnnnnnnnnnnnnnnnnnnnnnnnnnnnnnnnnnnnnnnnnnnnnnnnnnnnnggttgtggttccctttcttccctacccttgccactcccactttctggcactgagtttatttttcacttacttccccagacccggggcccgcctccacaaaagagaagagactgccctggtggtcctggtggcttttcttagcacgtgtgggactgttgcccagtgtgggagttggtttaaattctcctgactccagtttataacatccttttaaaaattttaaaaacaaacagccacacccctcctccagtccttctcagttcttgtgtgaatctccagctgatgttaccacagtaacatgagttaattgggcaagctctgatgtcagtgtgtgtaactgacctctggcctggcctgcacagacaaaccctataatcacaggtctgtggtggccccgaaatggggggcctgctagtcaggaggatgctgtgcacactgtgtgtgatgaatctcgccagaaaggctcctgatgtcccaggttggcacttcttcctgcagccattgtagaagatctgctggtccttgcaggcaaagctacagccagaatgtccgtttgaaattcccagctcatctgtcaccgagtttcatctgaatgtgccacggagcttgctctccacttcctctgtgcagcggccccgccacagccctccctcggcacactttgaccctttgtaggattggaattagcaggactcggctatttaaagcaccagtctggggtctcctgggcccctgctgaccccttcctccagagcagctggcccagcccgggaacaagacggacttcctctccctttggactcacagcctttgcagagtcaagctccacttgaagctcactcagtaatatcctttcaatgtgttttatattgttttgactgcctttttttgtagaaataaaaattgaccttagaatttatcatcagataaacttgtaaagatttgaatattaatgtcttttcaaggcaaatgggattgtccccaaactagtagagaatccgtgtcactctgacaccccaaggaagccgacgatccaaatgccgtgtgtcaccaaccccgcttctgccactggtggcttcccttcttggcttttgggggggactagatcctgtggagaagatgacttaaactttgctttttgttttaattttaattctnnnnnnnnnnnnnnnnnnnnnnnnnnnnnnnnnnnnnnnnnnnnggtctgatctgtgcagaagtggggagtgatgggcaggttaggcagcctaaca

SEQ ID NO: 30300 - DNA, 678 bp, Macaca Mulatta
  misc_feature (1)...(678): n = A,T,C or G
cttctctttctgctgctcaccatcgtcttctgccagatcctgatagctgatgagggtgtgccagcgcccctgcctccggaggacgcccccagcaccgcatcccaggcgcccacccctgtgcccccggtcctcgagccctttaatctgacttcggagccctcggactacgctttggacctcagcactttcctccagcaacacccagccgccttctgactttgactccccgcactccccaaaaagaatccgaaaaaccacaaagaaacaccaggcgtacctggtgcgcgagagcgtatcccaaactgggacttccgaggcaacttgaactcagaacactacagcggagacgacacccagtgcttgaggcgggactgaggcgcacatagaccgaggcngaggcgcacatagaccgaggcacagccaagctggggctaagcccggtgggaattagagcgtcgttaatttatttcttattgctcctaattaatatttatatgtatttatgtacgtcctcctaggtgatgaaggggtgtacgtaatatttattttaacttatgcaagggtgtgagatgttccccctgctgtaaatgcaggtctcttggtatttattgagctttgtgggactggtggaggcaggacacctggaactgcggcagagtaggagaagaagtggggagg

SEQ ID NO: 30301 - DNA, 786 bp, Macaca Mulatta
gggcccttccgtttcgcttccgcctaccccgcccgggctgcaagaccggaagcgctctgctctacctggattctgctcctctgggttggaacccgggtgctgccaagatgccggcttaccactcttctctcatggatcctgacaccaaactcatcggaaacatggcactgttacctattagaagtcaattcaaaggacctgcacccagagagacaaaagatacagatattgtggatgaagccatctattacttcaaggccaatgtcttcttcaaaaactatgaaattaagaatgaagctgataggaccttgatatatataactctctatatttctgaatgtctgaagaaactccaaaagtgcaattccgaaagccaaggtgagaaagaaatgtatacattgggaatcactaattttcccattcctggagagcctggttttccacttaacgcaatttatgccaaacctgcaaacaaacaggaagatgaagtgatgagagcctatttacaacagctaaggcaagagactggactgagactttgtgagaaagtttttgaccctcagaatgataaagcctagcaagtggggggacttgctgtttgggaaaagaccgtgcatggaacgagaagtcctttcggggaacctggaacaggggaaaggggaaaccgcgggaaagaccagccggtcctcccaggaggcccctgggggcgcgaattttttgccaagcgggaaaagagtagaaacaaacagcgtttttgcgcccttaaggatttccggaaaaggaatc

SEQ ID NO: 30302 - DNA, 125 bp, Macaca Mulatta
ggctgaatttcccattagtcctgtgacttcagcccacgcggggacctacaggtgctacggctcacgcagctccaacccctacctgctgtctgtccccagtgaccccctggagctcgtggtctcag

SEQ ID NO: 30303 - DNA, 687 bp, Macaca Mulatta
tgttctgttttaatgataatctggaagattgtgtcaatatgcactagctaacaagttttaagccttgcatggtatattaaaatgatattcttaaaattttttcccaccaaggtattccaaagaaaatattaaggtctctcctttttctatgattccaaaagaaccagtagaatttaaattggttagctaattgtttatataaaacacactaaaattatattttaaaagttttctgccatgaaatactcctcccaccacacacacatgctccaaaagaggaaagaaaaaatgataatttttaggacttgataattgctttatttgagaagcaaattattcagtaggtgcctctgtaccaaatattttatggagtatctgaatactaaaaataaactatgaatgaatctcaaagttaggcagtttttgccagtttccttcttagctcaaaggagaaccagaatttttttgacagccacaaacaagaatacaggtatcttggatttcagacacattctgtttcttcataaaaattttacttaaaatgtgtaacactagatattaaatatccttagttgagtcactaaggtttaaacacagtggtaagtcttaaagtctggtatttatagagcattgaatctgtaccagattgcaatagaaagcctccagtatgcaagaacttcgcatggg

SEQ ID NO: 30304 - DNA, 749 bp, Macaca Mulatta
  misc_feature (1)...(749): n = A,T,C or G
gggctgcttgtgcgagctctgagtctgcagtactgccggcggcccccacacccaccgccccacatctgcaaattcaatcaactgaggatcaaaaacacttaaaaaatgcagccattaaaaaaatacaaaaaaaatccaccccaatagtgtaacagctatttgcatagcatgtacattgtgctagatattataagtaatttagaggtgatttaacgtacatgggaagatgtgtgtaggttaggtgcaaatattgctctgttttatagaaaagacttgagcatcaggggatttcggtatctgtgggggtcgtgggattggtcccctgcagatgctgagggcgacagggcgctgctgcttctctgaaatgactcctgctgtccccatcgtcctgtccacggctgccagggtcagtggagagcaaagtttctgctgttgagtgtttatagtataactgggaagatagaagacacaaatcctaaaagactccggccgnnnnnnnnnnnnnnnnnnnnnnnnnnnnnnnnnnnnnnnnnnnnnnnngggtgnnnnnnnnnnnnnnnnnnnngagactatcctggctnnnnnnnnnnnnnnnnnnnnnnnnnnnnntttnnnnnnnnnnnnnnnnnnnnnnnnnnnnnnnnnnnnncggccgcctcgggcccctcaaaaaactttttcaaaaccaattcgttttttgccgccgcggggcccccaattaagttaaattgaaaactgggtccaatagt

SEQ ID NO: 30305 - DNA, 1630 bp, Macaca Mulatta
  misc_feature (1)...(1630): n = A,T,C or G
ctgtgatcctcacactcgggatgtaagctacctgtggtggataagtggtcagagtctccctatcagtcacaagttgaagctgtccaaaaacaacaggaccctcattatatctggtgttacaaacgatactgcaggaccctatgaatgtgaaatgaagaacacagtgagttccacccgcagtgacccagtcaccctgaatctcctcccggtgctgcccaagccgtacatcaccagcaacaacttcaaccccatggagaataagaatgttgtagccttaacctgtgaacctaagactcagaaccatacctacgtgtggtgggtaaatggtcagagcctcccggtcagttccaggctaaagcaacccggtgaaaacaggatcctcattctagccaatgtcacaagaaatgacacaggaccctatgaatgtgaaatacaggaccgatttggtagcatcttcagtgaccctgtcaccctgaatgttctctatggtccagacttccccagcattttccctccgttcacctattaccattcaggagaaaacctctacttgtactgcttcgcggactctaacccaccagcagagtattcttggacgattgatgggaagcttcagcaatcaggacataagctctctatcctccaaattactacagagcatagcgggctctatggttgctctgctcgtaactcagccactggcagggaaatttccacattcaagaaaatcaacgtctctgctccttcgggaataggagatctatcctgggcttaatccgatatagcagccatgatgtcatttctgtatttcaggaagactggacagctgctttgattcttctttgaagtatttacaatcagctacagtccaaaattgttttttcttccagaagatatatggaaaagactctgatgacaactcttgaatacaagtttctgataacttcaagatcataccactggactctctgagaactttcaaaattttaatgaacaggctgataccttcatgaaattcaagacaaagaagaagacaagaaacaattttattggactgaatcatcaaaaggataatgttttcataattttttatttgaaaatgtactgattctttgaatgttttattctccagatttatgaaatttctctttgaagctatttataatttacagcaatttggtaaagtatacttttgtaaacaaaaattgaaacatttgcttttgctccctatctgagtgccccagaattgggaacctatgcatgaatattcatatgcttatggtaataaagctatttgcacaagttcaaaagaaaaaaaaaaaannnnnnnnnnnnnngccggtaacctatttcggctatagtgagtattacattcactggcnnnnnnnacgtcgtnnnnnngcgttacccaacttaatcgccttgcagcnnnnnnnnnnnnnngannnnnnnnnnnnnnnnnnnnnnnnnnnnnnnnnnnnnnnnnnnnnnnnnnnnnnnnnnnnnnnnnnnnnnnnntnnnnnnnnnnnnnnnnnnnnnnnnnnnnnnnnnnnnnnnnnnnnnnnnnnnnnnnnnnnnnnnnnnnnnnnnnnnnnnnnnnnnnnnnnnnnnnnnnnnnnnnnnnnnnnt

SEQ ID NO: 30306 - DNA, 1979 bp, Macaca Mulatta
  misc_feature (1)...(1979): n = A,T,C or G
tcattatgaagaaggtagcctgcccatcttaaacacgacaaaactgcacattgttttaccaatggacacaaatttctgggttcttttgcgtgatggaatcaagacttcaaaaatattagaaatgacaaatatagatggcaaaagccaatttgtaagttatgaaatgcaacgaaatattagtttagaaaatgctaagacatcagttctattacttaataaagttgatttactctgggacgaccttttccatatcttacaatttgtttggcatacatcagtggaacactttcagatccaaaatgtgacttttggtggtaaggcttatcttgaccacaattcatttgactactcaaatactgtaatgagaactataaaattggagcatgtacatttcagagtgttttacattcaacaggataacatctatttgcttttgaccaaaatggacatagaaaacctgacaatatcaaatgcacaaatgccacatatgcttttccctaattatcctacaaaattccaatatttaaattttgccaataatatcttaacagacgagttgtttaaaagaactatccaactgcctcacttgaaaactctccttttgaatagcaataaactggagacactttctttagtgagttgctttgctaacaacacacccttggaacacttggataagagtcaaaatctattacnnnnnnnnnnnnnnnnnnnnnnnnnnnnnnnnnnnnnnnnnnnnnnnnnnnnnnnnnnnnnnnnnnnnnnnnnnnnnnnnnnnnnnnnnnnnnnnnnnnnnnnnnnnnnnnnnnnnnnnnnnnnnnnnnnnnnnnnnnnnnnnnnnnnnnnnnnnnnnnnnnnnnnnnnnnnnnnnnnnnnnnnnnnnnnnnnnnnnnnnnnnnnnnnnnnnnnnnnnnnnnnnnnnnnnnnnnnnnnnnnnnnnnnnnnnnnnnnnnnnnnnnnnnnnnnnnnnnnnnnnnnnnnnnnnnnnnnnnnnnnnnnnnnnnnnnnnnnnnnnnnnnnnnnnnnnnnnnnnnnnnnnnnnnnnnnnnnnnnnnnnnnnnnnnnnnnnnnnnnnnnnnnnnnnnnnnnnnnnnnnnnnnnnnnnnnnnnnnnnnnnnnnnnnnnnnnnnnnnnnnnnnnnnnnnnnnnnnnnnnnnnnnnnnnnnnnnnnnnnnnnnnnnnnnnnnnnnnnnnnnnnnnnnnnnnnnnnnnnnnnnnnnnnnnnnnnnnnnnnnnnnnnnnnnnnnnnnnnnnnnnnnnnnnnnnnnnnnnnnnnnnnnnnnnnnnnnnnnnnnnnnnnnnnnnnnnnnnnnnnnnnnnnnnnnnnnnnnnnnnnnnnnnnnnnnnnnnnnnnnnnnnnnnnnnnnnnnnnnnnnnnnnnnnnnnnnnnnnnnnnnnnnnnnnnngtgaagaatgacttgatccccaatctagagaaagaagatggttctatcttgatttgcctttatgaaagatactttgaccctggcaagagcattagtgaaaatattgtaagcttcattgagaaaagctataagtccatctttgttttgtctcccaactttgtccagaatgagtggtgccattatgaattctactttgcctaccacaatctcttccatgaaaattctgatcatataattcttatcttactggaacccattccattctactgcattcccacaaggtgtcataaactgaaaactctcctggaaaaaaaagcatacttggaatggcccaaggataggcgtaaatgtgggcttttctgggcaaaccttcgagttgctattaatgttaacatatcagccaccagagaaatgtatgaactgcagacattcacagagttaaatgaagagtctcgaggttctacagtctctctgatgagaacagactgtctataaaatcccacagccctagggaagttggggaccacacactgttgggatgtaaattgatataacctttatgatggcagtttg

SEQ ID NO: 30307 - DNA, 1192 bp, Macaca Mulatta
  misc_feature (1)...(1192): n = A,T,C or G
ggggcttgacttatgagtgtggtcagaggttttaggtgtggttagatgttttagcgaggcggctgcgcaatacaacccggagcccccgcccccacgcacacattactccaacattgaggccaacgagagtgaggaggtccggcagttccggagactctttgcccagctggctggagatgacatggaggtcagcgccacagaactcatgaacattctcaataaggttgtgacacgacaccctgatctgaagactgatggttttggcattgacacgtgtcgcagcatggtggccgtgatggatagcgacaccacagggaagctgggctttgaggaattcaagtacttgtggaacaacatcaaaaggtggcaggccatatacaaacagtttgacactgaccgatcagggaccatttgcagtagcgaactcccaggggcctttgaggcggcagggttccacctgaatgagcatctctataacatgatcatccgacgctactcagatgaaagtgggaacatggattttgacaacttcatcagctgcttggtcaggctggacgccatgttccgtgccttcaaatctcttgacaaagatggcactggacaaatccaggtgaacatccaggagtggctgcagctgactatgtattcctgaactggagccccagacccaccccctcaccgcctcgctataggagtcacctggagcctcggtctctcccagggcccatcctgtctgcagtcacatctttgtggggcctgctgacccacagcttttgttctcccagcacttgttacccagcttctcaacatccagggcccaatatgcctgcctggagtttcccttgactctagaacactctaacaagctctgtccaagggtctccccactcccaccaagccctgcacacacccgctccgtaacctctcccctgtatctgtgccaagcctaccatttgtgaagcctccatgcccaaagggccctctctcggttctgggaagaatgactccagtccctgcacgcccctggcacaaccctttataaattgccaccccagacggccaaaacttccaaaacgttgcccaaaccccaggccccccccagtggccctttggcccaaaaattccggccaacccaagaacttgcccaaggcccccaggnnnnnnnnnnnnnnnnnnnttggaacccatgggt

SEQ ID NO: 30308 - DNA, 1044 bp, Macaca Mulatta
  misc_feature (1)...(1044): n = A,T,C or G
cctcggtcacacccatcccgcagcaccttccatctagaagtagccttcaggactctgtgagtgctgatgaggacgtcaggatcaccgattgcttttctggggtacacacggacccaatggacgttctgcccagggcattgctcaccaaaatgaccatcctgagcacagcacagtctgagtacagtaggaagacactgtccccggggaaggccaggcagcgtgccacgagagatggaaacgacacaactctgtctgtagacgcttccaggtccccgtgtcatcagatgtctgtggactaccctgagtcagaagaaattctgagaagctctgtggcaggaaaagctattgctataacacagnnnnnnnnnnnnnnnnnnnnnnnnnnnnnnnnnnnnnnnnnnnnnnnnnnnnnnnnnnnnnnnnnnnnnnnnnnnnnnnnnnnnnnnnnnnnnnnnnnnnnnnnnnnnnnnnnnnnnnnnnnnnnnnnnnnnnnnnnnnnnnnnnnnnnnnacactcatttgtttagccaccttcctttgcattcccagcagcaatcaaggacaccttataatatggttccagttggggggatccacgtggtacctgctggcctcacatactccacgtttgtgccccttcaggctggaccagtgcagctcacgatccctgctgtcagtgtcgttcacagaactttgagtactcccggggatacggtcaaagaagtgtctggccctacaaaccccgctggagtggctgaattaagcagtgttgtaccatgtattcctattggccaaatccgcgtgccaggccttcagaacctaagtaccccaggcttgcagtcactcccctcgttaagcatggaaactgtcaatattgtaggcctagccaatgcaaatgtggccccacaagtccatccaccaggactggctctcaatgctgtcggactgcaggttctgactgcaaacccttcatgacaaagcagccccgcccctcaggcacacattccaggtatcgagatcttgaacatagcattgcctaccttaa

SEQ ID NO: 30309 - DNA, 631 bp, Macaca Mulatta
  misc_feature (1)...(631): n = A,T,C or G
gggtccgcctggcagatggtgagaaggggtgggtgccccaggcctacgtggaagagatcagcagcctcagcgcccgcctccgaaacctccgggagaataagcgagtcacgagtgccaccagcaaactgggggaggcccctgtgtgaggggcagccatggcctgggacagcacctccatgcctggttcccggatggttctggaggggcctgtagtgtctccatgccccaagctgctcctgctggcacttcacttctgtggccttggcattgagggcacaggttgggcacaggaatgggggcacctccagagggtatctctgtcctcctgctcctcagtgtccacacttcaaggccaacggcagtttcttcctctgacgtggggaccataacagttgatcactgatatctggcaaggactggggccctctactttctgtgccctcaatcctgcctgactcttggtccttctggcagggacctggctggggaatgttctggtgctggtggtgctgggaccnnnnnnnnnnnnnnnnnnnnnnnnnnntcttgtctaccacctcccctggccagagcccgagtcggtgcctggttgctgtgtcttgtctgtaaataaactcctatcatgcctttg

SEQ ID NO: 30310 - DNA, 858 bp, Macaca Mulatta
ttttcggggggaaatttgagaatttcgtttgacccttaaattcccagaatgtgcaagccttaaaaagaaaaagtccccaatttcctttccttttgggggagggctttttggtggccccaaaggttgtattggggttagtggagagaatatggagcttggagtcacaaaccaggtgaaacttgccctggtcttcactagctgtgtgacttgggcaagcagcttgcagtctctgagcctctgagatccccgatggatgagaacaatgacccccttccccaggctgtgctgagagagggaattgatcgtggatatgaaaacgctgccccggcacagaggcaggagctgagcaacactgctggatgaagaaacacatgtaacgcagggtgaacagaacatttcatctgcaacagctgaaggcacagcttacctatgcccatggaaagaactgcgtggaaaattgctttgttgcatttttgccaggttgatgtttgcaaagcagggcactcttctccacatttccccaaaacccatcatagggagactctacattctttccatctcctcccctcaaacaattatcaaagccatgtagaacaaactgctgtctgccaaccggtagaggcaaagcagtcaataatctggacaggggtggcagcctggtcctgtctttaaccctgcctgactttcccaagcaccagactgtgacgtccggagaacagcctgggggagctgaataaatgcacagcacctcatgctgtcaagccagaggggaaatttactgggaagaagatgtaggaagaagcctggtcagcccacacctaaagcacacacctggggaaataaattagctatttctcc

SEQ ID NO: 30311 - DNA, 135 bp, Macaca Mulatta
agctctccgaacagcaggatttcccaacggcagcttgggaaaaagaccgagtggcagcttggggaaaagacccagcgctccgtttagaagcaacgtgtatcagccaactgagatggccgtcgtgctcaacggtgg

SEQ ID NO: 30312 - DNA, 392 bp, Macaca Mulatta
agatctaccactggttcacacgcatgttcgccttcttcagaaaccatcctgccacctggaaggtgagctcctctgaggtggcggtggctgggatggcctcaagtgccaccgcagctcgaagtgggcaggcctggggctgggcttataggcacattggggaggaacgggatgtgggttgctggtggtggctgctggcctcagaggttgacgcccacctgctccccgtccccggccttccacagaacgccatccgccacaacctgagcctgcacaagtgctttgtgcgggtggagagcgagaagggggctgtgtggaccgtggatgagttggagttccgcaagaaacggagccagaggccaagcaggtgttccaaccctacacctggcccctga

SEQ ID NO: 30313 - DNA, 732 bp, Macaca Mulatta
  misc_feature (1)...(732): n = A,T,C or G
gcatgctctgaagaatggtgacatttgtgaaacttcaggtaaaccaaaaaccacacctaaaagaaaacctgctaagaagaataaaagccaaaagaagaatactgcagctcccttaaaacagnnnnnnnnnnnnnnnnnnnnnnnnnnnnnnnnnnnnnnnnnnnnnnnnnnnnnnnnnnnnnnnnnnnnnnnnnnnnnnnnnnnnnnnnnnnnnnnnnnnnnnnnnnnnnnnnnnnnnnnnnnnnnnnnnnnnnnnnnnnnnnnnnnnnnnnnnnnnnnnnnnnnnnnnnnnnnnnnnnnnnnnnnnnnnnnnnnnnnnnnnnnnnnnnnnnnnnnnnnnnnnnnnnnnnnnnnnnnnnnnnnnnnnnnnnnnnnnnnnnnnnnnnnnnnnnnnnnnnnnnnnnnnnnnnnnnnnnnnnnnnnnnnnnnnnnnnnnnnnnnnnnnnnnnnnnnnnnnnnnnnnnnnnnnnnnngccaggtctaaaattcaatggcccaccaccgccgccgccacgaccaccaccccacttactatcatgctggatgcctccatttccttctggaccaccaataattcccccaccacctcccatatgtccagattctcttgatgatgctgatgctttgggaagtatgttaatttcatggtacatgagtggctatcacactggctattatatgggtttcagacaaaatcagaaagaaggaaggtgctcacattccttaaattaa

SEQ ID NO: 30314 - DNA, 1415 bp, Macaca Mulatta
  misc_feature (1)...(1415): n = A,T,C or G
tcttcggctggcgagcggagaggagcaggtagaggggcagaggcgtgactgtcgtctggggnnnnnnnnnnnnggctcctcaggctgaccccagaccctggctggccaggatgaggtgtctccggcacctgcggcccaatgccaccctcattctggccatcgtcgcttttactctcctcctcctcttcagtctgcaactgtcaccacccactcgcaaggtccaggagcagccaccggcgacccccgaggccctggcctggcccactccacccacccacccagcccgggccccgtgccaggccaacacctctatggccaaccacccggacttcgccaagcagccgaagaatgttcaggacttcctgctgtacaaacactgccgcgactttcccctgctccaggacgtgccaccttctaagtgcgcgcagccggttttcctgctgctggtgatcaagtcctcccccaccaactatgggcgccgcgagctgctgcggcgcacgtggggccgcgagcgcaaggtgcggggtttgcagctgcgcctcctcttcctggtgggcacagcctccagcccacaccaggcccgcaaggtcaaccggctgctgcagctggaggcacagactcacggagacatcctgcagtgggacttccacgactccttcttcaacctcacgctcaagcaggnnnnngcaggtgctgttcttacagtggcaggagacgaggtgcgccaacgccagcttcgtgctcaacggggatgatgacgtctttgcacacacagacaacatggtctcctacctgcaggaccatgaccctggccgccacctcttcgtggggcaactgatccaaaacgtgggccccatccgggctttgtggagcaagtactatgtgccgaaggtggtgactcagaacgagcggtacccaccctactgtgcgggtggtggcttcctgctgtcccgcttcactgccactgccgtgcgccgtgccgctcttgtcttggacctcttccctattgatgatgtcttcctgggtatgtgtctggagctcgagggactgaagcctacctcccacagcggcatccgcacatctggtgtgcgtgccccatcacaacgcctgtcctcctttgacccctgcttctaccgagacctgctgctggtgcaccgcttcctgccttatgagatgctgctcatgtgggatgcactgaaccagcccaacctcacctgcagcaaacagacacggatttactgagtcagcatcagggtccccagcctctgggctcctatttccataggaaggggtgacactttcctcccaggaagctgagacctttgtggtctgagcataggtgagtgccagggaaggtttgatgagtgaatattctggctggtgaactcctatacatccttcaaaaccctcctggt

SEQ ID NO: 30315 - DNA, 850 bp, Macaca Mulatta
ttggttgggatcccagatatggaacatgccaacatttggatctctctccccatatgtctcatgtacactgttgctatcctggggaattgtaccattctatttttcataaaaacagagccttctttgcatgaggccatgtactattttctctccatgttggctctctctgacctgggactatccctctcctctctccctaccatgttaaggattttcctgttcaatgctccaggaatttcccccgatgcctgtattgctcaagagtttctcatccatagattctcagctatggagtcatctatacttcttataacgtcctttgatcactttattgccatctgcaaccccctgagatacacttccatcctcaccagtgccagagtcattcaaattgggcttgctttttctctcaaaaatgttttgttgatcctcccatttcctttcactctaaaacatctaaaatactgtaagaagaacctcctgtcccaatcctactgcctccatcaagatgtcatgaaactggcctgctctgacaacaaggtcaacatcatctatggcttatttgtggctctcacaggcatcatagacttgacatttattttcatgtcctacatgtcgatactgaaagcagtgttgagcatagcatcacaaaaggaaaggctcaaggtcctcaatacatgtgtttcccacatctgtgctgtgctcatcttctatgcgcccattatctccctagctgtcatctaccgatttgccaaacatagtttcccaatcactaggatcctcatagttgatgtttttctgcttgtgccttcactgatgaaccccattgtatactgtgtgaagagccagc

SEQ ID NO: 30316 - DNA, 2869 bp, Macaca Mulatta
  misc_feature (1)...(2869): n = A,T,C or G
aaaggcatcttgcatcagcctgtggatgtatgcctaccaccaggctccttcaccagcaaagggaaaaagaagcgtttcacaacaaattcttctttctgggnnnnnnnnnnnnnnnnnnnnnnnnnnnnnnnnnnnnnnnnnnnnnnnnnnnnnnnnnnnnnnnnnnnnnnnnnnnnnnnnnnnnnnnnnnnnnnnnnnnnnnnnnnnnnnnnnnnnnnnnnnnnnnnnnnnnnnnnnnnnnnnnnnnnnnnnnnnnnnnnnnnnnnnnnnnnnnnnnnnnnnnnnnnnnnnnnnnnnnnnnnnnnnnnnnnnnnnnnnnnnnnnnnnnntgcttcccaggacccagagggacactgtagcctcatttctgtggagacctttggctggactctcctggctctcccagagnnnnnnnnnnnnnnnnnnnnnnnnnnnnnnnnnnnnnnnnnnnnnnnnnnnnnnnnnnnnnnnnnnnnnnnnnnnnnnnnnnnnnnnnnnnnnnnnnnnnnnnnnnnnnnnnnnnnnnnnnnnnnnnnnnnnnnnnnnnnnnnnnnnnnnnnnnnnnnnnnnnnnnnnnnnnnnnnnnnnnnnnnnnnnnnnnnnnnnnnnnnnnnnnnnnnnnnnnnnnnnnnnnnnnnnnnnnnnnnnnnnnnnnnnnnnnnnnnnnnnnnnnnnnnnnnnnnnnnnnnnnnnnnnnnnnnnnnnnnnnnnnnnnnnnnnnnnnnnnnnnnnnnnnnnnnnnnnnnnnnnnnnnnnnnnnnnnnnnnnnnnnnnnnnnnnnnnnnnnnnnnnnnnnnnnnnnnnnnnnnnnnnnnnnnnnnnnnnnnnnnnnnnnnnnnnnnnnnnnnnnnnnnnnnnnnnnnnnnnnnnnnnnnnnnnnnnnnnnnnnnnnnnnnnnnnnnnnnnnnnnnnnnnnnnnnnnnnnnnnnnnnnnnnnnnnnnnnnnnnnnnnnnnnnnnnnnnnnnnnnnnnnnnnnnnnnnnnnnnnnnnnnnnnnnnnnnnnnnnnnnnnnnnnnnnnnnnnnnnnnnnnnnnnnnnnnnnnnnnnnnnnnnnnnnnnnnnnnnnnnnnnnnnnnnnnnnnnnnnnnnnnnnnnnnnnnnnnnnnnnnnnnnnnnnnnnnnnnnnnnnnnnnnnnnnnnnnnnnnnnnnnnnnnnnnnnnnnnnnnnnnnnnnnnnnnnnnnnnnnnnnnnnnnnnnnnnnnnnnnnnnnnnnnnnnnnnnnnnnnnnnnnnnnnnnnnnnnnnnnnnnnnnnnnnnnnnnnnnnnnnnnnnnnnnnnnnnnnnnnnnnnnnnnnnnnnnnnnnnnnnnnnnnnnnnnnnnnnnnnnnnnnnnnnnnnnnnnnnnnnnnnnnnnnnnnnnnnnnnnnnnnnnnnnnnnnnnnnnnnnnnnnnnnnnnnnnnnnnnnnnnnnnnnnnnnnnnnnnnnnnnnnnnnnnnnnnnnnnnnnnnnnnnnnnnnnnnnnnnnnnnnnnnnnnnnnnnnnnnnnnnnnnnnnnnnnnnnnnnnnnnnnnnnnnnnnnnnnnnnnnnnnnnnnnnnnnnnnnnnnnnnnnnnnnnnnnnnnnnnnnnnnnnnnnnnnnnnnnnnnnnnnnnnnnnnnnnnnnnnnnnnnnnnnnnnnnnnnnnnnnnnnnnnnnnnnnnnnnnnnnnnnnnnnnnnnnnnnnnnnnnnnnnnnnnnnnnnnnnnnnnnnnnnnnnnnnnnnnnnnnnnnnnnnnnnnnnnnnnnnnnnnnnnnnnnnnnnnnnnnnnnnnnnnnnnnnnnnnnnnnnnnnnnnnnnnnnnnnnnnnnnnnnnnnnnnnnnnnnnnnnnnnnnnnnnnnnnnnnnnnnnnnnnnnnnnnnnnnnnnnnnnnnnnnnnnnnnnnnnnnnnnnnnnnnnnnnnnnnnnnnnnnnnnnnnnnnnnnnnnnnnnnnnnnnnnnnnnnnnnnnnnnnnnnnnnnnnnnnnnnnnnnnnnnnnnnnnnnnnnnnnnnnnnnnnnnnnnnnnnnnnnnnnnnnnnnnnnnnnnnnnnnnnnnnnnnnnnnnnnnnnnnnnnnnnnnnnnnnnnnnnnnnnnnnnnnnnnnnnnnnnnnnnnnnnnnnnnnnnnnnnnnnnnnnnnnnnnnnnnnnnnnnnnnnnnnnnnnnnnnnnnnnnnnnnnnnnnnnnnnnnnnnnnnnnnnnnnnnnnnnnnnnnnnnnnnnnnnnnnnnnnnnnnnnnnnnnnnnnnnnnnnnnnnnnnnnnnnnnnnnnnnnnnnnnnnnnnnnnnnnnnnnnnnnnnnnnnnnnnnnnnnnnnnnnnnnnnnnnnnnnnnnnnnnnnnnnnnnnnnnnnnnnnnnnnnnnnnnnnnnnnnnnnnnnnnnnnnnnnnnnnnnnnnnnnnnnnnnnnnnnnnnnnnnnnnnnnnnnnnnnnnnnnnnnnnnnnnnnnnnnnnnnnnnnnnnnnnnnnnnnnnnnnnnnnnnnnnnnnnnnnnnnnnnnnnnnnnnnnnnnnnnnnnntcagttacaccaatctgaagtttatggctacccaaattgcctctggcatgaagtacctttcctctcttaatttcgttcaccgagatctggccacacgaaattgcttagtgggtaagaactacacaatcaagatagctgactttggaatgagcaggaacctgtacagtggtgactattaccggatccagggccgggcagtgctccctatccgctggatgtcttgggaaagtatcttgctgngggcaagttcactacggcaagtgatgtgtgggcctttggggttactttgtgggagactttcaccttttgccaggaacagccctattcccagctgtcagatgaacaggttattgagaatactggagaattcttccgagaccaagggaggca

SEQ ID NO: 30317 - DNA, 4103 bp, Macaca Mulatta
  misc_feature (1)...(4103): n = A,T,C or G
aggatgagaagaacatcgtcgaacgcaatgtgtccacttcaggtgtgagcatttactttgaggcttatctttataatgctaccaactgtagcagcactccatggcacctgccacccatgcacatgacctcttcccagcgccggccgtccactgctgttgacgaggaagatgaagactcgccctctgagtgccacacccctgagaaggtgaagaagccgaagaaggtgtactgctatgtgtcaccaaagnnnnnnnnnnnnnnnnnnnnnnnnnnnnnnnnnnnnnnnnnnnnnnnnnnnnnnnnnnnnnnnnnnnnnnnnnnnnnnnnnnnnnnnnnnnnnnnnnnnnnnnnnnnnnnnnnnnnnnnnnnnnnnnnnnnnnnnnnnnnnnnnnnnnnnnnnnnnnnnnnnnnnnnnnnnnnnnnnnnnnnnnnnnnnnnnnnnnnnnnnnnnnnnnnnnnnnnnnnnnnnnnnnnnnnnnnnnnnnnnnnnnnnnnnnnnnnnnnnnnnnnnnnnnnnnnnnnnnnnnnnnnnnnnnnnnnnnnnnnnnnnnnnnnnnnnnnnnnnnnnnnnnnnnnnnnnnnnnnnnnnnnnnnnnnnnnnnnnnnnnnnnnnnnnnnnnnnnnnnnnnnnnnnnnnnnnnnnnnnnnnnnnnnnnnnnnnnnnnnnnnnnnnnnnnnnnnnnnnnnnnnnnnnnnnnnnnnnnnnnnnnnnnnnnnnnnnnnnnnnnnnnnnnnnnnnnnnnnnnnnnnnnnnnnnnnnnnnnnnnnnnnnnnnnnnnnnnnnnnnnnnnnnnnnnnnnnnnnnnnnnnnnnnnnnnnnnnnnnnnnnnnnnnnnnnnnnnnnnnnnnnnnnnnnnnnnnnnnnnnnnnnnnnnnnnnnnnnnnnnnnnnnnnnnnnnnnnnnnnnnnnnnnnnnnnnnnnnnnnnnnnnnnnnnnnnnnnnnnnnnnnnnnnnnnnnnnnnnnnnnnnnnnnnnnnnnnnnnnnnnnnnnnnnnnnnnnnnnnnnnnnnnnnnnnnnnnnnnnnnnnnnnnnnnnnnnnnnnnnnnnnnnnnnnnnnnnnnnnnnnnnnnnnnnnnnnnnnnnnnnnnnnnnnnnnnnnnnnnnnnnnnnnnnnnnnnnnnnnnnnnnnnnnnnnnnnnnnnnnnnnnnnnnnnnnnnnnnnnnnnnnnnnnnnnnnnnnnnnnnnnnnnnnnnnnnnnnnnnnnnnnnnnnnnnnnnnnnnnnnnnnnnnnnnnnnnnnnnnnnnnnnnnnnnnnnnnnnnnnnnnagcttctgatgtgtgggactggagacatcagtgtgtctgacttcaaagctcatgcagtagttgttggtggctcatggcatttcagagaaaaggnnnggtcatgaggtggttttggactgtggtttccagtctgacccaggaggagctggctcggcttcttcagttcacaacaggttcctctcagctaccacctggaggctttgccgccctctgtccctcatttcagattattgccgttccgacccatatcacgctgcctactgcacacannnnnnnnnnnnnnnnnnnnnnnnnnnnnnnnnnnnnnnnnnnnnnnnnnnnnnnnnnnnnnnnnnnnnnnnnnnnnnnnnnnnnnnnnnnnnnnnnnnnnnnnnnnnnnnnnnnnnnnnnnnnnnnnnnnnnnnnnnnnnnnnnnnnnnnnnnnnnnnnnnnnnnnnnnnnnnnnnnnnnnnnnnnnnnnnnnnnnnnnnnnnnnnnnnnnnnnnnnnnnnnnnnnnnnnnnnnnnnnnnnnnnnnnnnnnnnnnnnnnnnnnnnnnnnnnnnnnnnnnnnnnnnnnnnnnnnnnnnnnnnnnnnnnnnnnnnnnntgtaagctgagctcttcattctgtcatgagaagaggaccatgctgctttcatttatttggtcctttgaagatctcagtagctgagggagatggcacacggggctcagccctgttgggaaactagtgtggagacccttaaatctacactgctccaaaactccctctgctgatactccttggagacaccctctttggccctcactacttgaccagactggtacttgagtccttctcatgggtggggtgattgcctcttctcatcaggannnnnnnnnnnnnnnnnnnnnnnnnnnnnnnnnnnnnnnnnnnnnnnnnnnnnnnnnnnnnnnnnnnnnnnnnnnnnnnnnnnnnnnnnnnnnnnnnnnnnnnnnnnnnnnnnnnnnnnnnnnnnnnnnnnnnnnnnnnnnnnnnnnnnnnnnnnnnnnnnnnnnnnnnnnnnnnnnnnnnnnnnnnnnnnnnnnnnnnnnnnnnnnnnnnnnnnnnnnnnnnnnnnnnnnnnnnnnnnnnnnnnnnnnnnnnnnnnnnnnnnnnnnnnnnnnnnnnnnnnnnnnnnnnnnnnnnnnnnnnnnnnnnnnnnnnnnnnnnnnnnnnnnnnnnnnnnnnnnnnnnnnnnnnnnnnnnnnnnnnnnnnnnnnnnnnnnnnnnnnnnnnnnnnnnnnnnnnnnnnnnnnnnnnnnnnnnnnnnnnnnnnnnnnnnnnnnnnnnnnnnnnnnnnnnnnnnnnnnnnnnnnnnnnnnnnnnnnnnnnnnnnnnnnnnnnnnnnnnnnnnnnnnnnnnnnnnnnnnnnnnnnnnnnnnnnnnnnnnnnnnnnnnnnnnnnnnnnnnnnnnnnnnnnnnnnnnnnnnnnnnnnnnnnnnnnnnnnnnnnnnnnnnnnnnnnnnnnnnnnnnnnnnnnnnnnnnnnnnnnnnnnnnnnnnnnnnnnnnnnnnnnnnnnnnnnnnnnnnnnnnnnnnnnnnnnnnnnnnnnnnnnnnnnnnnnnnnnnnnnnnnnnnnnnnnnnnnnnnnnnnnnnnnnnnnnnnnnnnnnnnnnnnnnnnnnnnnnnnnnnnnnnnnnnnnnnnnnnnnnnnnnnnnnnnnnnnnnnnnnnnnnnnnnnnnnnnnnnnnnnnnnnnnnnnnnnnnnnnnnnnnnnnnnnnnnnnnnnnnnnnnnnnnnnnnnnnnnnnnnnnnnnnnnnnnnnnnnnnnnnnnnnnnnnnnnnnnnnnnnnnnnnnnnnnnnnnnnnnnnnnnnnnnnnnnnnnnnnnnnnnnnnnnnnnnnnnnnnnnnnnnnnnnnnnnnnnnnnnnnnnnnnnnnnnnnnnnnnnnnnnnnnnnnnnnnnnnnnnnnnnnnnnnnnnnnnnnnnnnnnnnnnnnnnnnnnnnnnnnnnnnnnnnnnnnnnnnnnnnnnnnnnnnnnnnnnnnnnnnnnnnnnnnnnnnnnnnnnnnnnnnnnnnnnnnnnnnnnnnnnnnnnnnnnnnnnnnnnnnnnnnnnnnnnnnnnnnnnnnnnnnnnnnnnnnnnnnnnnnnnnnnnnnnnnnnnnnnnnnnnnnnnnnnnnnnnnnnnnnnnnnnnnnnnnnnnnnnnnnnnnnnnnnnnnnnnnnnnnnnnnnnnnnnnnnnnnnnnnnnnnnnnnnnnnnnnnnnnnnnnnnnnnnnnnnnnnnnnnnnnnnnnnnnnnnnnnnnnnnnnnnnnnnnnnnnnnnnnnnnnnnnnnnnnnnnnnnnnnnnnnnnnnnnnnnnnnnnnnnnnnnnnnnnnnnnnnnnnnnnnnnnnnnnnnnnnnnnnnnnnnnnnnnnnnnnnnnagtctttgttgaacaaaacccttgggtactgttgtggttttctattcnnnnnnnnnnnnnnnnnnnnnnnnnnnnnnnnnnnnnnnnnnnnnnnnnnnnnnnnnnnnnnnnnnnnnnnnctaatcctgctttcatactagccagtgtggggaaaaggtacaatatgtcaaagagatgagagtgtgttatttgttgggcaattttctattagtgtttcttattttggacagttattttatttatgtccttgtgacccaggtacttggggggccagctacccttctggcctttagcgtctttgaaggagaccagacatgagtgaatacctaggagagtgtcagcatgtttctggaaaattggcagagaccaagccccgctgcagattgctcaggccaggtgaaagggccaggcagttgcagctgatgatgtaaatattttgtacagtaaataaataaatgtttaaaa

SEQ ID NO: 30318 - DNA, 541 bp, Macaca Mulatta
cccagaattcccagataaaaacacataaaaaggaaaggatatataatggaatctatctaaaagtgaacatttttagcctcaatgtggaagctcatggggaattatttgagtgcactggcatgtgacctgtgttaagagtcacctccaggaaaagagcactaggataaagaaaaatgcagtcgaagataaatcagacttgtggggaggaaggactttattgacattctgaaaaggtggtcttcacacctttctcaatctgttttcaataagtggtcactgggcatgaagcagcataatgatttttacctttgtagtacaaatcaggctgcggctgtagtccaattaccaataagttactctcctagtaacagggctgacagtgttgcttggcagatacagctgaggaggaatagtttatttatgtataatgacatatagaaagtctctcaggaacaaggactgtctttagaaattgaaatattagatcaagaagatgagcaggtatatttttgacatttcagttttgcatcccacagtttga

SEQ ID NO: 30319 - DNA, 689 bp, Macaca Mulatta
cacacagagaaagggaagatgccatctcttccaggtactcttctgtggattaagttccttttacagagcaaccgaaattcaaacacacatgccagtcagcattcctggagctttatggtccactggaaaactgcccgattctgagtgcctgggaagaggctggtgatcttacccgaggagcaccgaatgcctctataattcaagttcatgctggatcagtgatactttcagatgttgtatatgttgtgtatttaatgggagtgtctgttggttgggaatttcatagcttgccccaagagtcaaagtctatttcattttctaaatcagaaaatcgtttggggctttgtaggtctcagaggaagaggaagattccatgtccggataataggactcaggccccgagtctcaggaatttttctaatgcaagggtaaataacacataaacaaacacaaagaggatggggagccagaatttggggcagatattaccaaaaggccatatcaaccaagggattggaaccttccatttagaactcttacagcaggaatgaatttaggttgggctgagagcgagataatgacttttgtgtatctgtatctgcatacatagcacacagagtgcacagagttgtacaaccacacccacatataaacatactcagagcaatcagtttacccactaatgaaac

SEQ ID NO: 30320 - DNA, 229 bp, Macaca Mulatta
agggagagaggcccgaggaaggagtggctgggggtctgaaccgcaaccagggcctgaacaggctgatgctggccgtgcgcgacatgatggccaacttccacctcaacgacctagaggcaccgcacgaggacgacgcggacggggagggggagtgggactgagcgtccgcagaggtgcctgaaagccgtaatgatgttgctgatttctgtgctggtcagaatcggtcagt

SEQ ID NO: 30321 - DNA, 217 bp, Macaca Mulatta
tgccttcccaggcccgaaatccaggtgctggagctgccccaaccgactccctaggcctggagcatggtggtatggcatctccagcaaagcgagtcccactgaattcccggacaggcaccgcagccttgccttacccactgaaaaaggagaatggcaaaatcctgtacgagtgcaacgtatgtggcaagagctttgggcagctctccaatctcaaggt

SEQ ID NO: 30322 - DNA, 1596 bp, Macaca Mulatta
  misc_feature (1)...(1596): n = A,T,C or G
acaaatcggagaaagcctcatcgtccctgggggcatcaagaccatagacgcccacggcctgatggtgcttccccggtggcgttgacgtacagacaaggctgcagatgcnnnnnnnnnnnnnnnnnnnnnnnnnnnnnnnnnnnnnnnnnnnnnnnnnnnnnnnnnnnnnnnnnnnnnnnnnnnnnnnnnnnnnnnnnnnnnnnnnnnnnnnnnnnnnnnnnnnnnnnnnnnnnnnnnnnnnnnnnnnnnnnnnnnnnnnnnnnnnnnnnnnnnnnnnnnnnnnnnnnnnnnnnnnnnnnnnnnnnnnnnnnnnnnnnnnnnnnnnnnnnnnnnnnnnnnnnnnnnnnnnnnnnnnnnnnnnnnnnnnnnnnnnnnnnnnnnnnnnnnnnnnnnnnnnnnnnnnnnnnnnnnnnnnnnnnnnnnnnnnnnnnnnnnnnnnnnnnnnnnnnnnnnnnnnnnnnnnnnnnnnnnnnnnnnnnnnnnnnnnnnnnggagcagaagcgggtgctggagcttggcatcactggccccgagggccacgtgctcagccaccccgaggannnnnnnnnnnnnnnnnnnnnnnnnnnnnnnnnnnnnnnnnnnnnnnnnnnnnnnnnnnnnnnnnnnnnnnnnnnnnnnnnnnnnnnnnnnnnnnnnnnnnnnnnnnnnnnnnnnnnnnnggggtggtcgtgtttggggagcccatcactgccagcctgggcaccgacggttctcactactggagcaagaactgggccaaggccgcagccttcgtcacgtcaccccccgtcaacccagaccccaccacggcagaccacctcacctgcctgctgtccagnnnntccagtggggacctccaggtgacaggcagtgcccactgcaccttcaccactgcccagaaggccgtgggcaaggacaacttcacgctgatccccgagggcaccaacggcattgaggagcgcatgtcggtggtctgggagaaatgtgtggnnnnnnnnnnnnnnnnnnnnnnnnnnnnnnnnnnnnnnnnnnnnnnnnnnnnnnnnnnnnnnnnnnnnnnnnnnnnnnnnnnnnnnnnnnnnnnnnnnnnnnnnnnnnnnnnnnnnnnnnnnnnnnnnnnnnnnnnnnnnnnnnnnnnnnnnnnnnnnnnnnnnnnnnnaacgtggagtataacattttcgagggagtggagtgccggggagcgcccgccgtggtcataagtcagggccgagtggtgctggaggacgggaagatgtttgtcaccccgggggcgggccgcttcatccctcggaagacattcccggacttcgtctacaagaggatcaaagctcgcaacaggnnnnnnnnnnnnnnnnnnnnnnnnnnnnnnnnnnnnnnnnnnnnnnnnnnnnnnnnnnnnnnnnnnnnnnnnnnnnnnnnnnnnnnnnnnnnnnnnnnnnnnnnnnnnnnnnnnnnnnnnnnnnnnnnnnnnnnnnnnnnnnnnnnnnnnnnnnnnnnnnnnnnnnnnnnnaggctgatgaccacatcgcccgacgcacagcgcagaagatcatggcaccgcccggaggccgctccaacatcacctctctcgcctag

SEQ ID NO: 30323 - DNA, 124 bp, Macaca Mulatta
ttgagggccatgaatccactgtgtggagcttggcctttgacccgagtggccagcgcctggcgtcttgtagtgatgaccgcactgtgcgcatctggcgtcagtatctaccggacaatgaacaagg

SEQ ID NO: 30324 - DNA, 163 bp, Macaca Mulatta
atggatgacaaaaagaagaaacggagtcccaagccctgcctggcccagccagcccaggccccaggcacactacgcagggtccctgtgcctaccagccacagcggctccttggccctaggacttcctcatctgccatcccccaagcagcgggccaagttcaaga

SEQ ID NO: 30325 - DNA, 3467 bp, Macaca Mulatta
  misc_feature (1)...(3467): n = A,T,C or G
tgattcccccacaggaggcatccgcccgaaggcgggagatcgaggacaagctgaagcaggncaggaggaggagacgctgtccttcatccgagacagcctggagaagagcgaccagctcactaagaacatggtgnnnnnnnnnnnnnnnnnnnnnnnnnnnnnnnnnnnnnnnnnnnnnnnnnnnnnnnnnnnnnnnnnnnnnnnnnnnnnnnnnnnnnnnnnnnnnnnnnnnnnnnnnnnnnnnnnnnnnnnnnnnnnnnnnnnnnnnnnnnnnnnnnnnnnnnnnnnnnnnnnnnnnnnnnnnnnnnnnnnnngccccacaggtaggctggaagagtacctgggaagcatggccaagattcagaaggcagtggagtatttccaggacaacagcccagacagcccagaactcaacaaagtnnnnnnnnnnnnnnnnnnnnnnnnnnnnnnnnnnnnnnnnnnnnnnnnnnnnnnnnnnnnnnnnnnnnnnnnnnnnnnnnnnnnnnnnnnnnnnnnnnnnnnnnnnnnnnnnnnnnnnnnnnnnnnnnnnnnnnnnnnnnnnnnnnnnnnnnnnnnnnnnnnnnnnnnnnnnnnnnnnnnnnnnnnnnnnnnnnnnnnnnnnnnnnnnnnnnnnnnnnnnnnnnnnnnnnnnnnnnnnnnnnnnnnnnnnnnnnnnnnnnnnnnnnnnnnnnnnnnnnnnnnnnnnnnnnnnnnnnnnnnnnnnnnnnnnnnnnnnnnnnnnnnnnnnnnnnnnnnnnnnnnnnnnnnnnnnnnnnnnnnnnnnnnnnnnnnnnnnnnnnnnnnnnnnnnnnnnnnnnnnnnnnnnnnnnnnnnnnnnnnnnnnnnnnnnnnnnnnnnnnnnnnnnnnnnnnnnnnnnnnnnnnnnnnnnnnnnnnnnnnnnnnnnnnnnnnnnnnnnnnnnnnnnnnnnnnnnnnnnnnnnnnnnnnnnnnnnnnnnnnnnnnnnnnnnnnnnnnnnnnnnnnnnnnnnnnnnnnnnnnnnnnnnnnnnnnnnnnnnnnnnnnnnnnnnnnnnnnnnnnnnnnnnnnnnnnnnnnnnnnnnnnnnnnnnnnnnnnnnnnnnnnnnnnnnnnnnnnnnnnnnnnnnnnnnnnnnnnnnnnnnnnnnnnnnnnnnnnnnnnnnnnnnnnnnnnnnnnnnnnnnnnnnnnnnnnnnnnnnnnnnnnnnnnnnnnnnnnnnnnnnnnnnnnnnnnnnnnnnnnnnnnnnnnnnnnnnnnnnnnnnnnnnnnnnnnnnnnnnnnnnnnnnnnnnnnnnnnnnnnnnnnnnnnnnnnnnnnnnnnnnnnnnnnnnnnnnnnnnnnnnnnnnnnnnnnnnnnnnnnnnnnnnnnnnnnnnnnnnnnnnnnnnnnnnnnnnnnnnnnnnnnnnnnnnnnnnnnnnnnnnnnnnnnnnnnnnnnnnnnnnnnnnnnnnnnnnnnnnnnnnnnnnnnnnnnnnnnnnnnnnnnnnnnnnnnnnnnnnnnnnnnnnnnnnnnnnnnnnnnnnnnnnnnnnnnnnnnnnnnnnnnnnnnnnnnnnnnnnnnnnnnnnnnnnnnnnnnnnnnnnnnnnnnnnnnnnnnnnnnnnnnnnnnnnnnnnnnnnnnnnnnnnnnnnnnnnnnnnnnnnnnnnnnnnnnnnnnnnnnnnnnnnnnnnnnnnnnnnnnnnnnnnnnnnnnnnnnnnnnnnnnnnnnnnnnnnnnnnnnnnnnnnnnnnnnnnnnnnnnnnnnnnnnnnnnnnnnnnnnnnnnnnnnnnnnnnnnnnnnnnnnnnnnnnnnnnnnnnnnnnnnnnnnnnnnnnnnnnnnnnnnnnnnnnnnnnnnnnnnnnnnnnnnnnnnnnnnnnnnnnnnnnnnnnnnnnnnnnnnnnnnnnnnnnnnnnnnnnnnnnnnnnnnnnnnnnnnnnnnnnnnnnnnnnnnnnnnnnnnnnnnnnnnnnnnnnnnnnnnnnnnnnnnnnnnnnnnnnnnnnnnnnnnnnnnnnnnnnnnnnnnnnnnnnnnnnnnnnnnnnnnnnnnnnnnnnnnnnnnnnnnnnnnnnnnnnnnnnnnnnnnnnnnnnnnnnnnnnnnnnnnnnnnnnnnnnnnnnnnnnnnnnnnnnnnnnnnnnnnnnnnnnnnnnnnnnnnnnnnnnnnnnnnnnnnnnnnnnnnnnnnnnnnnnnnnnnnnnnnnnnnnnnnnnnnnnnnnnnnnnnnnnnnnnnnnnnnnnnnnnnnnnnnnnnnnnnnnnnnnnnnnnnnnnnnnnnnnnnnnnnnnnnnnnnnnnnnnnnnnnnnnnnnnnnnnnnnnnnnnnnnnnnnnnnnnnnnnnnnnnnnnnnnnnnnnnnnnnnnnnnnnnnnnnnnnnnnnnnnnnnnnnnnnnnnnnnnnnnnnnnnnnnnnnnnnnnnnnnnnnnnnnnnnnnnnnnnnnnnnnnnnnnnnnnnnnnnnnnnnnnnnnnnnnnnnnnnnnnnnnnnnnnnnnnnnnnnnnnnnnnnnnnnnnnnnnnnnnnnnnnnnnnnnnnnnnnnnnnnnnnnnnnnnnnnnnnnnnnnnnnnnnnnnnnnnnnnnnnnnnnnnnnnnnnnnnnnnnnnnnnnnnnnnnnnnnnnnnnnnnnnnnnnnnnnnnnnnnnnnnnnnnnnnnnnnnnnnnnnnnnnnnnnnnnnnnnnnnnnnnnnnnnnnnnnnnnnnnnnnnnnnnnnnnnnnnnnnnnnnnnnnnnnnnnnnnnnnnnnnnnnnnnnnnnnnnnnnnnnnnnnnnnnnnnnnnnnnnnnnnnnnnnnnnnnnnnnnnnaggagcagttaggctgcctgcctatggtttgggagacagggacaatggggaaaagttcaggagcaaagtgagagttggaagcaaaaaataggaccccgcctatttaggacgagaatgaagactgacccttgaggcacacttgcactggagatgggtttatttcacactctgcttgtgtgcttacagagggggagctcagcctggcttcatccagagaccctgccatggccctcccccagccatgggaaagcaaacttcatcctcaggtgtgcagcccaggccctgccccgttacggtctaggccgcctgccatggggtgcagcctctccaggggctgggccagacttgcacgctgcccacatccagattccagcgaagatgaattggctgcatagcaccccaaccacatacacgaggaagaagatgcggtcagcagtctcaggccagcttctctgtgacccctttactcctctgggggactctgtggggagacatacagggaaaggagctgttcttcaaggtccccccaacgtgagcaaaagagtgaaccacaggggtcatcagcttgtatctctccctttcttagattctcagctgatgaaaattggggtctggcccatttcaggccatcttcagttaaagaaacaccctcttaggctgtgcaaggtgtgggttatcaggggattgaggtcacctgggacgtcaggg

SEQ ID NO: 30326 - DNA, 431 bp, Macaca Mulatta
ttggggtggccaggggccttttgtttgtgggtagagcccctcacgcctcctttgggaagccctgtgttcactgggctcccacctggatcctctcactgagccactgaattgtcaccccagcccctgttcacagggctggaggcaggtttaggaggggaggtgacctcccctggttcctcctgttttccagcctgtgtgctgggggaggccactgaggccatgggttgtgggggttgtaaagggtgggaggagggcaggctgattgggtatgtgagcattttgtcctctggccacgactggggctccaaatccttgcctttctgggcccctaggattggggggagtggcagagaacacccttccctggtcagagcttcagctgccgtggccctcgatggtgctgtgggtgtcggggcagccccgtgctgaag

SEQ ID NO: 30327 - DNA, 673 bp, Macaca Mulatta
  misc_feature (1)...(673): n = A,T,C or G
gggctattttgggcaatgcatgtattatgcattggnnnnnnnnnnnnnnnnnnnnnnnnnntctgttggctagctatggttttcagtacatgtttcctattgtaagagtaattgctgacaaacatgtatttcctatatatttgttgatactttgattataaaaaagtgttttgattttttaacttgctgcattgttttgatactttttatttttttggtcaaatcatgtttagaaactttggatgagttaagaagtcttaagtatgcaggcgtttacgtgattgtgccattccaaagtgcatcagaactgtcattcccttctaatatcttctcaggagtaatacaaatcaggtatttcatcatcatttggtaatatgaaaactccagtgaactcccaaggacatttacatttatattcacacgctgtatggaagggtgtgggcgtgtgtgaaggggcgagtggagacactgtgtgtatctctagataagaagatatgcaccacgttgaaaatactcagtgtagatctctatgtgtataggtatctgtatatctttcctttgtttacaactgttaaaaaactcaaaatagttctcttcaaaagagagagattcaagcacccatcttttcagtatgtctgtactagtatcaacccgccgtagtacagctatttcg

SEQ ID NO: 30328 - DNA, 757 bp, Macaca Mulatta
gggcctttgttcccaatgacttccacatttttgcacagattatgctccatcccattcacttctgcattcctgtaacttttaatccctatgtttgtctcacttttcatctggttgaatggctttttttagtgtggtatttgctgtcacatagtttttcctgggtgagtctgccaactcacaggtgcttttggcgtgaaatctccatcctatcatttccgttctgcctgtgactgtaaagagtagccattcttttcccatgtactgaagaatatatttttctgttgctttatactactcatgtccttggggagggaaatgcacaattttttttgttaggctgtaaagaatttaagttgtaaattacataagttagaacaagcccaaatttaatttgcaaccatcagaattcagaatctatagtgaccagtgatcaaggctaattggaaaagagttatcggcccatagctaataagtgctgacagacaactaagcttcagtatttttctaaagaaattacaggtgggatatgctagagaaggcattttggggttatgtttaaaaaacattattgtcccacaatattaccttaagatttttcttttctacactacctggacatggtaatacagacaaacttgatttcttctagaatataacattttcaatattgtcccactcttcatcttagaaatattgtcatgtttattttaatatccaacacaactatcaaaattgactttttctctagaggatgaaa

SEQ ID NO: 30329 - DNA, 489 bp, Macaca Mulatta
  misc_feature (1)...(489): n = A,T,C or G
ggtagtttttgatcttggatgtggaactggaattctctctctgtttgctgctaaagctggggcaaagaaggttcttggagttgatcaatccgaaatactttaccaggcaatggatattataagnnnnnnnnnnnnnnnnnnnnnnnnnnnnnnnnnnnnnnnnnnnnnnnnnnnnnnnnnnnnnnnnnnnnnnnnnnnnnnnnnnnnnnnnnnnnnnnnnnnnnnnnnnnnnnnnnnnnnnnnnnnnnnnnnnnnnnnnnnnnnnnnnnnnnnnnnnnnnnnnnnnnnnnnnnnnnnnnnngtctaccctgacatttgcactatcagccttgtagcagtgagtgatgtgaataaacatgctgatagaattggtttttgggatgatgtctatggcttcaagatgtcctgcatgaagaaagcagttattccagaagctgttgtggaagttttagatccgaagactcttatttcagaaccttgtggtattaa

SEQ ID NO: 30330 - DNA, 313 bp, Macaca Mulatta
  misc_feature (1)...(313): n = A,T,C or G
ctggcgagtctttcttcctggcttacccaactatgtgcacattcccagttaccgccctccggtccggaggcatcgtaaccccaaccggcctgagtngtggaatggctatattccgggattcccaattctcatcaactttaaggccaccaagttcctgaacttaaatctccgctactccttcctcaagacagcctccttcttcgtccgcctggggcccatgnggcactggctttcaaagtccgcggcctgttggactgcaaacattcgtggaagaggctgaaggacattaggaaaattttccctggaagaaatc

SEQ ID NO: 30331 - DNA, 817 bp, Macaca Mulatta
  misc_feature (1)...(817): n = A,T,C or G
gggtgagattattttattgtccatctattcactttgagatggctgttagactagagttatctagtagtcagttattcatatgagtatgtgaacctcagaatttgagacaggtctcagttaatttagaaagtttgttgtgccaaggttcaggatgtgtgcccgtgatacagccccaggaagtactggcaacatgtgcctaaggtgttcagggcacagcttagttttatacattttagggaggcataagacatcaatcaatatatgtacgttggttccgtccagaaaggcggggacaacttgaagcagggaagggggcttctaggtcacagataggtgagagacaaatggttgcattcttttgagtttctgataagcctttccaaaggaagcaatcagaatatgcatctatatcagcgagcagaggatgacattgaatagaatgggaggtaggtttgtcttgagaagttcccagcttgaattctccctcggcttagtaattttgggacccaagatattttccttttaggtttcccccattttatattaaaaaatctttggagaaaagcatttttgagggaaatgagtctctgggccacaaaaacgatctgaccctggggtgccgaaagttttctttactacgtccggttatggggggtaagaaaaatattgttaattccccaacaatcggggtttagggctccccaaaaaaggccttcattttttttaatcccatggaaaacggcctccctggttcccccggtcgaaacgaaaaaaataatatggggggnnnnnnnnnnnnnnnnnnnncggaaaacaa

SEQ ID NO: 30332 - DNA, 852 bp, Macaca Mulatta
  misc_feature (1)...(852): n = A,T,C or G
agctggaaggccataatgaacctgtagtgttgcaagtgtttgtgggcaacgactctggacgagtgaaaccacatggattttatcaggcctgcagggtgactggacgaaatacaactccttgcaaagaagtggacattgaaggcactactgttatagaagtcggccttgatcctagcaacaacatgacactggcnnnnnnnnnnnnnnnnnnnnnnnnnnnnnnnnnnnnnnnnnnnnnnnnnnnnnnnnnnnnnnnnnnnnnnnnnnnnnnnnnnnnnnnnnnnnnnnnnnnnnnnnnnnnnnnnnnnnnnnnnnnnnnnnnnnnnnnnnnnnnnnnnnnnnnnnnnnnnnnnnnnnnnnnnnnnnnnnnnnnnnnnnnnnnnnnnnnnnnnnnnnnnnnnnnnnnnnnnnnnnnnnnnnnnnnnnnnnnnnnnnnnnnnnnnnnnnnnnnnnnnnnnnnnnnnnnnnnnnnnnnnnnnnnnnnnnnnnnnnnnnnnnnnnnnnnnnnnnnnnnnnnnnnnnnnnnnnnnnnnnnnnnnnnnnnnnnnnnnnnnnnnnnnnnnnnnnnnnnnnnnnncctatcatgaccaacttacaactttgcctgtgtcagtgggaatatatgtagtgacgaacgctggaagatctcttgatcttcaaccattcacttacactccagacccagnnnnnnnnnnnnnnnnnnnnnnnnnnnnnnnnnnnnnnnnnnnnnnnnnnnnnnnnnnnnnnnnnnnnnnnnnnnnnnnnnngcaatgaaaactactggatgtaatttagataaggtaaatattattcctaacgccctgatcactccactcataccaagcagtatga

SEQ ID NO: 30333 - DNA, 626 bp, Macaca Mulatta
  misc_feature (1)...(626): n = A,T,C or G
gggagtgttaaatggacagcctttgtcaacactgaaaattctcatgctgcgcaaagtgctcgaataccatctgatgtcaaggtatataatcttactcatctgaacccatcaactgagtataaaatttgtattgatattcccaccatctatcagaaaaacagaaaaaaatgtgtaaatgtcaccaccaaaggtttggaccctgatcaaaaacagtatgaaaagagtaatactacaacacttatggcctgtcttggaggccttctggggattattggtgtgatatgtcttatcagctgcctctctcaagaaatgaactgtgatggtggacatagctatgtgaggaattacttacagaaaccaacttttgcattaggtgagctttatcctcctctgataaatctctgggaagcaggaaaagaaaaaagtacatcattgaaagtaaaagcaactgttataggtttaccaacaaatgtaaaaaccaccaactaaacctacttcaaaaacgaacaaaaaaaagctaaagactgcagttgtgttaaaacaaaacaaaacaacaaacaaaaacaacgtnaagaaagatacttttgagagaaagttaagcttcacatgctgctctgaccatggaa

SEQ ID NO: 30334 - DNA, 484 bp, Macaca Mulatta
ccgcggattcggcttccgccgcctcggtagtcgcggcggcagcagccgccaagaccaccagcaagaactccagcatcgccgatctcagactgaaagccaaaaagcacgccgcagccttgggtctgtgatgccaacgccagcaccaatgtcgcacctcctccgcggcactcagcctacacgccctccgcgccccgctgcttctccgttacccctttcagacttcaagagccggccctctttcctcctcactgaccatcccttgttccctttcgcatcctggactcggaaaggcagactccacgcaggaccagggatctcacgaggcacccaggcgctgtggctcctgcccgttttcctacccgagggcctagaattcggttttgtaggagcgggtttgggggagtcaggagagagactggacaggggagtgctggaaccgaggagtttggctcaccgcaaagcggcaacgatggactcttgcata

SEQ ID NO: 30335 - DNA, 1431 bp, Macaca Mulatta
  misc_feature (1)...(1431): n = A,T,C or G
atgctaacaatggataagtgcaaacatgttgggcagctgcggcttgctcaagaccattccagcctcaaccctcagaaatggcactgtgtggactgcaacacgaccgagtccatttgggcttgccttagctgctcccatgttgcctgtggaagatatattgaagagcatgcactcaagcactttcaagaaagcagtcatcctgttgcattggaggtgaatgagatgtatgttttttgttacctttgtgacgattatgttctgaatgataatgcaactggagacctgaagttactacggagtacattaagaacaatcaaaagtcaaaattatcactgnnnnnnnnnnnnnnnnnnnnnnnnnnnnnnnnnnnnnnnnnnnnnnnnnnnnnnnnnnnnnnnnnnnnnnnnnnnnnnnnnnnnnnnnnnnnnnnnnnnnnnnnnnnnnnnnnnnnnnnnnnnnnnnnnnnnnnnnnnnnnnnnnnnnnnnnnnnnnnnnnnnnnnnnnnnnnnnnnnnnnnnnnnnnnnnnnnnnnnnnnnnnnnnnnnnnnnnnnnnnnnnnnnnnnnnnnnnnnnnnnnnnnnnnnnnnnnnnnnnnnnnnnnnnnnnnnnnnnnnnnnnnnnnnnnnnnnnnnnnnnnnnnnnnnnnnnnnnnnnnnnnnagtcgaccataatagaaatagttcctgttcaggtgccagcacaaatgccagcatcaacagcaaaagataaagtactctctacctcagaagatgaaagatctcaaaaaatcaatgactcctcagttaaacgaaggccaatagtaactcctggtgtaacaggattgagaaatttggggaatacttgctatatgaattctgttcttcaggtgttgagtcatttacttatttttcgacaatgttttttaaagcttgatctgaaccaatggctggctgtgactgctagtgagaagaaaagatctttctgtaagcatccaccagtcacagatacagtagtatatcaaatgaatgaatgtcaagaaaaagatacaggttttgttcgctccagacaatcaagtctgtcatcaggactaagtggtggagcatcaaaaagtagaaagatggaacttattcagccaagggagccaacttcacagtacctttctctttgtcatgaattgcatactttgttccaagtcatgtggtctggaaagtgggcgttggtctcaccatttgctatgctacactcagtgtggagactcattcctgcctttcgtggttatgcccaacaagatgctcangaatttctttgtgaacttttagataaaatacaacatgaattagagacaaccggtaccagtttaccagctcttatccccacttctcaaaggaaactcatcaaacaagttctgaatgttgtaaataacatttttcatggacaacttctcagtcaggt

SEQ ID NO: 30336 - DNA, 523 bp, Macaca Mulatta
  misc_feature (1)...(523): n = A,T,C or G
gtggattcatcagtggcagtagggacgccggactatatctcccctgagatcctgcaggccatggaggagggcaagggccactatggcccacagtgtgactggtggtcgcttggagtctgcgcctatgaactgctctttggggnnnnnnnnnnnnnnnnnnnnnnnnnnnnnnnnnnnnnnnnnnnnnnnnnnnnnnnnnnnnnnnnnnnnnnnnnnnnnnnnnnnnnnnnnnnnnnnnnnnnnnnnnnnnnnnnnnnnnnnnnnnnnnnnnnnnnnnnnnnnnnnnnnnnnnnnnnnnnnnnnnnnnnnnnnnnnnnnnnnnnnnnnnnnnnnnnnnnnnnnnnnnnnnnnnnnnnnnnnnnnnnnnnnnnnnnnnnnnnnnnnnnnnnnnnnnnnnnnnnnnnnnnnnnnnnnnnnnnnnnnnnnnnnnnnnnnnnnnnnnnnnnnnnngggaccctgccaccgccctcccacggggccttctccggccaccacttgccatttgtgggcttcacctacacct

SEQ ID NO: 30337 - DNA, 799 bp, Macaca Mulatta
gggagaggcttaaaacaaacgccggaagcaactcccagccccagaaagatctgtgaccggcagcgccagacccgcctgccttcctgacttctgttccagggcaaaggtcatttagccgcttgaatcagcctttttccccccccttccccaactttgtttaccagataaggaaggtcagcattcaaagtcaagaagcgcctcttatcttcccctgcgttctacaaatagttccgtgagaaagatggccgggaactcgatcctgctggctgctgtctctattctctcggcctgtcagcaaagttattttgctttgcaagttggaaaggcaagattaaaatacaaagttacacccccagcagtcactgggtcaccagagtttgagagagtatttcgggcacaacaaaactgtgtggagttttatcctatattcataattacattgtggatggctgggtggtatttcaaccaagtttttgctacttgtccgggtctgaagtacatatatggccgtcacctatacttctggggatattcagaagctgctaaaaaaacggatcactgggtttccgactgaattctgggggattttgggcccttgttgaactcctcctaaggtgcccctggggaaattgcaaaacagcttttctgggaagaaatatcctgggaccttcaattatttgcccaaaaaaacttgaagggcgggaaatttccaaaacattttttcccccttcccttttaaaggctttgcaaaaaaccttgtttccccaaccatggaaaggggaatttgggggtaaccact

SEQ ID NO: 30338 - DNA, 1670 bp, Macaca Mulatta
  misc_feature (1)...(1670): n = A,T,C or G
cagagagactttcaagcagctggctggatgttcgtcatattgaaaagtatgtagaccaaggtaaaagtggaacaagagaattactttggtcctgggcacagaaaaacaagaccatcggtgaccttttacaggtcctccaggagatggggcatcgtcgagctattcatttaattacaaaccatggnnnnnnnnnnnnnnnnnnnnnnnnnnnnnnnnnnnnnnnnnnnnnnnnnnnnnnnnnnnnnnnnnnnnnnnnnnnnnnnnnnnnnnnnnnnnnnnnnnnnnnnnnnnnnnnnnnnnnnnnnnnnnnnnnnnnnnnnnnnnnnnnnnnnnnnnnnnnnnnnnnnnnnnnnnnnnnnnnnnnnnnnnnnnnnnnnnnnnnnnnnnnnnnnnnnnnnnnnnnnnnnnnnnnnnnnnnnnnnnnnnnnnnnnnnnnnnnnnnnnnnnnnnnnnnnnnnnnnnnnnnnnnnnnnnnnnnnnnnnnnnnnnnnnnnnnnnnnnnnnnnnnnnnnnnnnnnnnnnnnnnnnnnnnnnnnnnnnnnnnnnnnnnnnnnnnnnnnnnnnnnnnnnnnnnnnnnnnnnnnnnnnnnnnnnnnnnnnnnnnnnnnnnnnnnnnnnnnnnnnnnnnnnnnnnnnnnnnnnnnnnnnnnnnnnnnnnnnnnnnnnnnnnnnnnnnnnnnnnnnnnnnnnnnnnnnnnnnnnnnnnnnnnnnnnnnnnnnnnnnnnnnnnnnnnnnnnnnnnnnnnnnnnnnnnnnnnnnnnnnnnnnnnnnnnnnnnnnnnnnnnnnnnnnnnnnnnnnnnnnnnnnnnnnnnnnnnnnnnnnnnnnnnnnnnnnnnnnnnnnnnnnnnnnnnnnnnnnnnnnnnnnnnnnnnnnnnnnnnnnnnnnnnnnnnnnnnnnnnnnnnnnnnnnnnnnnnnnnnnnnnnnnnnnnnnnnnnnnnnnnnnnnnnnnnnnnnnnnnnnnnnnnnnnnnnnnnnnnnnnnnnnnnnnnnnnnnnnnnnnnnnnnnnnnnnnnnnnnnnnnnnnnnnnnnnnnnnnnnnnnnnnnnnnnnnnnnnnnnnnnnnnnnnnnnnnnnnnnnnnnnnnnnnnnnnnnnnnnnnnnnnnnnnnnnnnnnnnnnnnnnnnnnnnnnnnnnnnnnnnnnnnnnnnnnnnnnnnnnnnnnnnnnnnnnnnnnnnnnnnntaaatactcttgaaagtactcaagccagcttgtattttgctgaagatcctcccacgtcactaaagtccttcaggtgtccttctcctctattcctggagaatgtaccaagtattccagtggaagatgatgaaagccagaataaccatttactgtcttctgatgaaggcttgaggatagacagaatgactcagaaaactccttttgaatgcagccagtctgaggttatgtttctgagcttggacaaaaagccagagagcaagagaaatgaggaagcttgcaacatgcccagttcttctcgtgaagaaagttggttcccaaagtatatagttccatcccaggacttaaggccttttaaggtaaatatggatccttcttcagaagctccaggccattcttgcaggagcaggccagtggagagcagctgttcctccaaattttcctgggacgaatatgaacaacacaaaaaagaataaattcctccagaa

SEQ ID NO: 30339 - DNA, 6536 bp, Macaca Mulatta
  misc_feature (1)...(6536): n = A,T,C or G
agtctcgtagtgtggataagcaacatgctgtcatcaactatgatgcctctacggatgaacatttagtgaaagatttgggcagtctaaatgggnnnnnnnnnnnnnnnnnnnnnnnnnnnnnnnnnnnnnnnnnnnnnnnnnnnnnnnnnnnnnnnnnnnnnnnnnnnnnnnnnnnnnnnnnnnnnnnnnnnnnnnnnnnnnnnnnnnnnnnnnnnnnnnnnnnnnnnnnnnnnnnnnnnnnnnnnnnnnnnnnnnnnnnnnnnnnnnnnnnnnnnnnnnnnnnnnnnnnnnnnnnnnnnnnnnnnnnnnnnnnnnnnnnnnnnnnnnnnnnnnnnnnnnnnnnnnnnnnnnnnnnnnnnnnnnnnnnnnnnnnnnnnnnnnnnnnnnnnnnnnnnnnnnnnnnnnnnnnnnnnnnnnnnnnnnnnnnnnnnnnnnnnnnnnnnnnnnnnnnnnnnnnnnnnnnnnnnnnnnnnnnnnnnnnnnnnnnnnnnnnnnnnnnnnnnnnnnnnnnnnnnnnnnnnnnnnnnnnnnnnnnnnnnnnnnnnnnnnnnnnnnngggtgcagcatagatgccaagcaagttgaggaacaatctgcagctgcaaatgaagaagtactttttcctttctgtagggaaccaagttattttgaaatcnnnnnnnnnnnnnnnnnnnnnnnnnnnnnnnnnnnnnnnnnnnnnnnnnnnnnnnnnnnnnnnnnnnnnnnnnnnnnnnnnnnnnnnnnnnnnnnnnnnnnnnnnnnnnnnnnnnnnnnnnnnnnnnnnnnnnnnnnnnnnnnnnnnnnnnnnnnnnnnnnnnnnnnnnnnnnnnnnnnnnnnnnnnnnnnnnnnnnnnnnnnnnnnnnnnnnnnnnnnnnnnnnnnnnnnnnnnnnnnnnnnnnnnnnnnnnnnnnnnnnnnnnnnnnnnnnnnnnnnnnnnnnnnnnnnnnnnnnnnnnnnnnnnnnnnnnnnnnnnnnnnnnnnnnnnnnnnnnnnnnnnnnnnnnnnnnnnnnnnnnnnnnnnnnnnnnnnnnggaaataaacatgatgatggtacgcagagtgattcagagaatgctggggctcacaggcgctgtagcaaacgtgcaactcttgaggaacacttaagacgccaccattcagaacacaaaaagctacagaaggtccaggctactgaaaagcatcaagaccaagctgttnnnnnnnnnnnnnnnnnnnnnnnnnnnnnnnnnnnnnnnnnnnnnnnnnnnnnnnnnnnnnnnnnnnnnnnnnnnnnnnnnnnnnnnnnnnnnnnnnnnnnnnnnnnnnnnnnnnnnnnnnnnnnnnnnnnnnnnnnnnnnnnnnnnnnnnnnnnnnnnnnnnnnnnnnnnnnnnnnnnnnnnnnnnnnnnnnnnnnnnnnnnnnnnnnnnnnnnnnnnnnnnnnnnnnnnnnnnnnnnnnnnnnnnnnnnnnnnnnnnnnnnnnnnnnnnnnnnnnnnnnnnnnnnnnnnnnnnnnnnnnnnnnnnnnnnnnnnnnnnnnnnnnnnnnnnnnnnnnnnnnnnnnnnnnnnnnnnnnnnnnnnnnnnnnnnnnnnnnnnnnnnnnnnnnnnnnnnnnnnnnnnnnnnnnnnnnnnnnnnnnnnnnnnnnnnnnnnnnnnnnnnnnnnnnnnnnnnnnnnnnnnnnnnnnnnnnnnnnnnnnnnnnnnnnnnnnnnnnnnnnnnnnnnnnnnnnnnnnnnnnnnnnnnnnnnnnnnnnnnnnnnnnnnnnnnnnnnnnnnnnnnnnnnnnnnnnnnnnnnnnnnnnnnnnnnnnnnnnnnnnnnnnnnnnnnnnnnnnnnnnnnnnnnnnnnnnnnnnnnnnnnnnnnnnnnnnnnnnnnnnnnnnnnnnnnnnnnnnnnnnnnnnnnnnnnnnnnnnnnnnnnnnnnnnnnnnnnnnnnnnnnnnnnnnnnnnnnnnnnnnnnnnnnnnnnnnnnnnnnnnnnnnnnnnnnnnnnnnnnnnnnnnnnnnnnnnnnnnnnnnnnnnnnnnnnnnnnnnnnnnnnnnnnnnnnnnnnnnnnnnnnnnnnnnnnnnnnnnnnnnnnnnnnnnnnnnnnnnnnnnnnnnnnnnnnnnnnnnnnnnnnnnnnnnnnnnnnnnnnnnnnnnnnnnnnnnnnnnnnnnnnnnnnnnnnnnnnnnnnnnnnnnnnnnnnnnnnnnnnnnnnnnnnnnnnnnnnnnnnnnnnnnnnnnnnnnnnnnnnnnnnnnnnnnnnnnnnnnnnnnnnnnnnnnnnnnnnnnnnnnnnnnnnnnnnnnnnnnnnnnnnnnnnnnnnnnnnnnnnnnnnnnnnnnnnnnnnnnnnnnnnnnnnnnnnnnnnnnnnnnnnnnnnnnnnnnnnnnnnnnnnnnnnnnnnnnnnnnnnntcagactccaaagggaggtgacaagaaggaatcctccaagtcattagtgcgacaagggagcttcactatagaaaaacccagcccaaacatacccatagaacttattcctcatataaataaacagacttcctctactccttcttctttagcattaacatctgcaagtagaatacgagaaagaagtgagtctttagatcctgattctagtatggacacaacccttattctaaaagacacagaagcagtcatggcttttctagaagctaaactacgtgaagataataaaactgatgaaggaccagacactcccagttataatagagacaattctatttcaccagaatctgatgtagatacagctagtacaatcagtctggttactggagaaactgnnnnnnnnnnnnnnnnnnnnnnnnnnnnnnnnnnnnnnnnnnnnnnnnnnnnnnnnnnnnnnnnnnnnnnnnnnnnnnnnnnnnnnnnnnnnnnnnnnnnnnnnnnnnnnnnnnnnnnnnnnnnnnnnnnnnnnnnnnnnnnnnnnnnnnnnnnnnnnnnnnnnnnnnnnnnnnnnnnnnnnnnnnnnnnnnnnnnnnnnnnnnnnnnnnnnnnnnnnnnnnnnnnnnnnnnnnnnnnnnnnnnnnnnnnnnnnnnnnnnnnnnnnnnnnnnnnnnnnnnnnnnnnnnnnnnnnnnnnnnnnnnnnnnnnnnnnnnnnnnnnnnnnnnnnnnnnnnnnnnnnnnnnnnnnnnnnnnnnnnnnnnnnnnnnnnnnnnnnnnnnnnnnnnnnnnnnnnnnnnnnnnnnnnnnnnnnnnnnnnnnnnnnnnnnnnnnnnnnnnnnnnnnnnnnnnnnnnnnnnnnnnnnnnnnnnnnnnnnnnnnnnnnnnnnnnnnnnnnnnnnnnnnnnnnnnnnnnnnnnnnnnnnnnnnnnnnnnnnnnnnnnnnnnnnnnnnnnnnnnnnnnnnnnnnnnnnnnnnnnnnnnnnnnnnnnnnnnnnnnnnnnnnnnnnnnnnnnnnnnnnnnnnnnnnnnnnnnnnnnnnnnnnnnnnnnnnnnnnnnnnnnnnnnnnnnnnnnnnnnnnnnnnnnnnnnnnnnnnnnnnnnnnnnnnnnnnnnnnnnnnnnnnnnnnnnnnnnnnnnnnnnnnnnnnnnnnnnnnnnnnnnnnnnnnnnnnnnnnnnnnnnnnnnnnnnnnnnnnnnnnnnnnnnnnnnnnnnnnnnnnnnnnnnnnnnnnnnnnnnnnnnnnnnnnnnnnnnnnnnnnnnnnnnnnnnnnnnnnnnnnnnnnnnnnnnnnnnnnnnnnnnnnnnnnnnnnnnnnnnnnnnnnnnnnnnnnnnnnnnnnnnnnnnnnnnnnnnnnnnnnnnnnnnnnnnnnnnnnnnnnnnnnnnnnnnnnnnnnnnnnnnnnnnnnnnnnnnnnnnnnnnnnnnnnnnnnnnnnnnnnnnnnnnnnnnnnnnnnnnnnnnnnnnnnnnnnnnnnnnnnnnnnnnnnnnnnnnnnnnnnnnnnnnnnnnnnnnnnnnnnnnnnnnnnnnnnnnnnnnnnnnnnnnnnnnnnnnnnnnnnnnnnnnnnnnnnnnnnnnnnnnnnnnnnnnnnnnnnnnnnnnnnnnnnnnnnnnnnnnnnnnnnnnnnnnnnnnnnnnnnnnnnnnnnnnnnnnnnnnnnnnnnnnnnnnnnnnnnnnnnnnnnnnnnnnnnnnnnnnnnnnnnnnnnnnnnnnnnnnnnnnnnnnnnnnnnnnnnnnnnnnnnnnnnnnnnnnnnnnnnnnnnnnnnnnnnnnnnnnnnnnnnnnnnnnnnnnnnnnnnnnnnnnnnnnnnnnnnnnnnnnnnnnnnnnnnnnnnnnnnnnnnnnnnnnnnnnnnnnnnnnnnnnnnnnnnnnnnnnnnnnnnnnnnnnnnnnnnnnnnnnnnnnnnnnnnnnnnnnnnnnnnnnnnnnnnnnnnnnnnnnnnnnnnnnnnnnnnnnnnnnnnnnnnnnnnnnnnnnnnnnnnnnnnnnnnnnnnnnnnnnnnnnnnnnnnnnnnnnnnnnnnnnnnnnnnnnnnnnnnnnnnnnnnnnnnnnggctctgaacaacatggggatctcccagtgctatgttgccatctccaccaaaacagaagtccagccctgtgaataaccatagcagcccgggtcagacaccaacacttggccaaccagaagctagggctcttcatcctgctgctatttcagtctcagctgaatttgagaatgctgaatctgaggctgatttcagtatacatttcaatagattcaaccccgatggggaagaggaagatgttacagtacatgaatgactttctcttgagtgttgaaaaatcattacctgtggaatgactaggaatattggaagcagcatagtgttgacgtacacaaaacaagacagcttggtcagctacaatcttggaatccctgtcttcttaattttatttatttatttttggcttacaatgtagtatatcaatcctttcaaaccatttagataaccacttgatgcacaaataggaaaaagcagattgtggcagtgtcaccttttgtggttttatgattttcaaattgaattttatgattacaccctttcccttcatagatcnnnnnnnnnnnnnnnagccatgctgtgacctacaagcaaactaaatagccaacatttctgaaaccctgtgtctcctgtgccaagctgctccctganatggacttcttcatctgtacagatttgttaaaccattctatttgcttcttaataataggatttatattagtactcattaccattggacacaatgacagaagtactctccacagtaaagcagacnnnnnnnnnnnnnnnnnnnnnnnnnnnnnnnnnnnnnnnnnnnnnnnnnnnnnnnnnnnnnnnnnnnnnnnnnnnnnnnnnnnnnnnnnnnnnnnnnnnnnnnnnnnnnnnnnnnnnnnnnnnnnnnnnnnnnnnnnnnnnnnnnnnnnnnnnnnnnnnnnnnnnnnnnnnnnnnnnnnnnnnnnnnnnnnnnnnnnnnnnnnnnnnnnnnnnnnnnnnnnnnnnnnnnnnnnnnnnnnnnnnnnnnnnnnnnnnnnnnnnnnnnnnnnnnnnnnnnnnnnnnnnnnnnnnnnnnnnnnnnnnnnnnnnnnnnnnnnnnnnnnnnnnnnnnnnnnnnnnnnnnnnnnnnnnnnnnnnnnnnnnnnnnnnnnnnnnnnnnnnnnnnnnnnnnnnnnnnnnnnnnnnnnnnnnnnnnnnnnnnnnnnnnnnnnnnnnnnnnnnnnnnnnnnnnnnnnnnnnnnnnnnnnnnnnnnnnnnnnnnnnnnnnnnnnnnnnnnnnnnnnnnnnnnnnnnnnnnnnnnnnnnnnnnnnnnnnnnnnnnnnnnnnnnnnnnnnnnnnnnnnnnnnnnnnnnnnnnnnnnnnnnnnnnnnnnnnnnnnnnnnnnnnnnnnnnnnnnnnnnnnnnnnnnnntactaaacaagaagcctatgaaaaatttcttctttaaacttgttttttctctttccagtaagttgacatttggatannnnnnnnnnnaaagtaattacctttgtgtttccagaacactataattggagtgtatcttaattcagttaaatattattagtagacctggattttcccccttgaccccatcagtctattaaggttaaactgcaacttttatgaaatggtctttaatatttccacaataatcctgtgctatatttgttttaagaaacaaagtaactctatacacttcaagactttacaggatttttaaaatcctgtattgttggatcaattaataaagatgcaaaaaactttttatagagatgtaaaaacaaaagtataatggatcccctatttttctttaaattcaaaaaaaaaaaggtaaatgaactattctccttgtaaagctaaattccccattctgtctaataaaggaagactgaaaaaaggttttaaagaacataaatggaaagatacaaatgctttgaaggaataaacgaaacattaaaacagggtcaatccatttgaagaaaaagttggacaaaataatcagcattgctccctcttttatttaatatttgggtactgattatatccacatggaagtagaaggtaaggagtttaggaaaatattagaatctgcttacattcttgtttaagtgtttacac

SEQ ID NO: 30340 - DNA, 839 bp, Macaca Mulatta
  misc_feature (1)...(839): n = A,T,C or G
tgctacaaaaaatgtgactgaaataattttcctgggattttcccagaatcagaatgaacagagggtcatttctgtgatgtttctcctcatgtgcacagccgttgtgccgggcaatggcctcattgtggtgaacatcctggccagcaaagggctcacctcccnccatgtatttcttgctcagctacgtatcctttgtggagatctgttactgttctgtcgtggcccccaagcttatcttcgactcttttatcaagtggaaagtaattnnnnnnnnnnnnnnnnnnnnnnnnnnnnnnnnnnnnnnnnnnnnnnnnnnnnnnnnnnnnnnnnnnnnnnnnnnnnnnnnnnnnnnnnnnnnnnnnnnnnnnnnnnnnnnnnnnnnnnnnnnnnnnnnnnnnnnnnnnnnnnnnnnnnnnnnnnnnnnnnnnnnnnnnnnnnnnnnnnnnnnnnnnnnnnnnnnnnnnnnnnnnnnnnnnnnnnnnnnnnnnnnnnnnnnnnnnnnnnnnnnnnnnnnnnnnnnnnnnnnnnnnnnnnnnnnnnnnnnnnnnnnnnnnnnnnnnnnnnnnnnnnnnnnnnnnnnnnnnnnnnnnnnnatggcggctccatctctgtggtcagcttctcggtgcggatagcttcctacctgatcatcctgcactccctgaggagccacaactcggaggcccggcgcagggaactctccacctgtgcctctcatgtcacagttgtgggcctgttcttcatgccttgctcctttgtctgcatgaggccctgtgtcaccctccctacagataagatagtcgccgtattttacacggtggtcacacctctattaaacc

SEQ ID NO: 30341 - DNA, 871 bp, Macaca Mulatta
gaggggctgtctcggaaacgccgagctgagttcctcccgggttttcaagttcggctcctgggctgttgtttagactcttgtgaagatggcttgcgctgcagcgcggtccccggcggaccaagacaggtttatttgtatctatcctgcttatttaaataataagaagaccatcgcagagggaaggcgaatccccataagtaaggctgttgaaaatcctacagctacagagattcaagatgtatgttcagcagttggacttaacgtatttcttgagaaaaataaaatgtactctagagaatggaatcctgatgtccaatacagaggccgagtccggggtccgctcaaaacacgaagatggcagcctctggccttgtggagttcccttctaacgctttaagctttcagccggaagaaagcaaagagcaattagattttcctatctctaccattaagcgcgggccaagattcaggaactcgccgataattcccattcttagcccgataaagattcccaaattttagccccccgaggatttttagtttagttcgccaagctcgcatacagaatacaaagaattagtgttgcaacgattttgatgaagtaaataacttactgttagtatagtgacaagtgaggaggtaatatattttgaacaaggatattcaagggtcgcaatatcgattgttgtatgttaatagagaagaatcatcatataagaagagagctcaccttctttattaaaaaacgaacgtcgcgaattacacaaatggacgtcaccatcatatatagacttttgcttgtcacatatttggtccacttcagtatccgtgatgtgccctccactatgtcttttcggaatatctctccata

SEQ ID NO: 30342 - DNA, 414 bp, Macaca Mulatta
  misc_feature (1)...(414): n = A,T,C or G
gagagacgtcgggcagagcgggccgaacagcagcgcatccggaatgagcgggagaaggagcggcagaaccgcctggctnnnnnnnnnnnnnnnnnnnnnnnnnnnnnnnnnnnnnnnnnnnnnnnnnnnnnnnnnnnnnnnnnnnnnnnnnnnnnnnnnnnnnnnnnnnnnnnnnnnnnnnnnnnnnnnnnnnnnnnnnnnnnnnnnnnnnnnnnnnnnnnnnnnnnnnnnnnnnnnnnnnnnnnnnnnnnnnnnnnnnnnnnnnnnnnnnnnnnnnnnnnnnnnnnnnnnnnnnnnnnnnnnnnnnnnnnnnnnnnnnnnnnnnnagggagaaggccaaggagctgtggcagagcatccataacttggaggcagagaagttcgacttgcaggagaagttcaagcagcagaaat

SEQ ID NO: 30343 - DNA, 788 bp, Macaca Mulatta
  misc_feature (1)...(788): n = A,T,C or G
ggggacagaacgaggggacgtaacggaggcaggtcggagccgctgccgtcgccatgacccgcggtaaccagcgtgagctcgcccgccagaagaatatgaaaaagcagagcgactcggttaagggaaagcgccgagatgacgggctttctgctgccgcccgcaagcagagggactcggagatcatgcagcagaagcagaaaaaggcaaacgagaagaaggaggaacccaagtagctttgtggcttcgtgtccaaccctcttgcccttcgcctgtgtgcctggagccagtcccaccacgctcgcgtttcctcctgtagtgctcacaggtcccagcaccgatggcattccctttgccctgagtctgcagcgggtcccttttgtgcttctttcccctcaggtagcctctctccccctgggccactcccgggggtgaggggngtacnccnntccccnngnntnttnttccggggggggctgcgcccggggtgtgtgctgttcgctttccccgcgccccgcggggtgcgctccggcggcggctttccgcgccgctccttggcccctccgggggcgcttcggaacccctttcgttatggaccccgcgggccccgcttgggccggggcgacgagggggccagaagagcggtgtcgacggaggcagaaatcctggccagcggcaaacggcagcgccttcggaagtcccagcaagcggcgaaaatagaaccgcgccgcggcgcacgggcgaccgctcacgccatgtttcagaaggaaagaatcgcaccggggcgtgat

SEQ ID NO: 30344 - DNA, 579 bp, Macaca Mulatta
gcctgcgcactcaagttctgtacgacagtgaagacagcttctgcgggagacacccaggcccaggcaaagctttcccctctgggtgctctgcactcagcgagcccgagtctgagtctgtggttggagtcctccctgcagagcatccgttttcatttatggaaaaacgtaatcaatggctgggatctcagctttcagcagcttctcctgacactggccatgactcagacaaatcagaccaaagtttacctaatgcctcagcagactcctcgggcagtagccaggcgatggtacagcggccccagcctcacaggaaccgagcaggcctggatctgccaaccatagacacgggatatgattcccagccccaggatgtcctgggcatcaggcagctggaaaggcccctgcccctcacctccgtgtgttacccccaggacctccccagacctctcaggtccagggagttccctcagtttgaacctcagtggtatccagcatgtgcactgcctcccaatctttccccacgtgctccatggaactatcattaccattgtcctggaagtcccgatcaccaggtgccat

SEQ ID NO: 30345 - DNA, 820 bp, Macaca Mulatta
gggggggctgttcggcagcatggcgtccgtggcgctgagcgaggcggagaaggtgtacatcgtgcacggcgtccagttcagccaatgctacccctgaatttgaaggtagaggaggtgatgaccttggcaccgagatcgctaacaccctctatcggatatttaacaataaaagcagtgtcgacttgaagaccctctgcattagtcctcgggagcactgctgggttctctatgtggatgtgctactgctggaatgtggtggaaatttgtttgatgccatttccattgctgtaaaggctgctctcttcaatacaagcataccaagagttcgagttctggaggatgaagaggggtcgaaggacatcgaattgtctgatgacccttatgactgcatacgactaagtgtggagaatgtcccctgtattgtcactctgtgcaagattggctatcggcatgtggtggatgctactcttcaggaggaggcctgctcgctggccagcttgctggtatcggtgaccagcaagggagttgtgacgtgcatgaggaaagtggggaaggggcagcctggacccagagagcatcttcgagatgatggagactggcaagcgtgtgggcaaagtgctgcatgcttccttgcagagtgttttgcacaaggaagaaaagcctggggacccaggagacagaaagtttggaatccctggggatgattttgccatttcaaactgctttaactgtggggaattggctttttttaacctctttccctttttaaaactgtggtgttgggagataataaggttttttcctttccgcgcgggttagt

SEQ ID NO: 30346 - DNA, 399 bp, Macaca Mulatta
gccacaggctaagctgatcttttacttcccccaccagaggagttagttcttatccatcccggtccctgctgccactgtgtactggttctcttggagttcaggtgttctctgggtccattacatggccaggttttctgtaggtggaaatccctcagctgaaccaactcatgcgggagcttttggaactgagctgctgccacagctgccccttttcttctaccgctgctgccaagtgctttgcaggactcctcaacaagcaccctgcaggtactgagatcagactgtgtaaggagcctcccacaatcaactacccgtgaaaccttatagctcagttctcattctctttttaaaaggagcttgctaataacattaatagggcttcaactgctcaagcactgt

SEQ ID NO: 30347 - DNA, 4054 bp, Macaca Mulatta
  misc_feature (1)...(4054): n = A,T,C or G
gatatggaagaaagtagcagtgttgccatgttggtgccagatattggggaacaggaagctgtattgactgctgaaagtatcatcagtccttcattggaaattgatgaacaaagaaaaactaaaccagatccattaatccatgttatccagaagttaagcaagatagtggaaaatgagaagtcacaaaaatgtcttttaattgggaagaaacgcccacgttcaagtgctgcaacgcactctcttgaaacacaagaactttgtgagattccggctaaagtaacccagtcacctgctgctgatactagaagagctgagatgtcacaaacaaattttacccctgacactcttgcccagaatgaggggaaggctatgtcttatcagtgtagcctttgtaagtttctgtcatcatctttttccgtgttaaaagatcatattaagcagcatggtcagcagaatgaagtgatattaatgtgctcagagtgccatataacatctagaagccaggaggaacttgaagctcatgtggtgaatgaccatgacaatgatgccaatagccacacaagatccaaagcccaacagtgcgtaagcccctccaactctataggtcggaaaaccacagaaagnnnnnnnnnnnnnnnnnnnnnnnnnnnnnnnnnnnnnnnnnnnnnnnnnnnnnnnnnnnnnnnnnnnnnnnnnnnnnnnnnnnnnnnnnnnnnnnnnnnnnnnnnnnnnnnnnnnnnnnnnnnnnnnnnnnnnnnnnnnnnnnnnnnnnnnnnnnnnnnnnnnnnnnnnnnnnnnnnnnnnnnnnnnnnnnnnnnnnnnnnnnnnnnnnnnnnnnnnnnnnnnnnnnnnnnnnnnnnnnnnnnnnnnnnnnnnnnnnnnnnnnnnnnnnnnnnnnnnnnnnnnnnnnnnnnnnnnnnnnnnnnnnnnnnnnnnnnnnnnnnnnnnnnnnnnnnnnnnnnnnnnnnnnnnnnnnnnnnnnnnnnnnnnnnnnnnnnnnnnnnnnnnnnnnnnnnnnnnnnnnnnnnnnnnnnnnnnnnnnnnnnnnnnnnnnnnnnnnnnnnnnnnnnnnnnnnnnnnnnnnnnnnnnnnnnnnnnnnnnnnnnnnnnnnnnnnnnnnnnnnnnnnnnnnnnnnnnnnnnnnnnnnnnnnnnnnnnnnnnnnnnnnnnnnnnnnnnnnnnnnnnnnnnnnnnnnnnnnnnnnnnnnnnnnnnnnnnnnnnnnnnnnnnnnnnnnnnnnnnnnnnnnnnnnnnnnnnnnnnnnnnnnnnnnnnnnnnnnnnnnnnnnnnnnnnnnnnnnnnnnnnnnnnnnnnnnnnnnnnnnnnnnnnnnnnnnnnnnnnnnnnnnnnnnnnnnnnnnnnnnnnnnnnnnnnnnnnnnnnnnnnnnnnnnnnnnnnnnnnnnnnnnnnnnnnnnnnnnnnnnnnnnnnnnnnnnnnnnnnnnnnnnnnnnnnnnnnnnnnnnnnnnnnnnnnnnnnnnnnnnnnnnnnnnnnnnnnnnnnnnnnnnnnnnnnnnnnnnnnnnnnnnnnnnnnnnnnnnnnnnnnnnnnnnnnnnnnnnnnnnnnnnnnnnnnnnnnnnnnnnnnnnnnnnnnnnnnnnnnnnnnnnnnnnnnnnnnnnnnnnnnnnnnnnnnnnnnnnnnnnnnnnnnnnnnnnnnnnnnnnnnnnnnnnnnnnnnnnnnnnnnnnnnnnnnnnnnnnnnnnnnnnnnnnnnnnnnnnnnnnnnnnnnnnnnnnnnnnnnnnnnnnnnnnnnnnnnnnnnnnnnnnnnnnnnnnnnnnnnnnnnnnnnnnnnnnnnnnnnnnnnnnnnnnnnnnnnnnnnnnnnnnnnnnnnnnnnnnnnnnnnnnnnnnnnnnnnnnnnnnnnnnnnnnnnnnnnnnnnnnnnnnnnnnnnnnnnnnnnnnnnnnnnnnnnnnnnnnnnnnnnnnnnnnnnnnnnnnnnnnnnnnnnnnnnnnnnnnnnnnnnnnnnnnnnnnnnnnnnnnnnnnnnnnnnnnnnnnnnnnnnnnnnnnnnnnnnnnnnnnnnnnnnnnnnnnnnnnnnnnnnnnnnnnnnnnnnnnnnnnnnnnnnnnnnnnnnnnnnnnnnnnnnnnnnnnnnnnnnnnnnnnnnnnnnnnnnnnnnnnnnnnnnnnnnnnnnnnnnnnnnnnnnnnnnnnnnnnnnnnnnnnnnnnnnnnnnnnnnnnnnnnnnnnnnnnnnnnnnnnnnnnnnnnnnnnnnnnnnnnnnnnnnnnnnnnnnnnnnnnnnnnnnnnnnnnnnnnnnnnnnnnnnnnnnnnnnnnnnnnnnnnnnnnnnnnnnnnnnnnnnnnnnnnnnnnnnnnnnnnnnnnnnnnnnnnnnnnnnnnnnnnnnnnnnnnnnnnnnnnnnnnnnnnnnnnnnnnnnnnnnnnnnnnnnnnnnnnnnnnnnnnnnnnnnnnnnnnnnnnnnnnnnnnnnnnnnnnnnnnnnnnnnnnnnnnnnnnnnnnnnnnnnnnnnnnnnnnnnnnnnnnnnnnnnnnnnnnnnnnnnnnnnnnnnnnnnnnnnnnnnnnnnnnnnnnnnnnnnnnnnnnnnnnnnnnnnnnnnnnnnnnnnnnnnnnnnnnnnnnnnnnnnnnnnnnnnnnnnnnnnnnnnnnnnnnnnnnnnnnnnnnnnnnnnnnnnnnnnnnnnnnnnnnnnnnnnnnnnnnnnnnnnnnnnnnnnnnnnnnnnnnnnnnnnnnnnnnnnnnnnnnnnnnnnnnnnnnnnnnnnnnnnnnnnnnnnnnnnnnnnnnnnnnnnnnnnnnnnnnnnnnnnnnnnnnnnnnnnnnnnnnnnnnnnnnnnnnnnnnnnnnnnnnnnnnnnnnnnnnnnnnnnnnnnnnnnnnnnnnnnnnnnnnnnnnnnnnnnnnnnnnnnnnnnnnnnnnnnnnnnnnnnnnnnnnnnnnnnnnnnnnnnnnnnnnnnnnnnnnnnnnnnnnnnnnnnnnnnnnnnnnnnnnnnnnnnnnnnnnnnnnnnnnnnnnnnnnnnnnnnnnnnnnnnnnnnnnnnnnnnnnnnnnnnnnnnnnnnnnnnnnnnnnnnnnnnnnnnnnnnnnnnnnnnnnnnnnnnnnnnnnnnnnnnnnnnnnnnnnnnnnnnnnnnnnnnnnnnnnnnnnnnnnnnnnnnnnnnnnnnnnnnnnnnnnnnnnnnnnnnnnnnnnnnnnnnnnnnnnnnnnnnnnnnnnnnnnnnnnnnnnnnnnnnnnnnnnnnnnnnnnnnnnnnnnnnnnnnnnnnnnnnnnnnnnnnnnnnnnnnnnnnnnnnnnnnnnnnnnnnnnnnnnnnnnnnnnnnnnnnnnnnnnnctttaaaggagacattaaaacgtttgatatgattggactataaatccctaatgaagggatgacttaaatactactcagtagcaccacctgcagttaatatcagtgttggaagatgtcttttttagcaccgtcctaaaaagcaaacatttcaaactgtccaaatgagttaacaggttaaaattcacaattttaataaaaagattaaagcgtcagctcaagattaaaataaccacttcagactttacagtattgatgtatgtttactatattttatgttgcagcatcttttctttgtggctcatgcctttttttaagggttacatgtatggatttttaaattgcctgccatgcctcttttcctccacctggctccatttgcttttttctctcagtactgtagcagttcagatgactgcatatttatacctggatgggtactttattagctcactattagatattttgaaatctggttgtcaggtcaaagaaaaaatttttagctcacaaataaggtaataataattcatgctttgttaaaacttctttaaccatttagtaaacttgttaaacaagaagagagatgtgtgcctctgtgatccccagtctctgccattctgacagcacagataccttagggcatgtttcagcttaacatttgcttggccaaaaggtgtgcctgcctctcttgagctagatactgtgctaggtgctgggagtgcagtgaaaggcatcactgcccttcaggaacccaactcagtgaa

SEQ ID NO: 30348 - DNA, 1147 bp, Macaca Mulatta
  misc_feature (1)...(1147): n = A,T,C or G
agggagcttgtattttgaatatgctcaaggattttctgggtgaggagaaattccagaaaggaataattcagtacttaaagaagttcagctatagaaatgctaagaatgatgatttgtggagcagtctgtcaaatnnnnnnnnnnnnnnnnnnnnnnnnnnnnnnnnnnnnnnnnnnnnnnnnnnnnnnnnnnnnnnnnnnnngctcacctttctgggggaaaatgcagaggtcaaagagatgatgactacgtggactctccagaaaggaatccccctgctggtggttaaacaagacggacattcactccgactgcaacaggagcgcttcctccagggggttttccaggaggaccctgaatggagggccctgcaggagaggnnnnnnnnnnnnnnnnnnnnnnnnnnnnnnnnnnnnnnnnnnnnnnnnnnnnnnnnnnnnnnnnnnnnnnnnnnnnnnnnnnnnnnnnnnnnnnnnnnnnnnnnnnnnnnnnnnnnnnnnnnnnnnnnnnnnnnnnnnnnnnnnnnnnnnnnnnnnnnnnnnnnnnnnnnnnnnnnnnnnnnnnnnnnnnnnnnnnnnnnnnnnnnnnnnnnnnnnnnnnnnnnnnnnnnnnnnnnnnnnnnnnnnnnnnnnnnnnnnnnnnnnnnnnnnnnnnnnnnnnnnnnnnnnnnnnnnnnnnnnnnnnnnnnnnnnnnnnnnnnnnnnnnnnnnnnnnnnnnnnnnnnnnnnnnnnnnnnnnnnnnnnnnnnnnnnnnnnnnnnnnnnnnnnnnnnnnnnnnnnnnnnnnnnnnnnnnnnnnnnnnnnnnnnnnnnnnnnnnnnnnnnnnnnnnnnnnnnnnnnnnnnnnnnnnnnnnnnnnnnnnnnnnnnnnnnnnnnnnnnnnnnnnnnnnnnnnnnnnnnnnnnnnnnnnnnnnnnnnnnnnnnnnnnnnnnnnnnnnnnnnnnnnnnnnnnnnnnnnnnnnnnnnnnnnnnnnnnnnnnnnnnataccaacagatgttttaaagattgtgtattctgtgggtgctcagacgacaacaggatggaattaccttttagagctatatgaactgtcaatgtcaagtgctgaaaaaaacaaaattctgtatgctttgtcaacgagcaagcatcaggaaaagttacagaagt

SEQ ID NO: 30349 - DNA, 806 bp, Macaca Mulatta
ggtattttccttgctgtggattgctgactggatggtccatcacttctggaggaaaggaaaggacccggatagtttctctatcccctacctaacagcattgggtgatctgctcgggacagctctgttagccttaagttttcattttctttggcttattggagatcgagatggagatgttggagactaataaattctacaaactgctctcaagttaccaatgaagaaaatacacgacaaccacttatggctctttttcaaaactcttaaatcagtggtttgacttttgccagggtaatcttcagttggccctgattcaattaaatggccttaatttttttttaaggaatttgtgtcaaaaccagaatgaagagtatttgtgctgcttttcatagaataaataatttgacatagacatagatataagctccagctctgaaattaattagggaagaatataggatgtttatagtgaataattttaaaaccacaaacatagcagaaatgtactgtattatttaatttgtaatgcaggattagaagaagcagagctctagtttagcctttcttgtctcacagatgtgctgtatcccaggcatactataaagcgaagggtgcccaaccaagctttgaatcgtattaacaatgcccaccactatgctaactgaggataaatttaccaattgctcatatttaaactgacctaaatatgttttgctgagcataagataaactcacttttacctccatctaagattaccctgtgctgatgccaattcaatttcatttctgcaagttcttgtcaggct

SEQ ID NO: 30350 - DNA, 794 bp, Macaca Mulatta
ggtacatattgattggaataagattattatatatgaatttacccacaggactctggatcatgttacccactcccctcacaatgttgtccacttactgagtgagttgcattgatgtatccataccaaatgatgttgaataattacatatctttcttgattacaccgatttcttattttggtcactgttactaaatctctattaatgttctgtcttttaactgaatcttttaccgagaaaagctcattgaatcattgttaaattttgtaaacagatgggatagaagggttagcaatgccatattattggtggagggctgttttaacatcattgaagtatgactttagctgagtatctttacaaccatcttgaatatgtacttcagagtccacaagatttagcaaaaagataaagcctgggtagaatatcgttttaaaatgttcatgttccgttcaatattttctccacctgctctccaaatattggaaagcaaaaagcttcatctaaatgatccggtagaattaatttttgaggcccttgtttactcctatcgatacatttcttttcaataaataccttattaaaagaggtttttgaaatagttttttcaaaataagtgaaaattgtagaaacatttgcttgtcttttttttcttaaaaattaaattaaaaagatgattggtgaattgaaaattaacttgggaccctcccccaataatggggctcctaaagaatgaattcatttccaagcaattcccaaaaattttacttttaagggaaaattaaaaatctttcag

SEQ ID NO: 30351 - DNA, 933 bp, Macaca Mulatta
  misc_feature (1)...(933): n = A,T,C or G
ccggaagctgccgtttcagcgcctggtgcgagaaatcgctcaggacttcaagaccgacntgcgctttcagagttccgctgtgatggcactgcaggaggcctgcgaggcttacttggtggggctttttgaggacaccaacctgtgcgctatccatgccaaacgcgtcaccatcatgcctaaggacatccagcttgcccgccgcattcgtggcgagagagcgtaaatcgttttgagtgccaaccttcaacccaaaggctcttttcagagccaatcattttctccatgaaaaaagctgtaatctttcaagacacattagaccacgaaactgcactgatcgaaacagacctttgaaataatggcatttagccccctcaatgtaatgcttaatttaaaattccaaattcaagcgcttcctcaggttttgcctggggctccgcctccctcccgggttttccattggtttagcaggctttgttttgctgttcaggccctctgcttatttcttgtactttgctctccttttctaactcctagccacttaactggcccccgcttaacccattctcttgttttctggctcttaaggctcctccaagtggtggcctgtatttgaggtcttaactgcataggctttcaactccttggatttgcctttcccggatgtctgtttgaacttgcccgaggggccagcgcttttggtctgcatcaggctgtcttactccactagtgttttgagacccagctacttgccggcgacggtcggcgccttgggtgcggtcaaggttaccctctctgtgcgcctgatactggtctaaggctaaggttattagctggaacacctagatccgtggcattaacacagctcttgcagacttgaaagccttgcttaggttctaaactgcaggagtcaaagcaacgaaggtgcagatgggt

SEQ ID NO: 30352 - DNA, 377 bp, Macaca Mulatta
ggcagggtctgaggccttgaacttgagcctccacggtggtgccactgagcagtaccttgagacacctggggcacgccacatctggagtgtctgagaattgggtccctcaagctccagtgctcagtagggcccatggctggggcttcctgggctccacattccacctgctctgcctcacctaaccccaggggctctcctgtgaggtttttttttggtgggcctgctggttcagccttgcctcactgtcctgggcttgtctgttccccctcccacctgatttccgtcatcctgttgcctgggccccaccagcagcaggaactgaggacaccaggacaatctagacccgcccgtcaggtttactgagaacttgtgggggc

SEQ ID NO: 30353 - DNA, 107 bp, Macaca Mulatta
gtggaatctggtgtgtgaggacaactggaaggtgcccctcaccacctccctgttcttcgtaggagtgctcctcggctccttcctttccgggcaactgtcagacaggt

SEQ ID NO: 30354 - DNA, 703 bp, Macaca Mulatta
aaatttccaactttgacttcagtgtggctcaaacttagtttgaatattttactattctgacccaactgacagcttctgagaaccaaatacatactccctggcagtagtccccagaagacactcaagacacagtggctgatattggggagtgggtggccgcaggcaggggcagcttttgccaagtgagcagccacaggagtaagacggtgcctccctggccaaccagggactgaacacttcaatctaaaggttacacattcagggagcaaaaaggctgggccctcttctcccctgtgcctcatatttgcatgtggagggaatgccacttgagcaactctcttggtgttccagtctcactagcccctcaccatgggggattgaggtctcagtctgtgggagactatattggctcatggcccatgactggtgaggctgatctactactgtaagtaactgagatttgacttcttttcttccctttcctctcagaaccagtgagaggcagcaattttgggtaaaatatctgatttggaaataccaactttaccctcgtgggctccccaagaaaccaggtgggagaagggacaagcagataagggcaagcccatcaacatcaacgtgtcaaccacacccagccacctccttctgggcagcagcaaagctgacattttgatctccatctgtctgattcttatgtctactt

SEQ ID NO: 30355 - DNA, 620 bp, Macaca Mulatta
  misc_feature (1)...(620): n = A,T,C or G
gcccgatgacattggccagtcacccatcgtctccatgccggacggagacaaggtggacctggaagccttcagcgagtttaccaagatcatcaccccggccatcacccgtgtggtggactttgccaaaaaactgcccatgttctccgannnnnnnnnnnnnnnnnnnnnnnnnnnnnnnnnnnnnnnnnnnnnnnnnnnnnnnnnnnnnnnnnnnnnnnnnnnnnnnnnnnnnnnnnnnnnnnnnnnnnnnnnnnnnnnnnnnnnnnnnnnnnnnnnnnnnnnnnnnnnnnnnnnnnnnnnnnnnnnnnnnnnnnnnnnnnnnnnnnnnnnnnnnnnnnnnnnnnnnnnnnnnnnnnnnnnnnnnnnnnnnnnnnnnnnnnnnnnnnnnnnnnnnnnnnnnnnnnnnnnnnnnnnnnnnnnnnnnnnnnnnnnnnnnnnnnnnnnnnnnnnnnnnnnnnnnnnnnnnnnnnnnnnnnnnnnnnnnnnnnnnnnnnnnnnnnnnnnnnnnnnnnnnnnnnnnnnnnnnnnnnnaaggagagagaagtgcagagttcgattctgtacaagggggcagcggcagaaggccggccgggcgggtcactgggcgtctacccggaagg

SEQ ID NO: 30356 - DNA, 193 bp, Macaca Mulatta
  misc_feature (1)...(193): n = A,T,C or G
gtcttcctcccgccctccctgagagtgcaagagccccacagagactatcaggcatggctgttgaactgctgggaagggagctcaggcnnnnnnnnnnnnnnnnnnnnnnnagaattctttctgagatgtttttgtggttggagaatatttttgccattgctttgagaagacttcccctcctaactccccctct

SEQ ID NO: 30357 - DNA, 750 bp, Macaca Mulatta
  misc_feature (1)...(750): n = A,T,C or G
gggtgcatgcaggaattcatggacaagaagctgccaggcataatagcaaggattggagacacaaaatcagaaattaagattctaagcataggcggaggtgcaggtgaaattgatcttcaaattgtctccaaagttcaggctcaatacccaggagtttgtatcaacaatgaagttgttgagccaagtgctgaacaaattgccaaatacaaagagcttgtagccaagacatcaaaccttgagaatgtaaagtttgcttggcataacgagacatcatctgaatatcaaagaagaatgttggagaaaaaggaggttcaaaagtgggactttattcatatgattcagatgctgtattatgtaaaagacatcccagctaccctgaaattcttccatagtctcttaggtaccaatgctaagattctcattattgttgtgtcaggaagcagtggctgggacaagctgtggaaaaagtacagatcacgcttaccccaggatgacctgtgcctatatgtcacgtcagatgacatcactcagatgctggacaacctagggcttaagtatgagtgctacgaccttttgtccacgttggacatatctgattgctttactgatggtaatgaaactgcagacctactttgggattttttgactganacctgcaactttaatgccacagcaacaccctgatctcaaagcagaacttgtggaagaatctacaagaagcctgaaatttagtaccaaggaaaagagggg

SEQ ID NO: 30358 - DNA, 2549 bp, Macaca Mulatta
  misc_feature (1)...(2549): n = A,T,C or G
agatgaactgacaccgagggaggccgagggcgagcctgatgaggtgggggtggactgcacccagctgaccttcttcccagccttacacgaaagtctgcactcagaagacttcttggaactgtgtcgggaaagacaaattattttacaagagcttcttgataaagaaaaggnnnnnnnnnnnnnnnnnnnnnnnnnnnnnnnnnnnnnnnnnnnnnnnnnnnnnnnnnnnnnnnnnnnnnnnnnnnnnnnnnnnnnnnnnnnnnnnnnnnnnnnnnnnnnnnnnnnnnnnnnnnnnnnnnnnnnnnnnnnnnnnnnnnnnnnnnnnnnnnnnnnnnnnnnnnnnnnnnnnnnnnnnnnnnnnnnnnnnnnnnnnnnnnnnnnnnnnnnnnnnnnnnnnnnnnnnnnnnnnnnnnnnnnnnnnnnnnnnnnnnnnnnnnnnnnnnnnnnnnnnnnnnnnnnnnnnnnnnnnnnnnnnnnnnnnnnnnnnnnnnnnnnnnnnnnnnnnnnnnnnnnnnnnnnnnngcttctgctctttccaacccagcctgaaggggaaagccgcctcggaggaccccctcaatctaaggnnnnnnnnnnnnnnnnnnnnnnnnnnnnnnnnnnnnnnnnnnnnnnnnnnnnnnnnnnnnnnnnnnnnnnnnnnnnnnnnnnnnnnnnnnnnnnnnnnnnnnnnnnnnnnnnnnnnnnnnnnnnnnnnnnnnnnnnnnnnnnnnnnnnnnnnnnnnnnnnnnnnnnnnnnnnnnnnnnnnnnnnnnnnnnnnnnnnnnnnnnnnnnnnnnnnnnnnnnnnnnnnnnnnnnnnnnnnnnnnnnnnnnnnnnnnnnnnnnnnnnnnnnnnnnnnnnnnnnnnnnnnnnnnnnnnnnnnnnnnnnnnnnnnnnnnnnnnnnnnnnnnnnnnnnnnnnnnnnnnnnnnnnnnnnnnnnnnnnnnnnnnnnnnnnnnnnnnnnnnnnnnnnnnnnnnnnnnnnnnnnnnnnnnnnnnnnnnnnnnnnnnnnnnnnnnnnnnnnnnnnnnnnnnnnnnnnnnnnnnnnnnnnnnnnnnnnnnnnnnnnnnnnnnnnnnnnnnnnnnnnnnnnnnnnnnnnnnnnnnnnnnnnnnnnnnnnnnnnnnnnnnnnnnnnnnnnnnnnnnnnnnnnnnnnnnnnnnnnnnnnnnnnnnnnnnnnnnnnnnnnnnnnnnnnnnnnnnnnnnnnnnnnnnnnnnnnnnnnnnnnnnnnnnnnnnnnnnnnnnnnnnnnnnnnnnnnnnnnnnnnnnnnnnnnnnnnnnnnnnnnnnnnnnnnnnnnnnnnnnnnnnnnnnnnnnnnnnnnnnnnnnnnnnnnnnnnnnnnnnnnnnnnnnnnnnnnnnnnnnnnnnnnnnnnnnnnnnnnnnnnnnnnnnnnnnnnnnnnnnnnnnnnnnnnnnnnnnnnnnnnnnnnagctctttaccaaaccccacccagccaggactgcagcagggaaggctctgcctggaaaggatgtctctacccccgtgagcctgcctggccacccacagccctttttctacagcctgcagtcgctgaggccctcccaggtcacggtcaaagnnnnnnnnnnnnnnnnnnnnnnnnnnnnnnnnnnnnnnnnnnnnnnnnnnnnnnnnnnnnnnnnnnnnnnnnnnnnnnnnnnnnnnnnnnnnnnnnnnnnnnnnnnnnnnnnnnnnnnnnnnnnnnnnnnnnnnnnnnnnnnnnnnnnnnnnnnnnnnnnnnnnnnnnnnnnnnnnnnnnnnnnnncctgatgacattcgagaacctggctgcttggggccgctgtctgtgcgccgtgtgcccgtccccaacaatgatcgtcacctctgggaccagcaccgtggtgtgtgtgtgggagctcagcatgaccaaaggccgcccaaggggcttgcgcctccggcaggnnnnnnnnnnnnnnnnnnnnnnnnnnnnnnnnnnnnnnnnnnnnnnnnnnnnnnnnnnnnnnnnnnnnnnnnnnnnnnnnnnnnnnnnnnnnnnnnnnnnnnnnnnnnnnnnnnnnnnnnnnnnnnnnnnnnnnnnnnnnnnnnnnnnnnnnnnnnnnnnnnnnnnnnnnnnnnnnnnnggcaccattgtctcctgtgcgggagcacacttgtccctgtggaatgtcaatggacagcccctggccagcatcaccacagcctggggcccagaaggagccataacctgctgctgcctgatagagggcccagcttgggacacaagccagatcatcatcaccgggagtcaagacggcatggtccgggnnnnnnnnnnnnnnnnnnnnnnnnnnnnnnnnnnnnnnnnnnnnnnnnnnnnnnnnnnnnnnnnnnnnnnnnnnnnnnnnnggccacaagtgggagaagaacctggccttgagtcgagagctggacgtcagcattgctttgacagggaagcccagcaaaaccagccccgcggtgacggctctggccgtgtccagnagaaaccagactaaactcctggttggtgatgagaaggggagaatattctgctggtctgcagatg

SEQ ID NO: 30359 - DNA, 382 bp, Macaca Mulatta
  misc_feature (1)...(382): n = A,T,C or G
agaggnagtgacctgggagcccacaccttcgctgaggttccaggagcccccgcatggagtagccgaccccccggagctggcgctgctggtgctgtaccctgggcctgggcctggccctgaggtcactgtgacgagggctgggctgccgggtgcccannnnnnnnnnnnnnnnnnnnnnnnnnnnnnnnnnnnnnnnnnnnnnnnnnnnnnnnnnnnnnnnnnnnnnnnnnnnnnnnnnnnnnnnnnnnnnnnnnnnnnnnnnnnnnnnnnnnnctgagtacggcccaggtgcaggcactgctgttcggcgacgaccaccgctgcttcacgcggatgaccccggccttgctcctgctgccgcggtctgagcccgcgccgctgc

SEQ ID NO: 30360 - DNA, 100 bp, Macaca Mulatta
actgtgcgtcatgtaccagcgccggaagttggtcttgacgcctagacgagagggttgtatttggaaacgcggagtgggaagtttttcggtgctgtgtagg

SEQ ID NO: 30361 - DNA, 1668 bp, Macaca Mulatta
  misc_feature (1)...(1668): n = A,T,C or G
ggagcttgcagtgcgttctgggaaagttgctgggccagctcttttgtttccagcctgagcgttgctttcggtttcccgagggtcttctgaggcaccgcggttccggggtgctgggttcccggctcttcgctgggaggcctcctctccgtacctcgttttttggcttgtgtgggggtcctcccaccgctggccgacgccgccagcatgtccggagtgcgcgcagtgcgcatcagcatcgaatcggcctgcgagaagcaggtccatgaggtgggcctcgatggcaccgagacgtacctgccgccgctgtccatgtcgcagaatctggcgcgtctagcccagcggatcgacttcagccagggttcgggctccgaggaggaggaggcggcgnnnnnnnnnnnnnnnnnnnnnnnnnnnnnnnnnnnnnnnnnnnnnnnnnnnnnnnnnnnnnnnnnnnnnnnnnnnnnnnnnnnnnnnnnnnnnnnnnnnnnnnnnnnnnnnnnnnnnnnnnnnnnnnnnnnnnnnnnnnnnnnnnnnnnnnnnnnnnnnnnnnnnnnnnnnnnnnnnnnnnnnnnnnnnnnnnnnnnnnnnnnnnnnnnnnnnnnnnnnnnnnnnnnnnnnnagaatcctcagacgttgcagttgatatctaaaaagaagtcacttgctggagcagcacaaatcctattgaagggggcagaaagactgactaaatcagttaccgaaaaccaagaaaacaagctacaaagagacttcaattctgagcttttgcgattacggcaacactggaaacttcgaaaagttggagataaaattcttggagatctgagctacagaagtgcagnnnnnnnnnnnnnnnnnnnnnnnnnnnnnnnnnnnnnnnnnnnnnnnnnnnnnnnnnnnnnnnnnnnnnnnnnnnnnnnnnnnnnnnnnnnnnnnnnnnnnnnnnnnnnnnnnnnnnnnnnnnnnnnnnnnnnnnnnnnnnnnnnnnnnnnnnnnnnnnnnnnnnnnnnnnnnnnnnnnnnnnnnnnnnnnnnnnnnnnnnnnnnnnnnnnnnnnnnncaggttccccacattggcagacaaaattagaagcggcacagaatgttctcttatgtaaagaaatttttgcacagctctctcgggaagctgttcaaattaaatcacaaatccctcacattgtggtgaaaaaccagattatctctcagccctttccgattgcagttatctatttctttgtgccattcctcaaatgataagaaatcccaaaaatctactactgagaagcaatgtccggaggaccacctttatgtcctagagcataatttgcatctactgattagagagnnnnnnnnnnnnnnnnnnnnnnnnnnnnnnnnnnnnnnnnnnnnnnnnnnnnnnnnnnnnnnnnnnnnnnnnnnnnnnnnnnnnnnnnnnnnnnnnnnnnnnnnnnnnnnnnnnnnnnnnnnnnnnnnnnnnnnnnnnnnnnnnnnnnnnnnnnnnnnnnnnnnnnnnnnnnnnnnnnnnnnnagagctgctgcaaccattgacagcttagcaagccgaattgaggatcctcagatacaagctcattggtcaaatatcaatgatgtttatgaatctagtgtgaaagttttaatcacatcacaaggctatgagcaaatatgcaag

SEQ ID NO: 30362 - DNA, 365 bp, Macaca Mulatta
  misc_feature (1)...(365): n = A,T,C or G
gagttcttggacaggtttcctgtgaacttgtgtctccaaaactcaatagggcaacagaaggtattcttttttttaaccttgaactctctcagatggctgctccagctttcgaacctggcaggnaggcagtcagatctcttggtgaagttgaatccactcttggaaagatnnnnnnnnnnnnnnnnnnnnnnnnnnnnnnnnnnnnnnnnnnnnnnnnnnnnnnnnnaggtttggcaaatacgtgtagacctacatttattaaatcatgatggaaatattattgatgctgccagcattgctgcaattgtggctttatgtcacttccgaagacctgatgtctctgtccaaggagatgaagtaacact

SEQ ID NO: 30363 - DNA, 743 bp, Macaca Mulatta
gagggtcctgccctgtccgcttgccgcctactcacatgcccctgtagacagtacctgggtggggtcccacctggggccgtggcaggtgcagcagatggggtggagggggcattcctcccaggccatctgtgggaggctcatcccctgggggtgcctcccggagctgctgggggacagcatttcaggttggagagacttgggcctgacccgggggtgggcatggcctgggccacagctgtaagtgtctccctgtgctgggggccagccaggttcctgcggctctgggggtgcggccctaggctcaggccacacttgccgtctccctcccaggacaggtcccagaagaggaggccagtcagaatggacagagccggggcctccccaaggccgtgtgtatgaacggcacggaggcggcgcagctgagcaccaaatccaaggcggagggcagggcccccaaccccgcccgcaaggcctgctccgccagcagcaagatccgccggctgtcggcctgcaagcagcagtgagggtggccacctgcaggtggggtgcggcgggacccgggcggggcatgtggggacactgcagggatgccacagccagccatgagcatagcccacgccagtcatggcggctgtcgaacggctgcgcatagttgccatgtagcctttgggtagcttggccacgtagcaatccccactgagggtggtatctccgggcctggtgtctggctagcgtgctggtca

SEQ ID NO: 30364 - DNA, 270 bp, Macaca Mulatta
tgcaaaaaacttttcaaaaggctttcccggattagagaaggaaagggagagagggaggagagatgagtggctattccagagcgacataaagaatttccagccttggacggacagttcggaacgtcttccaagttggactggtgtttacaagcgggaagctaggcggaccttggatttcggcgggtgaagaggctaggttgtttaaggaggtggggcgcatttcagtggctctcttggaaaaagcccagcaagatgtcagacctgctctca

SEQ ID NO: 30365 - DNA, 349 bp, Macaca Mulatta
cccaagttccctttgtgattctgtatcttgtcctgagcaggagaagtgcatggacaagcctgggccaaagttggacagtcgggctgaggcctgttttgtgaactgcgttgagcgcttcattgatacaagccagttcatcttgaatcgactggaacagacccagaaatccaagccagttttctcagaaagcctttctgactgatctcagcattacctctttggaaaaggaaggtagttcaagaaatgaagagctgttgatgggatgattgaagaaacggctatgagaggattggctcccatcttttgttactcttgggacatcctgtcatctgagaatgaacaaagacca

SEQ ID NO: 30366 - DNA, 5450 bp, Macaca Mulatta
  misc_feature (1)...(5450): n = A,T,C or G
agaaacaaagtaaagatcgatttggactagaaggtgatgaggagtcaaccatgttagaagagtccgtttccccaaaaaagnnnnnnnnnnnnnnnnnnnnnnnnnnnnnnnnnnnnnnnnnnnnnnnnnnnnnnnnnnnnnnnnnnnnnnnnnnnnnnnnnnnnnnnnnnnnnnnnnnnnnnnnnnnnnnnnnnnnnnnnnnnnnnnnnnnnnnnnnnnnnnnnnnnnnnnnnnnnnnnnnnnnnnnnnnnnnnnnnnnnnnnnnnnnnnnnnnnnnnnnnnnnnnnnnnnnnnnnnnnnnnnnnnnnnnnnnnnnnnnnnnnnnnnnnnnnnnnnnnnnnnnnnnnnnnnnnnnnnnnnnnnnnnnnnnnnnnnnnnnnnnnnnnnnnnnnnnnnnnnnnnnnnnnnnnnnnnnnnnnnnnnnnnnnnnnnnnnnnnnnnnnnnnnnnnnnnnnnnnnnnnnnnnnnnnnnnnnnnnnnnnnnnnnnnnnnnnnnnnnnnnnnnnnnnnnnnnnnnnnnnnnnnnnnnnnnnnnnnnnnnnnnnnnnnnnnnnnnnnnnnnnnnnnnnnnnnnnnnnnnnnnnnnnnnnnnnnnnnnnnnnnnnnnnnnnnnnnnnnnnnnnnnnnnnnnnnnnnnnnnnnnnnnnnnnnnnnnnnnnnnnnnnnnnnnnnnnnnnnnnnnnnnnnnnnnnnnnnnnnnnnnnnnnnnnnnnnnnnnnnnnnnnnnnnnnnnnnnnnnnnnnnnnnnnnnnnnnnnnnnnnnnnnnnnnnnnnnnnnnnnnnnnnnnnnnnnnnnnnnnnnnnnnnnnnnnnnnnnnnnnnnnnnnnnnnnnnnnnnnnnnnnnnnnnnnnnnnnnnnnnnnnnnnnnnnnnnnnnnnnnnnnnnnnnnnnnnnnnnnnnnnnnnnnnnnnnnnnnnnnnnnnnnnnnnnnnnnnnnnnnnnnnnnnnnnnnnnnnnnnnnnnnnnnnnnnnnnnnnnnnnnnnnnnnnnnnnnnnnnnnnnnnnnnnnnnnnnnnnnnnnnnnnnnnnnnnnnnnnnnnnnnnnnnnnnnnnnnnnnnnnnnnnnnnnnnnnnnnnnnnnnnnnnnnnnnnnnnnnnnnnnnnnnnnnnnnnnnnnnnnnnnnnnnnnnnnnnnnnnnnnnnnnnnnnnnnnnnnnnnnnnnnnnnnnnnnnnnnnnnnnnnnnnnnnnnnnnnnnnnnnnnnnnnnnnnnnnnnnnnnnnnnnnnnnnnnnnnnnnnnnnnnnnnnnnnnnnnnnnnnnnnnnnnnnnnnnnnnnnnnnnnnnnnnnnnnnnnnnnnnnnnnnnnnnnnnnnnnnnnnnnnnnnnnnnnnnnnnnnnnnnnnnnnnnnnnnnnnnnnnnnnnnnnnnnnnnnnnnnnnnnnnnnnnnnnnnnnnnnnnnnnnnnnnnnnnnnnnnnnnnnnnnnnnnnnnnnnnnnnnnnnnnnnnnnnnnnnnnnnnnnnnnnnnnnnnnnnnnnnnnnnnnnnnnnnnnnnnnnnnnnnnnnnnnnnnnnnnnnnnnnnnnnnnnnnnnnnnnnnnnnnnnnnnnnnnnnnnnnnnnnnnnnnnnnnnnnnnnnnnnnnnnnnnnnnnnnnnnnnnnnnnnnnnnnnnnnnnnnnnnnnnnnnnnnnnnnnnnnnnnnnnnnnnnnnnnnnnnnnnaggcagtggctgatcacatccctcaactggtccagggagtgagggggagccaagctcaaaccgaagacctgagtgcccagctggctctcatcatctccagccagaacttcctccanagcctggaagcaagatggtgtcctctgccaaagccgcagtgcccaccgtgagtgaccaggccgcagccatgcagctgagccagtgtgccaagaacctggccaccagcttggcggagctgcgtaccgcctcgcagaaggcaagtggagnnnnnnnnnnnnnnnnnnnnnnnnnnnnnnnnnnnnnnnnnnnnnnnnnnnnnnnnnnnnnnnnnnnnnnnnnnnnnnnnnnnnnnnnnnnnnnnnnnnnnnnnnnnnnnnnnnnnnnnnctggaaaaatgtgctcaggacctgggaagcacatccaaggcagtgggctcctccatggcacagctgctgacctgtgctgctcaaggcaacgaacactacacaggnnncaggggtggctgctagagagacggcccaagctctgaaaacgctggcccaggccgcccgtggagtggctgcatcgacgaccgaccccgcggctgcccatgccatgttagattctgctcgagacgtgatggagggctccgccatgctcattcaagaggccaagcaggccctgattgcacctggagatgcagagagtcaacaaagactggctcaggtnnnnnnnnnnnnnnnnnnnnnnnnnnnnnnnnnnnnnnnnnnnnnnnnnnnnnnnnnnnnnnnnnnnnnnnnnnnnnnnnnnnnnnnnnnnnnnnnnnnnnnnnnnnnnnnnnnnnctacctccaagcacgaagcctttccaggaagcccagagtgaactgaaccaggcagcagctgatctgaaccagtctgctggggaagttgtccatgccacccggggccagagtggagagttggctgcagcctctggaaagttcagcgatgattttgatgaattcctcgatgctggcattgagatggctggccannnncagacaaaagaagaccagatccaagtgataggaaacctcaagaatatctcgatggcatccagcaagctgctgttagctgccaagtctctctctgtagatccaggagctcccaacgcaaaaaatctcctggctgcagctgcaannnnnnnnnnnnnnnnnnnnnnnnnnnnnnnnnnnnnnnnnnnnnnnnnnnnnnnnnnnnnnnnnnnnnnnnnnnnnnnnnnnnnnnnnnnnagaccgtgaaggggatgttggacaatcctaatgaacctgttagtgacctctcttactttgactgcattgagagtgtgatggaaaactccaaggnnnnnnnnnnnnnnnnnnnnnnnnnnnnnnnnnnnnnnnnnnnnnnnnnnnnnnnnnnnnnnnnnnnnnnnnnnnnnnnnnnnnnnnnnnnnnnnnnnnnnnnnnnnnnnnnnnnnnnnnnnnnnnnnnnnnnnnnnnnnnnnnnnnnnnnnnnnnnnnnnnnnnnnnnnnnnnnnnnnnnnnnnnnnnnnnnnnnnnnnnnnnnnnnnnnnnnnnnnnnnnnnnnnnnnnnnnnnnnnnnnnnnnnnnnnnnnnnnnnnnnnnnnnnnnnnnnnnnnnnnnnnnnnnnnnnnnnnnnnnnnnnnnnnnnnnnnnnnnnnnnnnnnnnnnnnnnnnnnnnnnnnnnnnnnnnnnnnnnnnnnnnnnnnnnnnnnnnnnnnnnnnnnnnnnnnnnnnnnnnnnnnnnnnnnnnnnnnnnnnnnnnnaggccctggatggggatttctctgaagacaaccgcagtaagtgtcacatggccaccgcacccttgattgaagctgtggagaacctgacggcgtttgcctcgaaccctgagtttgtcagcattcccgcccagatcagctccgagnnnnnnnnnnnnnnnnnnnnnnnnnnnnnnnnnnnnnnnnnnnnnnnnnnnnnnnnnnnnnnnnnnnnnnnnnnnnnnnnnnnnnnnnnnnnnnnnnnnnnnnnnnnnnnnnnnnnnnnnnnnnnnnnnnnnnnnnnnnnnnnnnnnnnnnnnnnnnnnnnnnnnnnnnnnnnnnnnnnnnnnnnnnnnnnnnnnnnnnnnnnnnnnnnnnnnnnnnnnnnnnnnnnnnnnnnnnnnnnnnnnnnnnnnnnnnnnnnnnnnnnnnnnnnnnnnnnnnnnnnnnnnnnnnnnnnnnnnnnnnnnnnnnnnnnnnnnnnnnnnnnnnnnnnnnnnnnnnnnnnnnnnnnnnnnnnnnnnnnnnnnnnnnnnnnnnnnnnnnnnnnnnnnnnnnnnnnnnnnnnnnnnnnnnnnnnnnnnnnnnnnnnnnnnnnnnnnnnnnnnnnnnnnnnnnnnnnnnnnnnnnnnnnnnnnnnnnnnnnnnnnnnnnnnnnnnnnnnnnnnnnnnnnnnnnnnnnnnnnnnnnnnnnnnnnnnnnnnnnnnnnnnnnnnnnnnnnnnnnnnnnnnnnnnnnnnnnnnnnnnnnnnnnnnnnnnnnnnnnnnnnnnnnnnnnnnnnnnnnnnnnnnnnnnnnnnnnnnnnnnnnnnnnnnnnnnnnnnnnnnnnnnnnnnnnnnnnnnnnnnnnnnnnnnnnnnnnnnnnnnnnnnnnnnnnnnnnnnnnnnnnnnnnnnnnnnnnnnnnnnnnnnnnnnnnnnnnnnnnnnnnnnnnnnnnnnnnnnnnnnnnnnnnnnnnnnnnnnnnnnnnnnnnnnnnnnnnnnnnnnnnnnnnnnnnnnnngatgactaagtcggttactaacccggaggagttgggaggactggcttcacaaatgaccagtgactatgggcacctggctttccagggccagatggcagcagccacggcggaaccagaggannnnnnnnnnnnnnnnnnnnnnnnnnnnnnnnnnnnnnnnnnnnnnnnnnnnnnnnnnnnnnnnnnnnnnnnnnnnnnnnnnnnnnnnnnnnnnnnnnnnnnnnnnnnnnnnnnnnnnnnnnnnnnnnnnnnnnnnnnnnnnnnnaggtctccttggtgctctcagctctgcaggccgggaacaaaggaacccaggcatgcattacagctgccaccgctgtgtctgggatcattgccgacctggacaccaccattatgtttgcaacagcggggacgctaaatgcagagaacagtgagaccttcgcagaccacagnnnnnnnnnnnnnnnnnnnnnnnnnnnnnnnnnnnnnnnnnnnnnnnnnnnnnnnnnnnnnnnnnnnnnnnnnnnnnnnnnnnnnnnnnnnnnnnnnnnnnnnnnnnnnnnnnnnnnnnnnnnnnnnnnnnnnnnnnnnnnnnnnnnnnnnnnnnnnnnnnnnnnnnnnnnnnnnnnnnnaggtggttttgatcaacgccatcaaagatgtagccaaggccctttccgatctcatcagtgctaccaagggagctgccagcaagccagcggacgacccttccatgtaccagctcaagggggccgccaaggtnnnnnnnnnnnnnnnnnnnnnnnnnnnnnnnnnnnnnnnnnnnnnnnnnnnnnnnnnnnnnnnnnnnnnnnnnnnnnnnnnnnnnnnnnnnnnnnnnnnnnnnnnnnnnnnnnnnntgttccagtcaaaagatgtacctgaaaagacatcatcacctgaagaatccataaggatgacgaaaggcatcaccatggcaacaaccaaagccgtggcagctggaaactcgtgtagacaggaggacgtgattgctactgccaacctgagccggaaagcagtgtcagatatgttgacggcttgcaa

SEQ ID NO: 30367 - DNA, 1702 bp, Macaca Mulatta
  misc_feature (1)...(1702): n = A,T,C or G
gtgaatgcctgcagttaaaaattttggtgcttcaaaatgaactggaacggcagaagaaagctttgggacgggaggtggcattactgcataagcaacaaattgcgttacaggacaaaggnaggaagtgcattttcagctgagcatctcaaacttcaactccagaaggaatccctaaatgagctgaggaaggagtgcactgcgaaaagnnnnnnnnnnnnnnnnnnnnnnnnnnnnnnnnnnnnnnnnnnnnnnnnnnnnnnnnnnnnnnnnnnnnnnnnnnnnnnnnnnnnnnnnnnnnnnnnnnnnnnnnnnnnnnnnnnnnnnnnnnnnnnnnnnnnnnnnnnnnnnnnnnnnnnnnnnnnnnnnnnnnnnnnnnnnnnnnnnnnnnnnnnnnnnnnnnnnnnnnnnnnnnnnnnnnnnnnnnnnnnnnnnnnnnnnnnnnnnnnnnnnnnnnnnnnnnnnnnnnnnnnnnnnnnnnnnnnnnnnnnnnnnnnnnnnnnnnnnnnnnnnnnnnnnnnnnnnnnnnnnnnnnnnnnnnnnnnnnnnnnnnnnnnnnnnnnnnnnnnnnnnnnnnnnnnnnnnnnnnnnnnnnnnnnnnnnnnnnnnnnnnnnnnnnnnnnnnnnnnnnnnnnnnnnnnnnnnnnnnnnnnnnnnnnnnnnnnnnnnnnnnnnnnnnnnnnnnnnnnnnnnnnnnnnnnnnnnnnnnnnnnnnnnnnnnnnnnnnnnnnnnnnnnnnnnnnnnnnnnnnnnnnnnnnnnngatgtaggcttctctggggggatcccttcaccagacaaaggacatcgaaaacgggccagctctgagaatgagagacttcagtacaaaacccctcctcccagttacagctcagcattagcccagcctgtgaccactgtcacctccgtgggagaggccgagagaaagataacctctctctcctcctccttggacacctccttggacttctccaaagaaaacaagaaaaaaggagaggatctagttgacagcttaaacggaggccatgtgaatgtgcgccctcgccaagaacaaggagaagccccctccgagcaccaggccacagtcaatggcactctcctacccggcgagcaggccgggcccgccagtgtccagcttccaggcgagttccacccagtctcagaagctgagctctgctgtactgtggagcaagcagaagaaatcatcgggctggaagccacaggtttcacctcaggcgatcagctagaagcatttaactgcatcccggtggacagtgctgtggccgtagagtgtgacgaacaggttctgggagaatttgaagagttctcccgaaggatctacgcactgaatgaaaacgtctccagcttccgccggccacgcaggagttccgagaagtgaagtgagcaggtcaacagtaggaccggggcagaagctctgcctaaaatgaagtgaaagctgcacttaaccctttgtaataatgatgacacaaaatgaatattaatggaggatattcctcggaaaaacagactttgggaatgaaggagggactcaggatcattgttatcagtgggccaaagttagattttgctttcaagatttgcttttcaggcctgatgattattttaaagcaaaaatcaccctctagttgaaagagcttacagcttgagtcaccttttagctatttgtctgctttttaattaccctt

SEQ ID NO: 30368 - DNA, 264 bp, Macaca Mulatta
  misc_feature (1)...(264): n = A,T,C or G
aaatgcggccgccgcctctgcgtgctccagctgcctggcagtccccacctagggcacgctgccacatcgttacctggtccaagtgcccgggaggctccgcctgtcggcttcgctctgcagttgcatctctgatctgtccggcaggctcaggncaggctctaacagctccattctctgtccccaagcgccatgagaggccttctttgctggctcgtgttgctgttccttcttcagccctgggaaagccagctccagttggcaggt

SEQ ID NO: 30369 - DNA, 808 bp, Macaca Mulatta
gtgctgggaggccctccgtggcttaggaggccacttccaaaggtggggtgccccagggaggcaccagtggccaggatgtccacacagagcacccaccccccgaaacccgaggccccgcgtctgccgcctgcgatctcgagctgtcagcggcgccacacgctccctgccagcgagtttcgctgcctcaccccggaggacgccgtcagcgcctttgagatcgagcgtgaagccttcatctccgtcttgggtgtctgccccctgtacctggatgagatccggcacttcctgaccctgtgtccggagctgtccctgggctggttcgaggagggctgccttgtggccttcatcatcggctcactctgggacaaggacagactcatgcaggagtcactgacgatgcacaggcctgggggccacatagcccacttgcacgtgctggccgtgcactgcgccttccggcagcagggcaggggccccatcctgctgtggcgctacctgcaccacctgggcagccagccggctgtgcaccgggccgcgctcatgtgcgaggacgcgctggtacccttctatgagaggttcggcttccacgccatgggcccctgcgccatcaccgtgggctccctcagcttcacggagctccactgctccctgcagggccaccccttcctgcgcaggaacagcggctgctgaactgggctgcccacctggctgccaacgtgatccccgtctctgccctgggccccttagctcagctaagcatggagacagcagtttccagagtggagagagcagggctaaataaagagga

SEQ ID NO: 30370 - DNA, 117 bp, Macaca Mulatta
ggtggtatcacggcaacctcacgcgccatgctgccgaagctcttctcctctcaaatgggtgtgacggcagctaccttctgcgggacagcaatgagaccactgggctgtactctctct

SEQ ID NO: 30371 - DNA, 630 bp, Macaca Mulatta
ggtcccttctgtcagtgctgtgctttcttccctgtgagagctgactatagcgtgtctgccacctcttcattactaatcagaactagatgatgtttaacttagactgaagcgtgacgctttcatcagtagcttcaagaaagtctaaaatgttaatttgtggaattggacacagtattcacaggttacctgtacgtgctcctccgtccctcctgttggcacccttgcatcgcccgggcctgattcctctcgggggtggttcacctccacagggtcatagttcagcggtgaacgccgggcagccgttttctggctaagcaaacagcacctttctctttgagcttcctctgctgacctctgtcccccttcggatttcatcttctgaccgaaccctgatgttcagtggcagagacagctgatggccagagctgtggggacaccagggtgggggtgcgcgtggacaccccaaaccccagctgctgtgtcaaggctgaggacgccgtgccaccatcaaaagggggttccaggttttccatcagtggcctaaagaagggacttcgtcttactgaggagtggggaattaaagagatttgactccctttagtgttgggggcagtccattccccagtcgct

SEQ ID NO: 30372 - DNA, 556 bp, Macaca Mulatta
  misc_feature (1)...(556): n = A,T,C or G
gcaaatgcctattattattgctggaaatgagcaacaaaagaagaagtatttggggagaatgactgaggagccgttgatgtgtnnnnnnnnnnnnnnnnnnnnnnnnnnnnnnnnnnnnnnnnnnnnnnnnnnnnnnnnnnnnnnnnnnnnnnnnnnnnnnnnnnnnnnnnnnnnnnnnnnnnnnnnnnnnnnnnnnnnnnnnnnnnnnnnnggtattttttattggcacgttctgatccagatcctaaagctcctgctaataaagcctttactggattcattgtagaagcagataccccaggaattcagattgggagaaagnnnnnnnnnnnnnnnnnnnnnnnnnnnnnnnnnnnnnnnnnnnnnnnnnnnnnnnnnnnnnnnnnnnnnnnnnnnnnnnnnnnnnnnnnnnnnnnnnnnnnnnnnnnnnnnnnnnnnnnnnnnnnnnnnnnnnnnnnnnnnnnnnnntggtgctgttggattagcacaaagagctttggatgaagctaccaagtatgccctggaaaggaaaacttttggaaagttacttatagag

SEQ ID NO: 30373 - DNA, 1212 bp, Macaca Mulatta
  misc_feature (1)...(1212): n = A,T,C or G
tttgtttcagtttctgctgcatggactcatactcagccaagattcgggcaaaccttgtttgcaggannnnnnnnnnnnnnnnnnnnnnnnnnnnnnnnnnnnnnnnnnnnnnnnnnnnnnnnnnnnnnnnnnnnnnnnnnnnnnnnnnnnnnnnnnnnnnnnnnnnnnnnnnnnnnnnnnnnnnnnnnnnnnnnnnnnnnnnnnnnnnnnnnnnnnnnnnnnnnnnnnnnnnnnnnnnnnnnnnnnnnnnnnnnnnnnnnnnnnnnnnnnnnnnnnnnnnnnnnnnnnnnnnnnnnnnnnnnnnnnnnnnnnnnnnnnnnnnnnnnnnnnnnnnnnnnnnnnnnnnnnnnnnnnnnnnnnnnnnnnnnnnnnnnnnnnnnnnnnnnnnnnnnnnnnnnnnnnnnnnnnnnnnnnnnnnnnnnnnnnnnnnnnnnnnnnnnnnnnnnnnnnnnnnnatataatctccaggactgtagacttggggttgcaatttcaagaccaactccaccaacagaccagcttcacaatcagcaaaaatgcgtaccttttttaatgtgtctaagtgaacattgatggcaatttctgctcttagtttatcaggtagatactttaagacttctttctcatcaactgtttttttgttggtccacaggtagtcaaaccatttaataactctcttttccatatctttgcttacatttcgaaaatgcatatattgcttgatagcatcaattcttgcttgaaattctgctctggccgcattcatgttggaaatcatagaacctatgttaccaacgatggtagcaaaaattagcactccaattaggaaatcaaccaccacaaagacatactcagaatccctcacaggagggggtgtttcaccaatggtagtcaaagtcagtgtagaccagtaaaggctgtatacgtattttctagccaaacggccaaattcaggatcattagtatcagggtagacccatgtatcatttccaaatccaatagctttagaaatagagtagtacacacatgcattccagtggataatgatgacgatgtacataacaaggttggaaatcctgaagatgtttggatagtttgtccttgtttctgttctctggaagaactcaaacatacgagagattcgtaatgacctgtttaatctaatttctggatagttccaccctaaatagaatacagcaaatcagttggtat

SEQ ID NO: 30374 - DNA, 143 bp, Macaca Mulatta
aggcatattcctttcagctttcttcacttacgttcctatgaatgaacaaatcatcattggaagacttggtgaagatataattctcccttcttcatttgagaggggatccgaagttgtaatacactggaagtatcaagacagct

SEQ ID NO: 30375 - DNA, 284 bp, Macaca Mulatta
  misc_feature (1)...(284): n = A,T,C or G
accaggttgatctggattccaggcacattggctgggtaacaagtgaacttccaggaggggataatcacatcatcaaaattgaattaaaaggcccacaaaatacactcagagttcgacaagtcaaagtcctcggctggaaagatggtgaaagcacaaaaatagctggccaaatttcagccagtgtggcccagcagaggaactgtgaagctgagactctgcgagtattcatactgattacgtctcaagtntcaagtatttggaaagctcatctctggagatgctga

SEQ ID NO: 30376 - DNA, 918 bp, Macaca Mulatta
  misc_feature (1)...(918): n = A,T,C or G
caggaactgcagtggtgaccatgaagaaagcagctgtctggaccgacagtcgctactggactcaggctgagcggcagatggactgcaactgggagctccataaggannnnnnnnnnnnnnnnnnnnnnnnnnnnnnnnnnnnnnnnnnnnnnnnnnnnnnnnnnnnnnnnnnnnnnnnnnnnnnnnnnnnnnnnnnnnnnnnnnnnnnnnnnnnnnnnnnnnnnnnnnnnnnnnnnnnnnnnnnnnnnnnnnnnnnnnnnnnnnnnnnnnnnnnnnnnnnnnnnnnnnnnnnnnnnnnnnnnnnnnnnnnnnnnnnnnnnnnnnnnnnnnnnnnnnnnngggagcacttggcaggagaaagtatctggcgtnnnnnnnnnnnnnnnnnnnnnnnnnnnnnnnnnnnnnnnnnnnnnnnnnnnnnnnnnnnnnnnnnnnnnnnnnnnnnnnnnnnnnnnnnnnnnnnnnnnnnnnnnnnnnnnnnnnnnnnnnnnnnnnnnnnnnnnnnnnnnnnnnnnnnnnaggttgtttgcaaacaagagtcgctttagatctgaaaccttgagctatctgaactccagttgcacaggccccatgtgtgtgcaaatcgaggattacannnnnnnnnnnnnnnnnnnnnnnnnnnnnnnnnnnnnnnnnnnnnnnnnnnnnnnnnnnnnnnnnnnnnnnnnnnnnnnnnnnnnnnnnnnnnnnnnnnnnnnnnnnnnnnnnnnnnnnnnnnnnnnnnnnnnnnnnnnnnnnnnnnnnnnnnnnnnnnnnnnnnnnnnnnnnnnnnnnnnnnnnnnnnnnnncgggacgctgtggctgtgatccggtacttggtctggctggagaagaatgtgcccaaaggcacagtggacgagttctcgggggcagagctcgtggacaagttccgag

SEQ ID NO: 30377 - DNA, 592 bp, Macaca Mulatta
  misc_feature (1)...(592): n = A,T,C or G
gggaactgttcagaaaactgcactgatgttctgtttagtaacaagattaccttcttaatggacctcctgatacaccagttgacggtttatgttccagatgaaaataatactattttgggaagaaatacaaataaacaagtttttgaaggcttgacaacgggacttctcaaagtcagtgctgtggttttgggctgcctgattgccagtcgaccagatggaaactgccagccagctacccccaaaataccaacacaggaaatgaaaaacaaaccctcacaaggtgatgcttttnacaatcgagttcaggaccttatcagctacgtggtgaacatgggtctgaatgacaaactgtgtgcctgcttcctctcggtgcaggccccatggatgaaatcccaagattgcccatttctgccactgccccagatcttactgcaatgtgccttgggctttctgcccggaaagcaaccgctttttaacaaatccccgattccaagggttaactgcttttagcactgacgggggaatttcaaagcccagggcccttcgggccctttggcccacggcgtccaggaattcccaatccccgttcctt

SEQ ID NO: 30378 - DNA, 1199 bp, Macaca Mulatta
  misc_feature (1)...(1199): n = A,T,C or G
agtctcctctcggcaaagtgaaagaagcggtgaaggtggccattgatgcaggatatcgccacattgactgtgcctacgtctatcagaatgaacatgaggtgggggaagccatccaagagaagatccaagagcaggctgtgaagcgggaggacctgttcatcgtcagcaaggtnnnnnnnnnnnnnnnnnnnnnnnnnnnnnnnnnnnnnnnnnnnnnnnnnnnnnnnnnnnnnnnnnnnnnnnnnnnnnnnnnnnnnnnnnnnnnnnnnnnnnnnnnnnnnnnnnnnnnnnnnnnnnnnnnnnnnnnnnnnnnnnnnnnnnnnnnnnnnnnnnnnnnnnnnnnnnnnnnnnnnnnnnnnnnnnnnnnnnnnnnnnnnnnnnnnnnnnnnnnnnnnnnnnnnnnnnnnnnnnnnnnnnnnnnnnnnnnnnnnnnnnnnnnnnnnnnnnnnnnnnnnnnnnnnnnnnnnnnnnnnnnnnnnnnnnnnnnnnnnnnnnnnnnnnnnnnnnnnnnnnnnnnnnnnnnnnnnnnnnnnnnnnnnnnnnnnnnnnnnnnnnnnnnnnnnnnnnnnnnnnnnnnnnnnnnnnnnnnnnnnnnnnnnnnnnnnnnnnnnnnnnnnnnnnnnnnnnnnnnnnnnnnnnnnnnnnnnnnnnnnnnnnnnnnnnnnnnnnnnnnnnnnnnnnnnnnnnnnnnnnnnnnnnnnnnnnnnnnnnnnnnnnnnnnnnnnnnnnnnnnnnnnnnnnnnnnnnnnnnnnnnnnnnnnnnnnnnnnnnnnnnnnnnnnnnnnnnnnnnnnnnnnnnnnnnnnnnnnnnnnnnnnnnnnnnnnnnnnnnnnnnnnnnnnnnnnntctcatttggaggactaccccttccatgcagaatattgaggttgaatctcctggtgacattacacagggtattctctttcttcgctgaagtgtgactatctccactcacgtcctattttagccaagcttatctgagatcacagtaaacttcgtcctgctgtagaccagaatcaaggtgctgttttagacatgtatttctgtaagtgcaactaggatcagaatatcacaggaaaacatggcttgaataagcagatgacaattttttccacttctctgatctgaacaaatgtttgttaagcacaagaaactctgccaacactaaggatgtaaagatcaataataaacaataatga

SEQ ID NO: 30379 - DNA, 445 bp, Macaca Mulatta
gacctgaccctggacggcggcctccagcggctgctcagctccctgcgggccgacccacgtcacagcctggccctgccaccgggcggcgtggaggagcacgggcccgcggtcacgctctagactgagaggcccccaagtcctggctccagttcccgggtaaggacagggacaggacctgcagactgcatcccctcctttgttgttgtttttctgaccacaaaaacaactcagctctttgtttcaacttctggatatagaaacacaaatattgcctatttttatcgaatttcgccacgaacttaaaatgaatgcctgaagacaactccgtaccaggcctgagtgcagctcttcgcgcctttgccaagtgatggaaaagatctgaccaagtgtaaacaaatgctttaaaaaatttttacgcatactttgtttttaaagtgaagcgtta

SEQ ID NO: 30380 - DNA, 320 bp, Macaca Mulatta
gtcagagagtcctaagcagcagaagatcctgttttggatgttcctgtgcatgtacctggtcacggtggtgggaaatgtgctcatcatcctggccatcagctctgattctcgcctgcacacccccatgtacttcttcctggccaacctctccttcactgacctcttctttgtcaccaacacaatccccaagatgctggtgaacctccagtcccagaacaaagccatctcctatgcagggtgtctgacacagctctacttcctggtctccttggtggccctggacaacctcatcctggctgtgatggcgtatgaccgctatg

SEQ ID NO: 30381 - DNA, 279 bp, Macaca Mulatta
gacgctaacgagctggcactcgcgatcccacgttggctcatggacaccctttcgggggcgtgtcctcccagttctagaggttcccagagaagaggaggtgctcactaaccaagcagctcgcccagactccgggcagagagaagaatggagcgccggccgcaggagcgggatggagacgagtagccggccgcccccgcgggccagccccaaactggttttgatcctggacgcccggctggacatgcagactcgcatctgagacaatgtgctgttcaccgc

SEQ ID NO: 30382 - DNA, 778 bp, Macaca Mulatta
catgaatcaaactctactcagtcaagaagtagtggacaaaagcttgggtctagccgttcatgttcaggagatagtcggaggcgaagtcatgcatgtggttatagcaattcaagtgggtgcggaaggccacaaaatgcttcaaattcttgtcagtcacatagatttggagggcaagtaaatcaatctagctatattcagtcaggctgtcagtcaggaattaatggagaacaaggccatgactgtgtctcaggaggtcagccctctggatgtggtcaacctgagtctaactcctgtagtcagtcctatagtcagaggggatacggagctcgagaaaatggccaaccacaaaactgtggaggacaacagagaacaggctcaagtcagtcctctttttgtggacaatatgagtctggaggtagccagtcttgtagtaatggtcaacatgaacatggttcctgtggccgcttttcaaactcttctagttcaaatgaattttccaaatgtggtaaacatcggtctggttcaggtcagtttactagctgtgaacaacatggaacaggcttgagtcagtcctctggcttcgaacaacaagtagctggctcaagtcaaacttgtagccagtatgggtctaggtcaagtcaatcctcaggctatgatgagcatgggtctagctcaggtaagacatctggctttggacaacacaggtctggctcaggtcattcctctggctttggccaacatggatcaggctcaggtacaagcctttggctttggacag

SEQ ID NO: 30383 - DNA, 166 bp, Macaca Mulatta
gcacagcccggcgcggcctgtaaagcagtctcaggcctgctgcagggagaagatggcggtcgcagtgagaactttgcaggaacagctagaaaaggccaaagagagccttaagaacgtggatgagaatattcgcaagctcaccgggcgggatccgaatgacgtgagg

SEQ ID NO: 30384 - DNA, 585 bp, Macaca Mulatta
ccctccaagccctccttacctgtctcctgtttgggtgaaacttcgagcatctctattaacttcgttggtagctccggtcccctgcagtcgccgggggcccagagggacacacagagggagaccaccagcctgggtccctcctggccgcctcgccattggaggtgggatggggagctcagcgtcagccacagtgcgcaaggtgaagagttttgatccctcgcagatcctcaagccaggcaaggcgcccagcttctatcccaggtagcactctcctatcccaggtctccaacggcaatcgcaaccctgtgcccatggagggcttcccctgtctaagagccactgggagtgggatgggctaatttctcgggccgctttctattgggcacttcagactgtgctgggcaagggcagttgtttgaggcagcttggggtgaagctcttagggaggacgtcctgtgcagctcggccagccctggccaggcccaggcagccaccaaccatggtttctccatcacccctaacccctcccacagccccttctcgtgtttgcccaccgtctaggccatgcttccactttctcacctg

SEQ ID NO: 30385 - DNA, 288 bp, Macaca Mulatta
agaaaacagcaaaccagaagagagccatttgctagccaaaaggtatgggggcttcatgaaaaggtatggaggcttcatgaagaaaatggatgagctttatcccatggagccagaagaagaggccaatggaagtgagatcctcgccaagcggtatgggggcttcatgaagaaggatgcagaggaggatgactcgctggccaattcctcagacctgctgaaagagcttctggaaacaggggacaaccgagagcatagccaccaccaggatggcagtgataatgaggaaga

SEQ ID NO: 30386 - DNA, 844 bp, Macaca Mulatta
atcccaggagtggagcaataccacatctggctttccattcctttctaccttatgaacatcactgcagtcttgggaaatggagccctcatcctactggccctaagtgaacacacactccatgtcttcctatccaggctggctggcactgatatcgtgatatccaccaccactgtgccaaaggccttggcgatcttctgggtccacgctggggaaatagcctttgatgcgtgcgttactcagatgtttttcattcatgttgcctttgtggctgagtcaggaatcctgctggccatggcatttgacagttatgtagccatttgtactcccttgagatacactaccatcttaactcctatggtaattagaaaaatgaccctggcaatctggggacgaagcattgggacaatttttcctgtcatattcctgctgaagaggctgccatactgtcagaccaatatcatcccccactcatactgtgagcacattggggtggcccgattggcctgtgctgacataactgtcaatatctggtatggcttttcagtgccaatgacatcggttttggtagatgttgcattcactggtttttcctacactttgatcctccaggctgtgtttagacttccttcccaggagtcccagcacaaagctcttaacacctgtggttctacattggagttattctcctcttcttcatcccatcattttttactttcctgacccaccgctttggcaagaatatcccccatcatgtccacatacttctggcaaatctctatgtgcttgttcccccatatgctaaccccattatctacagagagaagaccaagcaactcagaaacac

SEQ ID NO: 30387 - DNA, 2409 bp, Macaca Mulatta
  misc_feature (1)...(2409): n = A,T,C or G
tccccagcaatggcacagcctgttaccttatacggccaacaggccaaagcctatggtggatccttcatgcatcacacccatccagctggctcctatgaagnnnnnnnnnnnnnnnnnnnnnnnnnnnnnnnnnnnnnnnnnnnnnnnnntgctagaggattttgacaacatctcggtgactcgttccaactccctaaggaaagaaagcccacccaccccagatcagggagcctccagccacggtccaggccacgcggaagaaaatggcttcatcaccttctcccagnnnnnnnnnnnnnnnnnnnnnnnnnnnnnnnnnnnnnnnnnnnnnnnnnnnnnnnnnnnnnnnnnnnnnnnnnnnnnnnnnnnnnnnnnnnnnnnnnnnnnnnnnnnnnnnnnnnnnnnnnnnnnnnnnnnnnnnnnnnnnnnnnnnnnnnnnnnnnnnnnnnnnnnnnnnnnnnnnnnnnnnnnnnnnnnnnnnnnnnnnnnnnnnnnnnnnnnnnnnnnnnnnnnnnnnnnnnnnnnnnnnnnnnnnnnnnnnnnnnnnnnnnnnnnnnnnnnnnnnnnnnnnnnnnnnnnnnnnnnnnnnnnnnnnnnnnnnnnnnnnnnnnnnnnnnnnnnnnnnnnnnnnnnnnnnnnnnnnnnnnnnnnnnnnnnnnnnnnnnnnnnnnnnnnnnnnnnnnnnnnnnnnnnnnnnnnnnnnnnnnnnnnnnnnnnnnnnnnnnnnnnnnnnnnnnnnnnnnnnnnnnnnnnnnnnnnnnnnnnnnnnnnnnnnnnnnnnnnnnnnnnnnnnnnnnnnnnnnnnnnnnnnnnnnnnnnnnnnnnnnnnnnnnnnnnnnnnnnnnnnnnnnnnnnnnnnnnnnnnnnnnnnnnnnnnnnnnnnnnnnnnnnnnnnnnnnnnnnnnnnnnnnnnnnnnnnnnnnnnnnnnnnnnnnnnnnnnnnnccccaggggccctgccaaaatacctcaaagtcaaagcaaagcgggctattcctcaagcagccaccagtatccgtctgggtaccacaaagccaccttgtaccaccacccctccctgcagagcagttcgcagtacatctccaccgcttcctacctgagctccctcagcctctcatccagcacctacccgccgcccagctggggctcctcctccgaccagcagccctccagggtgtcccatgaacagtttcgggcggccctgcagctggtggtcagcccaggagaccccagggaatacttggacaactttatcaaaatcggggaaggctcaaccggcatcgtgtgcatcgccaccgagaaacacacagggaaacaagttgcagtgaagaaaatggacctccggaagcaacagagacgggaactgcttttcaatgaggnnnnnnnnnnnnnnnnnnnnnnnnnnnnnnnnnnnnnnnnnnnnnnnnnnnnnnnnnnnnnnnnnnnnnnnnnnnnnnnnnnnnnnnnnnnnnnnnnnnnnnnnnnnnnnnnnnnnnnnnnnnnnnnnccagaatgaatgaagaacagatagctactgtctgtctgtcagttctgagagctctctcctaccttcataaccaaggagtgattcacagggacataaaaagtgactccatcctcctgacaagtgatggccgnnnnnnnnnnnnnnnnnnnnnnnnnnnnnnnnnnnnnnnnnnnnnnnnnnnnnnnnnnnnnnnnnnnnnnnnnnnnnnnnnnnnnnnnnnnnnnnnnnnnnnnnnnnnnnnnnnnnnnnnnnnnnnnnnnnnnnnnnnnnnnnnnnnnnnnnnnnnnnnnnnnnnnnnnnnnnnnnnnnnnnnnnnnnnnnnnnnnnnnnnnnnnnnnnnnnnnnnnnnnnnnnnnnnnnnnnnnnnnnnnnnnnnnnnnnnnnnnnnnggtttcttcagtgctccggggattcctagacctgatgttggtgagggagccctctcagagagcaacagcccaggaactcctcggacatccattcttaaaactagcaggtccaccgtcttgcatcgtccccctcatgagacaatacaggcatcactgagcagaggattcgtgtaggtggcaaagctagatgaggacatgagaataattcaggagaacaaaaggaaacacagaacatgcaaaaggcctgtgcattctagaccagccaattggtgggacagtgtgatgaccggcagggttcgacagaccagggcatcttcttgtgtcttaaataggcatctctccactgacaggtggcgtggtcatttggagcacggctttaataagtcattaatatatttttcagcccttcatcccgcaaatccgaaggactcagtacaaactccgttatgatatatcctagccacatgcacggtaacatgtaggattttctatattgacagaatacttttctggc

SEQ ID NO: 30388 - DNA, 351 bp, Macaca Mulatta
  misc_feature (1)...(351): n = A,T,C or G
gaacttccatgtctggaatgagctttggatgatccggaaagatctcccaccaggatacaacgggtggcaggttctggaccccactccccagcagaccagcagtggngggctgttctgctgtggccctgcctctgtgaaggccatcagggaaggggatgtccacctggcctatgacacccctttcgtgtatgccgaggtgaacgccgatgaagtcatttggctcctcagggatggccaggcccaggaaatcctggcccacaacaccagttccatcgggaaggagatcagcaccaagatggtggggtcagaccagcaccagagcatcaccagctcctacaagtacccagaagg

SEQ ID NO: 30389 - DNA, 380 bp, Macaca Mulatta
ttactccctttaatatttaaaaactgtttctcctcagagaatctgctggtcacgtggaagcaagtggggctggaactgaagccacattcctcagctgagtgcaacttctgcaggaggccactgcattttgaagtgatgagtgaaagagagaagtcctatttctcaggcttgagcaagttggtatctgctcaggcctgagcatgacctcagttattccacttaaccccaggccattatcatatccagatagtcttcagagttgtctttatatgtgaattaagttatattaaattttaatctatagtaaaaacatagtcctggaaataaattcttgtttaagtggtggctctttctgctattggctactgaataaaattctt

SEQ ID NO: 30390 - DNA, 696 bp, Macaca Mulatta
  misc_feature (1)...(696): n = A,T,C or G
cactgtctccactttgtggacacctgtatggctacccggaaggccgtatatgcttcgggagaccatcaagtttatgtacacagcctgagacgaccgggacaacggcgaaatgcgccgcaaaaccctgctggcgctctttactgaccaccaatgggtggcaccagctgtggccaccgccaagctgcacgccgactaccagtctcccgtctacttttacaccttctaccaccactgccaggcggagggccggcctgagtgggcagatgcggctcacggggatgaactgccctatgtctttggcgtgcccatggtgggtgccaccgacctcttcccctgcaacttctccaagaatgacgtcatgctcagtgccgtggtcatgacctactggaccaactttgccaagannnggaccccaaccagccagtgccgcaggataccaagttcattcacactaagcccaatcgcttcgaggaggtggtatggagcaaattcaacagcaaggagaagcagtatctgcacataggcctgaagccacgtgtacgtgacaactaccgcgccaacaaggtggccttctggctggagctcgtgccccacctgcacaacctgcacacggagctcttcaccaccaccacgcgcctgcctccctacgccacacgctggccgcctcgtccccctgctggcgccccgggcacacgt

SEQ ID NO: 30391 - DNA, 317 bp, Macaca Mulatta
gtaaagtatattatcaaaataagaaaataatgctcttgcacagaacaaagtggctggaaatttaaacctccacaatgattattggtacactaatgtagctgggctcaccactgccaatgcttgataattaaatcttggttaaaattttaatttgtagaaaataaggtattacaggtaatgtatgatatctgtaagtataggtaagaaggatgtaatggttcctttttgtgagcactctcaaccatgggagatacatatggatatgaactttctataagttcttgtctaggattatgctgttagttttgcttactaag

SEQ ID NO: 30392 - DNA, 1191 bp, Macaca Mulatta
  misc_feature (1)...(1191): n = A,T,C or G
tttctatgcagattttggaccgctgaacttggcaatggtgtacagatattgctgcaaactaaacaagaaactaaannnnnnnnnnnnnnnnnnnnnnnnnnnnnnnnnnnnnnnnnnnnnnnnnnnnnnnnnnnnnnnnnnnnnnnnnnnnnnnnnnnnnnnnnnnnnnnnnnnnnnnnnnnnnnnnnnnnnnnnnnnnnnnnnnnnnnnnnnnnnnnnnnnnnnnnnnnnnnnnnnnnnnnnnnnnnnnnnnnnnnnnnnnnnnnnnnnnnnnnnnnnnnnnnnnnnnnnnnnnnnnnnnnnnnnnnnnnnnnnnnnnnnnnnnnnnnnnnnnnnnnnnnnnnnnnnnnnnnnnnnnnnnnnnnnnnnnnnnnnnnnnnnnnnnnnnnnnnnnnnnnnnnnnnnnnnnnnnnnnnnnnnnnnnnnnnnnnnnnnnnnnnnnnnnnnnnnnnnnnnnnnnnnnnnnnnnnnnnnnnnnnnnnnnnnnnnnnnnnnnnnnnnnnnnnnnnnnnnnnnnnnnnnnnnnnnnnnnnnnnnnnnnnnnnnnnnnnnnnnnnnnnnnnnnnnnnnnnnnnnnnnnnnnnnnnnnnnnnnnnnnnnnnnnnnnnnnnnnnnnnnnnnnnnnnnnnnnnnnnnnnnnnnnnnnnnnnnnnnnnnnnnnnnnnnnnnnnnnnnnnnnnnnnnnnnnnnnnnnnnnnnnnnnnnnnnnnnnnnnnnnnnnnnnnnnnnnnnnnnnnnnnnnnnnnnnnnnnnnnnnnnnnnnnnnnnnnnnnnnnnnnnnnnnnnnnnnnnnnnnnnnnnnnnnnnnnnnnnnnnnnnnnnnnnnnnnnnnnnnnnnnnnnnnnnnnnnnnnnnnnnnnnnnnnnnnnnnnnnnnnnnnnnnnnnnnnnnnnnnnnnnnnnnnnnnnnnnnnnnnnnnnnnnnnnnnnnnnnnnnnnnnnnnnnnnnnnnnnnnnnnnnnnnnnnnnnnnnnnnnnnnnnnnnnnnnnnnnnnnnnnnnnnnnnnnnnnnnnnnnnnnnnnnnnnnnnnnnnnnnnnnnnnnnnnnnnnnnnnnnnnnnnnnnnnnagattaagttcatccctgcaaggatcggcacctaccttgaagacatcaaaaatggcactgtcctcttcagcgacagccaagaggatcaacagaacttctttgtcttcaggtgccactgtaagaa

SEQ ID NO: 30393 - DNA, 191 bp, Macaca Mulatta
ggtggtactgagggcaagattgtcccttcctacgattctgctgcttttccttgaagttagttctaaggcaaaccttgaactgtccgtaacatgagaaacaagagcagatttcttttcaatggacccacaatccattaatgccaaaccataccatttcaggcaaaggtgttgcacacacatgctcttcacca

SEQ ID NO: 30394 - DNA, 153 bp, Macaca Mulatta
tgagaagcaatgaaaattatttttcaatgagattatgaatgtagtgcagatacataacaatactggctcaacaaatttgaagagtaaactaagtatccttcagtcttaactgaaataataaaccttccctttattacagatacattcctttaa

SEQ ID NO: 30395 - DNA, 519 bp, Macaca Mulatta
  misc_feature (1)...(519): n = A,T,C or G
cacgagggctctccatctggctgctgatgggactcgcagtgtatttntggctacggcatccggcacagcaaggagaaccagcgggagctgccagggccaaactccacgcactacgtggtattccccaggggcagcctggaggagacagtgcaggctgtgcagccccctagccaggcgccagcgcaggaccccggccatatggagtagctggtcagcccacacttgccctgctctcccacacctgcttgggaggccagagaggccggacaagccaggagccccttctgttgtgggcagcctgggtttgcaggcctgcgcaggctggggcgtcctcaggaccttaggactttgtccaggagctgaacttcaggtcttcaggagtgggccttggccgatactggtgccgtggactctgcccagagccttcttgtttatgatcagctccaactacctgggcaggtgtggtggggtggacgggaaggcccacagcccaagggatccataataataattgcttgg

SEQ ID NO: 30396 - DNA, 622 bp, Macaca Mulatta
cctcagacggcttctccagagagatgaaggctgacgctggcacagccgtctccttccagtgccgggagccaccggctggacgacccagcctcttccagaggctgctggagtccccggcgacagcacttggtgacatccgcagggagatgagcgaggtggcgcaggcacgggcccgggcctcaggtcccctccgcacccgccggggcagggtccggcagtgacctgggcctggggccttgctttcccgcctccctctggactcctctgacccaggaagttttgcccctctttcttctccagacagccccctccccaggtgtctgggcctcctttctcctcccctgtccagaactcagagtcagacaagaacccggagcatctgatggtagaaacaccaaggaggcaattgttgctgtgtggtatggaatgaagtttgctgtgactctcgggccagcaccccggggacaacgttcaaccctagcctgaagggaccggctcccccagctcagaagccgtctctgacttttcgtgtgtattttgaccctgatttcaatcttctacctttgggagttctgacatttggcacaaagtcccctctgcctatttggagctcagcgctaga

SEQ ID NO: 30397 - DNA, 648 bp, Macaca Mulatta
  misc_feature (1)...(648): n = A,T,C or G
tgcataacatcctggatgtcgctgcggaacacaatctgcgattgtttgtgcctagcacgatcggggcctttggacccacctctccgcggaacccaacccccgatctcgtattcagagacccaggaccatctacggggtgtccaaggtccacgcggagctcatgggagaactatgcagtccagatttttcatgatgccgcaaagcatggcaaattcgagtgcaacctggaagcccgcacaaggctgcccatgatgtacattgacgactgcctcagggccaccctggaggtcatggaggccccggccgagtccctctccatgaggacctacaatgtcagcgccatgagcttcacacctgaggagctggcccaggaggtcctcaagcacgtaccggaattccagatcacatacaacgtggatgccgttcggcaggccatanntagcggatagttggccgatgaaatttgatgacagcaatgctcggaaggactgggggtggaaacatgattttgatcttccagagttggtgactaccatgttgaacttccatggttctgaaaccagagttgcccaagccaactgaaagaatctgaaagaggagctcctgtgtcctggtccactgtcaaaggagaactgtcacgactccaag

SEQ ID NO: 30398 - DNA, 818 bp, Macaca Mulatta
gctcccagtttggttctctgctaacagtgttcacctttctctttatagtgttttcataggatcactacattatcacaaaccattaagagcttcagcttaaggtggcattatgtttttataaaaggaatcacagaatattcatttgccattataaatcagtgattcattttctgtgtttaacaggctccttcctgccatccttttccctttaaccatgtcctagtaagaaagctaaataaagggcagggacattgccagcagataacccagactaaggtgaggaagaaacacatccaagggaaatgactatggcaactgctcacagtgatcatttgggtctttcaggtggccatggtgaagtccgatttgagcacgtgcatgtgcccaaagagaacatggtcctgggccctggccgaggctttgagatcgcccaaggcagactgggccccggcaggatccatcactgcatgaggctgatcgggttctcagagagggccctggcgctcatgaaggcccgcgtgagtgcttcctcctgcgcctagcactgactcagaacccccaccttctgctttgctgtcgggcttcaattcctacctgttttctgagtacagtcccagcaggtgaagcaaggtgatgtccttgccaagaagttgcattcctgtctttgctttgcatctgctactttgctgcagtttggattcagagcaggatagaacccactctgtcgaagtgaccggaaaggccaggctccatagcagcagagggcaaggttccaaggtgtaaaggtcatgctgctagcacattattaaaaatcagtc

SEQ ID NO: 30399 - DNA, 364 bp, Macaca Mulatta
gctcaggaaaaagatccactggaaactaggccaggaagcagcagcccctcccagggccagggcacctgggagacgggaggattccagaacagcagcactgagctccccgccgcagagcctctggacagccctgacaacagcaaaatcacgggacaacacctctctccacagaaaggtcacagtggacagcctgggcagtaggatgcagccccgaaggctggtggcagtttcctgtccatgggtaggtgacggcccctggctcaggcagagggagatggttagactcttgtagggctaaaggtctaatttggaattgaatgttgtggagatcttaattaaagggcacgcttacagcttagaaatg

SEQ ID NO: 30400 - DNA, 841 bp, Macaca Mulatta
caagcagaccaacgccgtgaagaaggccagtgtggtaaggaagcgccgcctttcccgtgtctcccgcagcgacccctgcagtaaccacaggcagaggcgcctcctttctacccctgggtgctgcttgcacctggaagtcaggttcctagagcaaaaccattttgcacctgtcccaacctctctcttgccagggcccccatcagctgtccctggcagtcttccagttttcttacttttccccgaagccaccagtaaacccctctgcttctcctgcaggtgaccttacctgtgtacctgaacttcacccgtgcagacctgattttcaccgtcgactttgaaattgctacaaaggaggatcctcgcagcttctacgagcggggtgtcgcggtcttgtgcacagagtagaactaaacttttctagctgcccctttctgtaatagtgaaagttgttatttaacatttattcattattaaaatgtttggaaggtctgagcttgtgacaagaaagtggttggttcgaggttggaggaagctgaatggaatctgacggctgggagtggtggaagttgggaggataccaggaggtatttgagaaggccgaaggcagggctcctttgaggaaataaaacactaagcatgagccgactccgcctcctctttctcaccttcgtcggggcagagagccttgccttccacgcagccccgggagggcagcccacgccagccatgcccctccccacctcgcttgcatcatgagtttgctccagagcggccacagcactcatgaattaagaccttcggaccccttctcagacacagacgcagccagatgtggctctgg

SEQ ID NO: 30401 - DNA, 469 bp, Macaca Mulatta
  misc_feature (1)...(469): n = A,T,C or G
ggggctgctgccaccgccgccccgctgccgctgccttagttatgccgaagcacgtgttctctgtggacatgacctgtggaagctgtgctgaagctgtctctcgggtccttgataagcttggaggagttaagtatgacattgacctgcccaacaagaagatctgcattgaatctgagcacagcgtggacactctgcttgcaaccctgaagaaaacaggaaagactgtttcctaccttggcctcgagtagtaggcacctggtccccacagcccacaggatggaccaaagtgggcaggatgctgatcctcctcccctggcttccagacagacctgggacttggcagtcatgctgggcaatggtgttcctgtggagaccctcagttgtcctattccttcctagcttccccgcaataaaatcaagctgcttttgnnnnnnnnnnnnnnnnnnnnnnnnnnnnnnnnnnnnnnnn

SEQ ID NO: 30402 - DNA, 572 bp, Macaca Mulatta
aggggaccccgagaaggcaagtttctctctgctgtttctaagactctggtgttcaacctgtgcctggtgctgtcaccttaactctcccttttcctttccagggcagcatcacgcccacagactacgccctctccaagtgctacctcccacgtgaggacgtggttttggtcatctactgtggagcggtgggcttccttgtggtcctcacactctctcacttggggcttttagcctcaccttttctttctggtttgaacttgctcagaaagcgtaagacaagatgaagagcaggcgccattgtaagtatcaaagcccaagaaatggaactttgggcagagatcgagtagatgatgagaccaattacaggccgtctctctgcacatcacagaaattctcaatcactgacacgagtaactgcaaaataaatagttgattgtactgttctcatgctagcaaagtggacaggtactctacaacacatctgttttctcatttttatcaaatatatgtatcatcgaaggttgcatctgtacagtattaaatgctattaatgtcgtcaaaaaaaaaaaaaa

SEQ ID NO: 30403 - DNA, 355 bp, Macaca Mulatta
agcccatctacaccttcactgcctccttcactaggaaggtcattcccttctttgggctctggggccgagggtccagtttctccctgagctcctgagaaggagcagttacctaccctcctctaagtacaggactcaaatcaacccaagaaccacgtggacttgatccctggctgagttacctggacgacttggaatagaaatgactgctttagaagatgggatggggctggttggtaagggatagaggagaggacactcaatctactgatcaagccctttcttcaatgcccagtggatggccagggtacctgggtactcaggctgcttccagctctcctcaccaccatccttgcta

SEQ ID NO: 30404 - DNA, 127 bp, Macaca Mulatta
ctgattgtatctgaagatcctgagctgccatacatgcgacctcctctttcaaaagaactgtggttttcagatgacccaaatgtcacaaagacactgcgattcaaacagtggaatggaaaagagagaa

SEQ ID NO: 30405 - DNA, 126 bp, Macaca Mulatta
gagtctgattcaggatgacgtggacctccgtgacacacggaggcactgtgacaagggaaacctgcgtgtcaagccccgacagggcacagcagtcttctggtacaactacctgcctgatgggcaagg

SEQ ID NO: 30406 - DNA, 628 bp, Macaca Mulatta
gctgctattttagaatttgaataagtactcctaaagtgaccattattagggaccagaaaattttatcttggctaagtaatagaggaccattttggtttttgtacttgagaatatttttggtgaattactttgttgtagtgaggaaaaaaactagagaaatctccccttttttaaaaaaaagtggaaacactcaattgagacttgaggggaataatagacagttaaggtagatcctcaatattttggaataccaaaattgccttacaaattcccttctgtttcttacatgggatcaagtacttgaaattagtacttcagagtactggccttgttcaatttagtacttcaattagtattaaacttcactaaaaaggaaaccatactccagattgtatattggattgcattttggggtcctaggtcatacgttcttcaaaattattattattgtactattgtacttgaaattacagatgttattataattacagtcaaatatagactatcaggtcaaattaaaggggagcatggcagataaccataaagtcatttatatttgattttgaaatgtatattcgtactttattttgaatatcatccatatgtctgacatattggaatttgtaac

SEQ ID NO: 30407 - DNA, 309 bp, Macaca Mulatta
  misc_feature (1)...(309): n = A,T,C or G
agttaaagtatcagagaatcttggaacgattagaaaaggagaacaaagaattgagaaaattagtattgcagaaagatgacaaaggcattcatcatagaaagcttaagnnnnnnnnnnnnnnnnnnnnnnnnnnnnnnnnnnnnnnnnnnnnnnnnnnnnnnnnnnnnnnnnnnnnnnnnnnnnnnnnnnnnnnggttgttgtggttggagatcagagcgctgggaagactagtgtgttggaaatgattgcccaagctcgaatattcccgagaggatcgggggagatgatgacgcgttctccagttaagg

SEQ ID NO: 30408 - DNA, 636 bp, Macaca Mulatta
atggcggtgaagatgctgcaggactggtgcaggtggatgggggtcaacgctcgcagtggtctgctcatcctgggcatcccggaggactgtgatgatgccgaattccaagagtccctcgaggctgccctgtggcctatgggacactttacggtgctaggcaaagtgtttcgagaggagccaccgcggccctggtcgagctcaactgggaagtcaactatgctttggtccccagggaagtctccggcacgggaggccagtggaacgtggtctttgtgccctgttgctcaggcgagaagtttctcggtctcggtcgtgtgttccacttcccggagcaacagaggcagatggtggagagcctggccggcgcccggggcgtggggctgcgcagggtgtgctggctccgatccatcggtcaggtggtccagccctgggtggagaccgtgaggtaccagagcctgggcgtgttttccgggagggaccagccagccccaggggaggagtgctttgaggtctagctagaccacaccaccgatatgctgcatgtgtggcaggggttctcggaaagggagaggaggaggaggctgctggaaggcttgcgtgggaccgtcctgcagctcgtgcacgctctcctggcgg

SEQ ID NO: 30409 - DNA, 1219 bp, Macaca Mulatta
  misc_feature (1)...(1219): n = A,T,C or G
gcagaccccgggccaggccagggcagctcagaggaagagccagagctggtgttcgctgtgaacctgccacccgcccagctgtcgtccagcgacgaggagacccgggaggagctggctagaatagggttggtgccaccccctgaagagtttgccaacggggtcctgctggccaccccactcgctggcccgggcccctcacccaccacggtgcccagcccggcctcagggaagcccagcagtgagccaccccctgcccctgagtctgcagctgactctggggtggaggaggctgacacacgcagctctagtgacccccacctggagaccacaagcaccatctacacggtgtccagcatgtccaccttgagctcggagagcggggaactcaccgacacccacacctccttcnnnnnnnnnnnnnnnnnnnnnnnnnnnnnnnnnnnnnnnnnnnnnnnnnnnnnnnnnnnnnnnnnnnnnnnnnnnnnnnnnnnnnnnnnnnnnnnnnnnnnnnnnnnnnnnnnnnnnnnnnnnnnnnnnnnnnnnnnnnnnnnnnnnnnnnnnnnnnnnnnnnnnnnnnnnnnnnnnnnnnnnnnnnnnnnnnnnnnnnnnnnnnnnnnnnnnnnnnnnnnnnnnnnnnnnnnnnnnnnnnnnnnnnnnnnnnnnnnnnnnnnnnnnnnnnnnnnnnnnnnnnnnnnnnnnnnnnnnnnnnnnnnnnnnnnnnnnnnnnnnnnnnnnnnnnnnnnnnnnnnnnnnnnnnnnnnnnnnnnnnnnnnnnnnnnnnnnnnnnnnnnnnnnnnnnnnnnnnnnnnnnnnggctcttcagcagcctcggtgagctgagctccatttcagcgcagcgcagccccgggggcccgggcggcggggcctcctactcggtgaggcccagcggccgctaccccgtggcgcgacgcgccccgagcccggtgaagcccgcgtcgctggagcgggtggnnnnnnnnnnnnnnnnnnnnnnnnnnnnnnnnnnnccttcggcctcacgccccccaccatcctcaagtcgtccagcctctccatcccgcacgagcccaaggaggtgcgcgtcgtggtgcgcagcgtgagcgcgcgcagccgctccccctcgccgtcgccgctgccctcgcccgcgtccggcaagggccccggcgcccccggcccacgccgacccttccagcagaggccgctgcagctctggagcaag

SEQ ID NO: 30410 - DNA, 478 bp, Macaca Mulatta
cgagcacgaaggggatgagcagagccggcgggtggcgcaggtcatcatccccagcacgtatgtcctgggcgccaccaaccacgacatcgcgctgctccgcctgcagcagcccgtggtcctcactgaccatgtggtgcccctctgcctgcccgaacggatgttctccgagaggacgctggccttcgtgcgcttctcattggtcagcggctggggtcagctgctggaccgtggtgccacagccctggagctcatggccctcaacgtgccccggctgatgacccaggactgcctgcagcagtcacagaaggcagaagcctccccgaatatcacggagtacatgttctgtgccggctactcggacggcagcagggactcctgcaagggggacagtggaggcccacacgccacccgctaccggggcacgtggtacctgacaggcatcgtcagctggggccagggctgcgcagccgtgggccac

SEQ ID NO: 30411 - DNA, 763 bp, Macaca Mulatta
aacagagagggagccaggaggagttgtagatggcctgataggtaagcatgtggaatataccaaagaagatggctccaaaaggatcggcatggtcactcaccaagtggaagccaaaccctctgtgtatttgatcaagtttgatgacgatttccatatctatgtctatgatttggtgaaaaagtcctaactgttagggtaaaatttggcacatgtgtggaaataaatgtataatttgtagacatgaaaaaaaagttaccttacagtgtactgaaagcctatggaatccctgataacccaacatctttgccagcattaactgttgttttgttctaaaaaatacaaatttgtgtgtacgtgacatgctgtgtgtaagcgctttgtcttgttgaaaagatcaggtgtgtttggtagatggggcatgaaaggaaggaacagctgtcaatttcggctgtgaataaagttcagttagaatcataatcagtcatttaaaaatggcaccagacttagctggtctggtctggaaggggcaggggaaagaacaagagattagctgtctcggggagagaggaggaggtgactgcttaggaaaaggtggaaaagggccagaaagggaggggattcttgggggaggggatgacctatgaggaggaaacctccaaatgggaaaggagtgaagactaacagagggagagtgagatcttggggcttagaggaaaacagacagaataaattgagaacagaggaacataaagaagtttagaag

SEQ ID NO: 30412 - DNA, 289 bp, Macaca Mulatta
  misc_feature (1)...(289): n = A,T,C or G
tgggaaaagacttgtcttctgccagaacgtaacccaaacacacacagagaccaccatgaagccctggattcttccactcatcatgttcatctctggagttgtgatgcttctgcctgtattgggaagcctctggaccagagatccnnnnnnnnnnnnnnnnnnnaaactgagcagtgctgggtacagcctccatataagtactgtgagaaaaggtgtactaaaataaggacctgtatacgtccaaatcatacatgctgctggacctactgtggaaacatctgcttagaca

SEQ ID NO: 30413 - DNA, 1082 bp, Macaca Mulatta
ggcaactgcgttctagctaacactgttggacctgacccacactgaatgtagtctttcagtacgagacaaagttttttaaatcctgaagacaaatacaagtgttccacaagtttcccgattctcattcaagtccttactgctgtgaagaacaaataccaaccgtgcaaattgcaaaactgactacattttttggtgtcttctcttctcccctttccgtcggaataatgggttttagcgggtcctcgtctgctggcattgagctggggagctggggctgggtcaccaaacgcttctcaaaaggacccttatctctttcttgcacacatgcctccctcccacttttcccagcccccacgtgtgcaactagaagaggttgcccataaaattgttctgcccttgacaggctctcttatttattgacttttgccaaggcttgatcacaacaatcatattcacgcaatcttccccttttggtggcagaactgtagcaatagggggagaagactgaagcagcggatgaagcgctttctcagcttttggaattgcttcgacctgacatccgttgtaaccatttgccacctcttcagatgttttcatgaaaaagtaccactgagtcagtgagggccacagataatattaatgagatatgagggttgttgctgggtgtatttttccctgagttaagtgatcaagactagtggagttgtgtctaacgcaggggttaggtttcaaccatgggggatgcaacccctttgcgtttcatatgtaaggcatactggctttgtgtacccagagtagttgggttgctttgtgttaggaggatccaggtcatgtcggctacagggagatgctctctttgagaggctcctgggcattgattccatttcattctcattctggatatgtgttcgttgagtaaaggaggagagaccctcatacgctatttaaatgtcatttttttgcctatcccccattttttggtcatgtttcagttaattgtgaggaaggtgcagctcctctctgcacggagatcattttttaaagttaatataagcacagctaagggaataacatgatttacg

SEQ ID NO: 30414 - DNA, 3749 bp, Macaca Mulatta
  misc_feature (1)...(3749): n = A,T,C or G
caggtcgctgcccggccttcactgtgcccctgggttccttgcagggtgagctggagcggcagctgctgcaggccaaccccattctggaggccttcgggaacgccaagaccgtgaagaatgacaactcttcccgcttcgnnnnnnnnnnnnnnnnnnnnnnnnnnnnnnnnnnnnnnnnnnnnnnnnnnnnnnnnnnnnnnnnnnnnnnnnnnnnnnnnnnnnnnnnnnnnnnnnnnnnnnnnnnnnnnnnnnnnnnnnnnnnnnnnnnnnnnnnnnnnnnnnnnnnnnnnnnnnnnnnnnnnnnnnnnnnnnnnnnnnnnnnnnnnnnnnnnnnnnnnnnnnnnnnnnnnnnnnnnnnnnnnnnnnnnnnnnnnnnnnnnnnnnnnnnnnnnnnnnnnnnnnnnnnnnnnnnnnnnnnnnnnnnnnnnnnnnnnnnnnnnnnnnnnnnnnnnnnnnnnnnnnnnnnnnnnnnnnnnnnnnnnnnnnnnnnnnnnnnnnnnnnnnnnnnnnnnnnnnnnnnnnnnnnnnnnnnnnnnnnnnnnnnnnnnnnnnnnnnnnnnnnnnnnnnnnnnnnnnnnnnnnnnnnnnnnnnnnnnnnnnnnnnnnnnnnnnnnnnnnnnnnnnnnnnnnnnnnnnnnnnnnnnnnnnnnnnnnnnnnnnnnnnnnnnnnnnnnnnnnnnnnnnnnnnnnnnnnnnnnnnnnnnnnnnnnnnnnnnnnnnnnnnnnnnnnnnnnnnnnnnnnnnnnnnnnnnnnnnnnnnnnnnnnnnnnnnnnnnnnnnnnnnnnnnnnnnnnnnnnnnnnnnnnnnnnnnnnnnnnnnnnnnnnnnnnnnnnnnnnnnnnnnnnnnnnnnnnnnnnnnnnnnnnnnnnnnnnnnnnnnnnnnnnnnnnnnnnnnnnnnnnnnnnnnnnnnnnnnnnnnnnnnnnnnnnnnnnnnnnnnnnnnnnnnnnnnnnnnnnnnnnnnnnnnnnnnnnnnnnnnnnnnnnnnnnnnnnnnnnnnnnnnnnnnnnnnnnnnnnnnnnnnnnnnnnnnnnnnnnnnnnnnnnnnnnnnnnnnnnnnnnnnnnnnnnnnnnnnnnnnnnnnnnnnnnnnnnnnnnnnnnnnnnnnnnnnnnnnnnnnnnnnnnnnnnnnnnnnnnnnnnnnnnnnnnnnnnnnnnaggtggattacaaagctgacgagtggctgatgaagaacatggaccccctgaatgacaacatcgccacgctgctccaccagtcctctgacaagtttgtctcggagctgtggaaggatnnnnnnnnnnnnnnnnnnnnnnnnnnnnnnnnnnnnnnnnnnnnnnnnnnnnnnnnnnnnnnnnnnnnnnnnnnnnnnnnnnnnnnnnnnnnnnnnnnnnnnnnnnnnnnnnnnnnnnnnnnnnnnnnnnnnnnnnnnnnnnnnnnnnnnnnnnnnnnnnnnnnnnnnnnnnnnnnnnnnnnnnnnnnnnnnaggccggcaagctggacccgcatcttgtgctggaccagctgcgctgcaacggcgtccttgagggcatccgcatctgccgccagggcttccccaacagggtggtcttccaggagtttcggcagagnnnnnnnnnnnnnnnnnnnnnnnnnnnnnnnnnnnnnnnnnnnnnnnnnnnnnnnnnnnnnnnnnnnnnnnnnnnnnnnnnnnnnnnnnnnnnnnnnnnnnnnnnnnnnnnnnnnnnnnnnnnnnnnnnnnnnnnnnnnnnnnnnnnnnnnnnnnnnnnnnnnnnnnnnnnnnnnnnnnnnnnnnnnnnnnnnnnnnnnnnnnnnnnnnnnnnnnnnnnnnnnnnnnnnnnnnnnnnnnnnnnnnnnnnnnnnnnnnnnnnnnnnnnnnnnnnnnnnnnnnnnnnnnnnnnnnnnnnnnnnnnnnnnnnnnnnnnnnnnnnnnnnnnnnnnnnnnnnnnnnnnnnnnnnnnnnnnnnnnnnnnnnnnnnnnnnnnnnnnnnnnnnnnnnnnnnnnnnnnnnnnnnnnnnnnnnnnnnnnnnnnnnnnnnnnnnnnnnnnnnnnnnnnnnnnnnnnnnnnnnnnnnnnnnnnnnnnnnnnnnnnnnnnnnnnnnnnnnnnnnnnnnnnnnnnnnnnnnnnnnnnnnnnnnnnnnnnnnnnnnnnnnnnnnnnnnnnnnnnnnnnnnnnnnnnnnnnnnnnnnnnnnnnnnnnnnnnnnnnnnnnnnnnnnnnnnnnnnnnnnnnnnnnnnnnnnnnnnnnnnnnnnnnnnnnnnnnnnnnnnnnnnnnnnnnnnnnnnnnnnnnnnnnnnnnnnnnnnnnnnnnnnnnnnnnnnnnnnnnnnnnnnnnnnnnnnnnnnnnnnnnnnnnnnnnnnnnnnnnnnnnnnnnnnnnnnnnnnnnnnnnnnnnnnnnnnnnnnnnnnnnnnnnnnnnnnnnnnnnnnnnnnnnnnnnnnnnnnnnnnnnnnnnnnnnnnnnnnnnnnnnnnnnnnnnnnnnnnnnnnnnnnnnnnnnnnnnnnnnnnnnnnnnnnnnnnnnnnnnnnnnnnnnnnnnnnnnnnnnnnnnnnnnnnnnnnnnnnnnnnnnnnnnnnnnnnnnnnnnnnnnnnnnnnnnnnnnnnnnnnnnnnnnnnnnnnnnnnnnnnnnnnnnnnnnnnnnnnnnnnnnnnnnnnnnnnnnnnnnnnnnnnnnnnnnnnnnnnnnnnnnnnnnnnnnnnnnnnnnnnnnnnnnnnnnnnnnnnnnnnnnnnagagtggaagaggaagctgcccagaagaacatggcccttaagaagatccgggagctggaatctcagatctcggaactccaggaagacctggagtctgaacgtgcttccagaaataaagctgagaagcagaaacgggaccttggggaagagctagaggcgctgaaaacagagttggaggacacgctggataccacagctgcccagcaggagctcaggtncaggtcgaaacgtgagcaggaggtgaacatcctgaagaagaccttggaggaggaggccaagacccacgaggcccagatccaggagatgagacagaagcactcgcaggccgtggaggagctggcggagcagctggagcagacgaagcgggtgnaagccaacctcgagaaggcaaagcagaccttggagaatgagcggggggagctggccaatgaggtgaaggtgctgctgcagggcaaaggggactcggagcacaagcgcaagaaagtggaggcgcagctgcaggagctgcaggtcaagttcaacgagggagagcgcgtgcgcacggagctggccgacaaggtcaccaagctgcaggtgntgcaggtggagctggacaacgtgaccgggcttctcagccagtccgacagcaagtccagcaagctcaccaaggacttctccgcgctggagtcccagctgcaggacactcagnnnnnnnnnnnnnnnnnnnnnnnnnnnnnnnnnnnnnnnnnnnnnnnnnnnnnnnnnnnnnnnnnnnnnnnnnnnnnnnnnnnnnnnnnnnnnnnnnccaagcacaacctggagaagcagatcgccaccctccatgcccaggnnnnnnnnctgcccaggtggccgacatgaagaagaagatggaggacagtgtggggtgcctggaaaccgctgaggaggtgaagaggaagctccagaaggacctggagggcctgagccagcggcacgaggagaaggtggccgcctacgacaagctggagaagaccaagacgcgactgcagcttgagcgggtgacctgctggtggacc

SEQ ID NO: 30415 - DNA, 333 bp, Macaca Mulatta
gaagtcttcatgaaatgctatgtcatttcatgtcctgtgtcagtttatgttttggtccactttgccagtattttagtggaccctgaaatgtgtgtgatgtgacatttgtcattttcattagcaaaaaaagttgtatgatctgtgccttttttatatcttggcaggtaggaatattatatttggatgcagagttcagggaagataagttggaaacactaaatgttaaagatgtagcaaaccctgtcaaacattagtactttatagaagaatgcatgctttccatatttttttccttacataaacatcaggttaggcagtataaagaataggact

SEQ ID NO: 30416 - DNA, 691 bp, Macaca Mulatta
  misc_feature (1)...(691): n = A,T,C or G
ggggtcnnnnnnnnnnnnnnnnnnnnnnnnnnnnnnnnnnnnncagtttaacagtttctgcaatacaagcttgtgatttatgcttactctaagtggaaatcaggattgttatgaagacttaaggcccagtatttttgaatacaatactcaatctaggatgtaacagtgaagctgagtaaactataactgttaaacttaagttccagcttttctcaagttagttataggatgtacttaagcagtaagcgtatttaggtaaaagcagttgaattatgttaaatgttgccctttgccacgttacattgaacactgtttggatgcatgttgaaagacatgcttttatttttttgtaaaactcaatataggagctatgtctacaattaaaagtgaaacattttggcatgttcgttaattctagtttcatttaataacctgtaaggcacgtaagtttaagnnnnnnnnnnnnnnnnnnnnnnntaatgggaaaattttgagacgcaataccagtactttaggattttggtcttggtgtttgtatgaaattctgaggccttgatttaaatctttcattgtattgtgatttccttttaggtatattgcgctaagtgaaacttgtcaaataaatcctcccttttaaaactgaaaannnnnnnggaaaannannaaaanannnaaaacatgtcggccgccc

SEQ ID NO: 30417 - DNA, 161 bp, Macaca Mulatta
  misc_feature (1)...(161): n = A,T,C or G
ngacaacagtgaaatactccaaaatacgttcttttcatggtcagtgtcagcttgatttatgtcgacatgaggttcggtatggctgtttaagggaagatgagtgcttttatgcccatagtcttgtggaactgaaagtgtggataatgcaaaatgaaacaggt

SEQ ID NO: 30418 - DNA, 115 bp, Macaca Mulatta
agctgacttttcacacattgcagttgttagtgtttactgcccttggcattttaattatgaggctaaagctgtttttgacaccacacgtgtgtgttatggcttccttgatatgctc

SEQ ID NO: 30419 - DNA, 639 bp, Macaca Mulatta
  misc_feature (1)...(639): n = A,T,C or G
gtacgagtctgtgctgtgtgtgaagccggacgtcagcgtctaccggattccgccccgggcctccaaccgcggttacagggcatctgactggaaattagaccagccggattggactggtcgcctccgaatcacttcaaaagggaagattgcctatatcaaactcgaggataaagtttcaggggagctttttgctcaggctccagtagaacaatatcctggtattgctgtggagacagtgacagattccagccgctactttgtaatccggatccaggatggtactgggcgcagtgctttcattggcattggcttcacagatcggggagatgccttcgactttaacgtctccttgcaggatcacttcaagtgggtaaagcaggaatctgagatttccaaggaatctcaagaaatggacgctcgtcctaagttggatctgggcttcaaggaaggacaaaccatcaagttgagtatcgggaatattacaaccaagaaaggaggtgcttctaagcccaggactgcaaggggtgggggcctgagcttactcccacccccgccaggaggcanagtcactattcccccaccgtcctcctcagtcgccatcagcaatcatgtcaccccaccacccattccgaaatctaa

SEQ ID NO: 30420 - DNA, 1701 bp, Macaca Mulatta
  misc_feature (1)...(1701): n = A,T,C or G
ttatgtgggtatggaagactctgaatgtgatgactgacctnnnnnnnnnnnnnnnnnnnnnnnnnnnnnnnnnnnnnnnnnnnnnnnnnnnctgaggggcagcagctgcttggagtttgcgtccttcccgtccaccctggctgctcccagtgctacagtgcacatgggtgggcatccttccagctgactccgtggtttgaaaaactgttgttttatttaaatatccacagtggtaggcacacactgaagtcggcttttcagccagcactgaatgtatccatcaggacatgcgtcttcaggcgcctgatctttgtagtcaggctgtgggaatggtctgcagagcttcacaactgggagtttgatttgaagaagtccatgtcatatgtgtaactagtactaattataaatataaaatacacaatataaaatacgaaattcaaaaataaacagtgctaccctgtgcatgggcgccgtgcccgcctcctcgtgctgtgttttctagtgnnnnnnnnnnnnnnnnnnnnnnnnnnnnnnnnnnnnnnnnnnnnnnnnnnnnnnnnnnnnnnnnnnnnnnnnnnnnnnnnnnnnnnnnnnnnnnnnnnnnnnnnnnnnnnnnnnnnnnnnnnnnnnnnnnnnnnnnnnnnnnnnnnnnnnnnnnnnnnnnnnnnnnnnnnnnnnnnnnnnnnnnnnnnnnnnnnnnnnnnnnnnnnnnnnnnnnnnnnnnnnnnnnnnnnnnnnnnnnnnnnnnnnnnnnnnnnnnnnnnnnnnnnnnnnnnnnnnnnnnnnnnnnnnnnnnnnnnnnnnnnnnnnnnnnnnnnnnnnnnnnnnnnnnnnnnnnnnnnnnnnnnnnnnnnnnnnnnnnnnnnnnnnnnnnnnnnnnnnnnnnnnnnnnnnnnnnnnnnnnnnnnnntcccagttctgtttaggacagggcatactgtcactttgcaataggcactttgtaaaatagctcctgcccagtggctcttggttcctaacaaatctgggaccggtggtttaaggaatgaaaggtggtgggagacctagatatttaaaaaataggtgttcaataagggaatactcactgtgcattgtatctgatagcatacctaattgtgcatttctgaaagttactgattcaaaatgtaattggcacagttatctttgagtagacaagcctgggaagagaatgttgaggtgtggaggtgaccagccaagttcgtgcccctctcaggcctttgtggctgagaggtgggacagaaagatgattaaggtgatgtgtcctccccgccggcattgtccagggccactgtgtagatatttgactttgctgacagaaaagaaaccagggagtttctagagactatgcatttttagtataacattttcaccctctgatacggtttggctcttgtgtgcccatccaaatctcgtctcaaattgtaatccccatgtgtcaggggagggaccggatgggaggtgattgcatcatgggagtggtttcccccatgctgttctcatgatagagagggagttctcacaagatctgatggttttaaacatggcaggttcccctgctgtcactgtctctcctgccgccttgtgaagaaggtgcttgcttctccctctgccatgaccataagtttcctgaggcctccccagccatgtggaagtgaatcggttaaacctcttctttataaa

SEQ ID NO: 30421 - DNA, 517 bp, Macaca Mulatta
  misc_feature (1)...(517): n = A,T,C or G
gtggcggcacctgacttgctggatcctaaatctgccgctcagaactccaaaccgaggctctcgttttccacgaaacccacagtgcttgcttcccgggtggagagtgacacgaccattaatgttatgaaatggaagacagtctccacgatattcctgnnnnnnnnnnnnnnnnnnnnnnnnnnnnnnnnnnnnnnnnnnnnnnnnnnnnnnnnnnnnnnnnnnnnnnnnnnnnnnnnnnnnnnnnnnnnnnnnnnnnnnnnnnnnnnnnnnnnnnnnnnnnnnnnnnnnnnnnnnnnnnnnnnnnnnnnnnnnnnnnnnnnnnnnnnnnnnnnnnnnnnnnnnnnnnnnnnnnnnnnnnnnnnnnnnnnnnnnnnnnnnnnnnnnnnnnnnnnnnnnnnnnnnnnnnnnnnnnnnnnnnnnnnnnnnnnaggatttggaaacatctcaccacgtacagaaggcggcaaaatattctgtatcatctatgccttactgggaattcccctctttggttttc

SEQ ID NO: 30422 - DNA, 590 bp, Macaca Mulatta
  misc_feature (1)...(590): n = A,T,C or G
caccgacagcaaccaatcagatagttacaaatgaaattagaagaaacacagcctcatgggacagaaatttgagggaggggaacaaagaatactttggggggaaaaagttttcagaaagaaattgaaaattgccttgcagatatttaggtacaacggagttttctttcttttcccaaacgggaagaacgcagcacacccggcttggacccactgcaagctgcctcgtgtgacctctctggtgccagtgtgggcgagggctcagtcgctttgcccacagagtgcccccacgtggaacattctggagctggccatcccaaattcaatctgtccatagagacgaacagagtgagaccttccggcccaagcgtggcgctggggcactttggtagactgtgccaccacggtgtgtgttgtgaaacgtgaaataaaaagacnnnnnnnnnnnnnnnnnngaaacaagaccgtccgacagcaacaacaatcccacaaacaacagtcacaaaagataccgttnnnnnnnnnnnnnnnnnnnnnnnnnattttactacatggacatcatggataacaagggattctgattcattattaat

SEQ ID NO: 30423 - DNA, 370 bp, Macaca Mulatta
  misc_feature (1)...(370): n = A,T,C or G
gcatcctcatttccaacagttgtcatctatgtaatggacacatcgagaagtaccaacccagtgaccttcatgtccaacatgctctatgcctgcannnnnnnnnnnnnnnnnnnnnnnnnnnnnnnnnnnnnnnnnnnnnnnnnnnnnnnnnnnnnnnnnnnnnnnnnnnnnnnnnnnnnnnnnnnnnnnnnnnnnnnnnnnnnnnnnnnnnnnnnnnnnnnnnnnnnnnnnnnnnnnnnnnnnnnnnnnnnnnnnnnnnnnnnnnnnnnnnnnnnnnnnnnnnnnnnnnnnnnnnnnnnnnnnnnnnnnnnnnnactggattagatgaactcttcgtgcaagttaccagtgctgccgaagaatatgaaag

SEQ ID NO: 30424 - DNA, 222 bp, Macaca Mulatta
gcgagactctctggaaaacacactgacggagagcgaggcccgctacagctcccagctgtcccaggtgcagagcctgatcaccaacgtggagtcgcagctggcggagatccgctgtgacctggagcggcagaaccaggagtaccaggtgctgctggacgtgcgtgcccggctagagtgtgagatcaacacgtaccggagcctcctggagagcgaggactgcaa

SEQ ID NO: 30425 - DNA, 3109 bp, Macaca Mulatta
  misc_feature (1)...(3109): n = A,T,C or G
gagcccatgatttcctggaaaagcctgagagttttgcttttttttctcctgcagcacttaacagaaaccagttttgcaatcaattcctgctcaaaagccaccctannnnnnnnnnnntctttctccagcccagacgctcacagcctcctgcaggaccagggggcctcggagagtcaaggacagaggttcaggatcttcctctccctcgggatctgaggccacaaaggagagctccgtggagagaagnnnnnnnnnnnnnnnnnnnnnnnnnnnnnnnnnnnnnnnnnnnnnnnnnnnnnnnnnnnnnnnnnnnnnnnnnnnnnnnnnnnnnnnnnnnnnnnnnnnnnnnnnnnnnnnnnnnnnnnnnnnnnnnnnnnnnnnnnnnnnnnnnnnnnnnnnnnnnnnnnnnnnnnnnnnnnnnnnnnnnnnnnnnnnnnnnnnnnnnnnnnnnnnnnnnnnnnnnnnnnnnnnnnnnnnnnnnnnnnnnnnnnnnnnnnnnnnnnnnnnnnnnnnnnnnnnnnnnnnnnnnnnnnnnnnnnnnnnnnnnnnnnnnnnnnnnnnnnnnnnnnnnnnnnnnnnnnnnnnnnnnnnnnnnnnnnnnnnnnnnnnnnnnnnnnnnnnnnnnnnnnnnnnnnnnnnnnnnnnnnnnnnnnnnnnnnnnnnnnnnnnnnnnnnnnnnnnnnnnnnnnnnnnnnnnnnnnnnnnnnnnnnnnnnnnnnnnnnnnnnnnnnnnnnnnnnnnnnnnnnnnnnnnnnnnnnnnnnnnnnnnnnnnnnnnnnnnnnnnnnnnnnnnnnnnnnnnnnnnnnnnnnnnnnnnnnnnnnnnnnnnnnnnnnnnnnnnnnnnnnnnnnnnnnnnnnnnnnnnnnnnnnnnnnnnnnnnnnnnnnnnnnnnnnnnnnnnnnnnnnnnnnnnnnnnnnnnnnnnnnnnnnnnnnnnnnnnnnnnnnnnnnnnnnnnnnnnnnnnnnnnnnnnnnnnnnnnnnnnnnnnnnnnnnnnnnnnnnnnnnnnnnnnnnnnnnnnnnnnnnnnnnnnnnnnnnnnnnnnnnnnnnnnnnnnnnnnnnnnnnnnnnnnnnnnnnnnnnnnnnnnnnnnnnnnnnnnnnnnnnnnnnnnnnnnnnnnnnnnnnnnnnnnnnnnnnnnnnnnnnnnnnnnnnnnnnnnnnnnnnnnnnnnnnnnnnnnnnnnnnnnnnnnnnnnnnnnnnnnnnnnnnnnnnnnnnnnnnnnnnnnnnnnnnnnnnnnnnnnnnnnnnnnnnnnnnnnnnnnnnnnnnnnnnnnnnnnnnnnnnnnnnnnnnnnnnnnnnnnnnnnnnnnnnnnnnnnnnnnnnnnnnnnnnnnnnnnnnnnnnnnnnnnnnnnnnnnnnnnnnnnnnnnnnnnnnnnnnnnnnnnnnnnnnnnnnnnnnnnnnnnnnnnnnnnnnnnnnnnnnnnnnnnnnnnnnnnnnnnnnnnnnnnnnnnnnnnnnnnnnnnnnnnnnnnnnnnnnnnnnnnnnnnnnnnnnnnnnnnnnnnnnnnnnnnnnnnnnnnnnnnnnnnnnnnnnnnnnnnnnnnnnnnnnnnnnnnnnnnnnnnnnnnnnnnnnnnnnnnnnnnnnnnnnnnnnnnnnnnnnnnnnnnnnnnnnnnnnnnnnnnnnnnnnnnnnnnnnnnnnnnnnnnnnnnnnnnnnnnnnnnnnnnnnnnnnnnnnnnnnnnnnnnnnnnnnnnnnnnnnnnnnnnnnnnnnnnnnnnnnnnnnnnnnnnnnnnnnnnnnnnnnnnnnnnnnnnnnnnnnnnnnnnnnnnnnnnnnnnnnnnnnnnnnnnnnnnnnnnnnnnnnnnnnnnnnnnnnnnnnnnnnnnnnnnnnnnnnnnnnnnnnnnnnnnnnnnnnnnnnnnnnnnnnnnnnnnnnnnnnnnnnnnnnnnnnnnnnnnnnnnnnnnnnnnnnnnnnnnnnnnnnnnnnnnnnnnnnnnnnnnnnnnnnnnnnnnnnnnnnnnnnnnnnnnnnnnnnnnnnnnnnnnnnnnnnnnnnnnnnnnnnnnnnnnnnnnnnnnnnnnnnnnnnnnnnnnnnnnnnnnnnnnnnnnnnnnnnnnnnnnnnnnnnnnnnnnnnnnnnnnnnnnnnnnnnnnnnnnnnnnnnnnnnnnnnnnnnnnnnnnnnnnnnnnnnnnnnnnnnnnnnnnnnnnnnnnnnnnnnnnnnnnnnnnnnnnnnnnnnnnnnnnnnnnnnnnnnnnnnnnnnnnnnnnnnnnnnnnnnnnnnnnnnnnnnnnnnnnnnnnnnnnnnnnnnnnnnnnnnnnnnnnnnnnnnnnnnnnnnnnnnnnnnnnnnnnnnnnnnnnnnnnnnnnnnnnnnnnnnnnnnnnnnnnnnnnnnnnnnnnnntgtgttttgaaaaggaaggaaagtgggcaggagtgggtcaaagacagactttcgttctcttatttctgaggcccttcagtctcctttatacaaagaactcagcatgccaaagcaccctattntagggtatctttttctgagccctaaacactatcacactggggatgtcaactgtgaaaggaaaatatcttgggaccccagaatcaccaaggaaaactcaagcttagggaaactgcttagggcaaacccacctcccactctattcaaagttatccctctgctcactgagatagatacgtatctgattgcctcctttggaaaggctaatcagaaactcaaaagaaagcaaccatttgtgtctcacttatctgtgacccggaagctccctccccactgaaccgatgctcttcttacatatattgattcatgtcttatgtctccctaaaatgtataaaaccaagctatgccctgaccatcttggtcccatgtcttcaggacttcctgaggctgtgtcacaggtgtgtcctcaaccttggcaaaatcaactttctaaatttactgagacctgtctcagattttctgggttcacattttggaaaccatgaatggattctgagtggagatgctcccgacctttgacgaatctgtcagtgcttggttaccagcatgagctaactttatggctcaaaccaataggacaatttgctgaggtctgagaggactccctccagaaaatccctgatctcttaaaatttggt

SEQ ID NO: 30426 - DNA, 507 bp, Macaca Mulatta
gggtgtggggaacccgtctcaggtctgagttgttacccctagcgccctgggcccccacatggtgatgttgacatcactggcatggtggttgggacccagtggcagggtaccgggcctggcccgtgtatggccaggaagtagcacaggctgagtgcaggcccaccctgcttggcccagggggcttcctgaggggagacagagcaacctctggaccccagcctcaaatccaggaccctgccaggcacaggcagggcaggaccagcccacactgactacagggccgctggcaataaaagcccaggagcccatttggagggcctgtggctggctccctccctctcaggaaatgctgaccccatgggcggaagactgtggagactgctcctgggcccccagctaccagcaggagaaacagtctcaccatttccccagggcacgtggttgagtggggggaacgcccacttccctgggttagcctgccagctcttcctagctggagaggagccc

SEQ ID NO: 30427 - DNA, 338 bp, Macaca Mulatta
  misc_feature (1)...(338): n = A,T,C or G
ccaggctggagcgctatggtgtgatcttggctcactgcaacctccgcctcctgctttaagcagttttcctgcctcagcctcccaagtagctgggactataggtgtgtaccacnnnnnnnnnnnnnnnnnnnnnnnnnnnnggtagagacagggtttcaccatgttggccaggctggtcttgaacccctgacctcaagtgatccgcccgcctcagccttccaaagtgctgggattataggtgggagccattgcacctggccctgttagtgtcttccatttgttgagctcttgatagttcacaaagccccttcctaactgttacctcagaaaaattccac

SEQ ID NO: 30428 - DNA, 3102 bp, Macaca Mulatta
  misc_feature (1)...(3102): n = A,T,C or G
gcctcttgttgctgtaccacatagaattcactcaacaagtagaaatgtgagagaagaaaaaacacgctcagagataannnnnnnnnnnnnnnnnnnnnnnnnnnnnnnnnnnnnnnnnnnnnnnnnnnnnnnnnnnnnnnnnnnnnnnnnnnnnnnnnnnnnnnnnnnnnnnnnnnnnnnnnnnnnnnnnnnnnnnnnnnnnnnnnnnnnnnnnnnnnnnnnnnnnnnnnnnnnnnnnnnnnnnnnnnnnnnnnnnnnnnnnnnnnnnnnnnnnnnnnnnnnnnnnnnnnnnnnnnnnnaggacacgtggcacatttagaagatgatgaaggagatgatgatgaatctaaacannnnnnnnnnnnnnnnnnnnnnnnnnnnnnnnnnnnnnnnnnnnnnnnnnnnnnnnnnnnnnnnnnnnnnnnnnnnnnnnnnnnnnnnnnnnnnnnnnnnnnnnnnnnnnnnnnnnnnnnnnnnnnnnnnnnnnnnnnnnnnnnnnnnnnnnnnnnnnnnnnnnnnnnnnnnnnnnnnnnnnnnnnnnnnnnnnnnnnnnnnnnnnnnnnnnnnnnnnnnnnnnnnnnnnnnnnnnnnnnnnnnnnnnnnnnnnnnnnnnnnnnnnnnnnnnnnnnnnnnnnnnnnnnnnnnnnnnnnnnnnnnnnnnnnnnnnnnnnnnnnnnnnnnnnnnnnnnnnnnnnnnnnnnnnnnnnnnnnnnnnnnnnnnnnnnnnnnnnnnnnnnnnnnnnnnnnnnnnnnnnnnnnnnnnnnnnnnnnnnnnnnnnnnnnnnnnnnnnnnnnnnnnnnnnnnnnnnnnnnnnnnnnnnnnnnnnnnnnnnnnnnnnnnnnnnnnnnnnnnnnnnnnnnnnnnnnnnnnnnnnnnnnnnnnnnnnnnnnnnnnnnnnnnnnnnnnnnnnnnnnnnnnnnnnnnnnnnnnnnnnnnnnnnnnnnnnnnnnnnnnnnnnnnnnnnnnnnnnnnnnnnnnnnnnnnnnnnnnnnnnnnnnnnnnnnnnnnnnnnnnnnnnnnnnnnnnnnnnnnnnnnnnnnnnnnnnnnnnnnnnnnnnnnnnnnnnnnnnnnnnnnnnnnnnnnnnnnnnnnnnnnnnnnnnnnnnnnnnnnnnnnnnnnnnnnnnnnnnnnnnnnnnnnnnnnnnnnnnnnnnnnnnnnnnnnnnnnnnnnnnnnnnnnnnnnnnnnnnnnnnnnnnnnnnnnnnnnnnnnnnnnnnnnnnnnnnnnnnnnnnnnnnnnnnnnnnnnnnnnnnnnnnnnnnnnnnnnnnnnnnnnnnnnnnnnnnnnnnnnnnnnnnnnnnnnnnnnnnnnnnnnnnnnnnnnnnnnnnnnnnnnnnnnnnnnnnnnnnnnnnnnnnnnnnnnnnnnnnnnnnnnnnnnnnnnnnngataccccacagacaaatgtttctcatgtaacccaactggagagagannnnnnnnnnnnnnnnnnnnnnnnnnnnnnnnnnnnnnnnnnnnnnnnnnnnnnnnnnnnnnnnnnnnnnnnnnnnnnnnnnnnnnnnnnnnnnnnnnnnnnnnnnnnnnnnnnnnnnnnnnnnnnnnnnnnnnnnnnnnnnnnnnnnnnnnnnnnnnnnnnnnnnnnnnnnnnnnnnnnnnnnnnnnnnnnnnnnnnnnnnnnnnnnnnnnnnnnnnnnnnnnnnnnnnnnnnnnnnnnnnnnnnnnnnnnnnnnnnnnnnnnnnnnnnnnnnnnnnnnnnnnnnnnnnnnnnnnnnnnnnnnnnnnnnnnnnnnnnnnnnnnnnnnnnnnnnnnnnnnnnnnnnnnnnnnnnnnnnnnnnnnnnnnnnnnnnnnnnnnnnnnnnnnnnnnnnnnnnnnnnnnnnnnnnnnnnnnnnnnnnnnnnnnnnnnnnnnnnnnnnnnnnnnnnnnnnnnnnnnnnnnnnnnnnnnnnnnnnnnnnnnnnnnnnnnnnnnnnnnnnnnnnnnnnnnnnnnnnnnnnnnnnnnnnnnnnnnnnnnnnnnnnnnnnnnnnnnnnnnnnnnnnnnnnnnnnnnnnnnnnnnnnnnnnnnnnnnnnnnnnnnnnnnnnnnnnnnnnnnnnnnnnnnnnnnnnnnnnnnnnnnnnnnnnnnnnnnnnnnnnnnnnnnnnnnnnnnnnnnnnnnnnnnnnnnnnnnnnnnnnnnnnnnnnnnnnnnnnnnnnnnnnnnnnnnnnnnnnnnnnnnnnnnnnnnnnnnnnnnnnnnnnnnnnnnnnnnnnnnnnnnnnnnnnnnnnnnnnnnnnnnnnnnnnnnnnnnnnnnnnnnnnnnnnnnnnnnnnnnnnnnnnnnnnnnnnnnnnnnnnnnnnnnnnnnnnnnnnnnnnnnnnnnnnnnnnnnnnnnnnnnnnnnnnnnnnnnnnnnnnnnnnnnnnnnnnnnnnnnnnnnnnnnnnnnnnnnnnnnnnnnnnnnnnnnnnnnnnnnnnnnnnnnnnnnnnnnnnnnnnnnnnnnnnnnnnnnnnnnnnnnnnnnnnnnnnnnnnnnnnnnnnnnnnnnnnnnnnnnnnnnnnnnnnnnnnngaatcctgtaagattgcttgtctttgcttaaaaataatacctttgaacatttttgaatcacagaatagcggtaccatgatataatactgcaattgtggtctgaattacagtatgcacaaagaattaattagcattattaaagagtcctcactaaacatttcatgtaatcacactgaagaactgtaacattccagagagtgaagtggttcagatttctcttggaatttttctttggttggccttattttatgatccttttcatatttcttttgacttagagtattagtacatggccaaaataatttagttactacctcatacaaacaatataatggttactacacatcacaggaacttagttttggtttaagtcatttttgattgcttttttccaatggaatatgtatataccaggttttagcaaaatgcacacttttggctctttttggtatatgttctttatattttaatgtgagtatatacactaagaacaaactaaattgtgatttatggtcttcatttattttaattgataatggttttaaaatatgttcctgattgtacatattgtaaaataaacatgttttttaac

SEQ ID NO: 30429 - DNA, 441 bp, Macaca Mulatta
atcgccaacatggactttgtcatggcgctcatctacgttatgttgctgctgctgggtgccttcctgggggcctggcctgccttgtgtggccacttcaagcgctggcgtaagcacggggtcttcgtgctgctcaccacggccacctccattgccatatgggtggtgtggattgtcatgtatacctacggcaatgagcagcgcaacagccccacctgggatgaccccacgctggccatcgcccttgccgccaatgcctgggcctttgtcctcttctacgtcatccccgaggtctctcaggtgaccaaggccagcccagagcaaagctaccagggggacatgtaccccacccggggcgtgggctatgagaccatcctgaaagagcagaagggtcagagcatgttcgtggagaacaaggccttttccatggatgagccggctgca

SEQ ID NO: 30430 - DNA, 599 bp, Macaca Mulatta
cttgccaagactttcttagatattttcactcccatgaatttgcatgttgccaggaggtcggtctaatttccgcgataatggtaactgctggactccactctaatggttgatttttgtcctttcttctttgtcccatgtaggtgggtacctaggctgtggccatggacacaaaggccacccaggtcgtccccactggtcatgctgtgggaagtttaatgagaagtctgaatgcacgtggacaggtgggcagagcgcaccgaggagtctacttaggactgtggctctctgatgggtttgtgctcagccttttaaagctgcagtcagcaccactcgatatttccagaggacccagaccttctttcattctaaagagactgatagaattaaaaacaaagtgccttatcttgcactggagttcaggtgctcttttgttactcactggttgtacttgtggatggttgagcacaaaagaccacctctacatttctcttaaaggtaggttggcaaacgttctttttctaccacacgagactccttttcattttgtacagtatggaggtatctattccattggaactgaagggtctaggtcgtttagt

SEQ ID NO: 30431 - DNA, 904 bp, Macaca Mulatta
cccttgatctgggacctgggagggggatttctcaccccaccctggctgcacccagaccacatcctcttgttcctttcttcccagcaactcctgcagtatgaccccagccggcggatcacagccaagactgccctggcccacccgtacttctcgtcccccgagccctctccggccgcccgccagtatgtgctgcagcgattctgccgttgagaacatcaagaccacactcagatcctctcttgagcagctgctgccccagctgcctcctacccattgctgagagaggacgcatctggggagagcaaagcgctaaggaatttggcatcagcctgcagagggctgagtctgggttagtcctgcccacaggttagggagatcctgtgtgttttttgggtttgatggtgccgtttcaaaatagaggcatggatgctccatgcacgaggggtccccaggcactggaacaacacgtgccaagttgaaggcagggggcctgccagagctgggtgtacgtgtgcaagccctcgcctgccccgcctgcagggccagaccctgaggaaatggcgccccctgctggtctttttggatttaaaatgtttgggggaagagttgagttccagttaagagtcccaagttaaacaggagggaagtgagggagaggagagagggcattccccggatcccaggagagctgggctgtgactgcactaaagagtccttccttcacctgagatatgctgcttttggttcgtttctggcttgacaacaagaaataaatatgatatgttcctgagttttctggttgtactgctcacaggagacccctgggcttcccaagggggacattgacacagggctggagacagctctggcccaaactgagacagcggggaaatgggcaaggagc

SEQ ID NO: 30432 - DNA, 2380 bp, Macaca Mulatta
  misc_feature (1)...(2380): n = A,T,C or G
aggttatatatgatgctatgcaaaactgggataagaagatgnatgtgattcgtagaaaggtttcaaaaatccaacgtttccgtgcaagatccctgtggacaannnnaagcgatacggatacaaaaattattcttaccagcttgctaaaaagctgaaacgccagaaaatgaagaaaaatgaggttcacgagtcattctcctaccctgaaagttatagccccactttgccagtgtcaaggcgtgagaataattccccgagcaaccttccaaggccatcctttcgcatggaagaataccagcgagctgagccggaggaggacccgatcctcagccgcactccgagtccagtgcatccctcagatttctccgagcataattatcagccgtattatgcatctgatggtgcaatgcatggttcttcttcagggccctgccttggcaaccctggggctaacagcatctacaacacttactcgactgaccatgcttctgcagcacaaccttcannnnnnnnnnnnnnnnnnnnnnnnnnnnnnnnnnnnnnnnnnnnnnnnnnnnnnnnnnnnnnnnnnnnnnnnnnnnnnnnnnnnnnnnnnnnnnnnnnnnnnnnnnnnnnnnnnnnnnnnnnnnnnnnnnnnnnnnnnnnnnnnnnnnnnnnaaattgacgggaacgctctgctcctactcacgagcgacgtgtagctgacgcacttgggggtgaagctgggaacggctgcgaagctatgctactacattgaccgacttagacgaggaaaatgctttgaaaattgaaaaaatccttgtgcagatttagattgcgccaacttctagaggtaccaatgccttcttagtgtagaatcatttttctgcccnnnnnnnnnnnnnnnnnnnnnnnnnnnnnnnnnnnnnnnnnnnnnnnnnnnnnnnnnnnnnnnnnnnnnnnnnnnnnnnnnnnnnnnnnnnnnnnnnnnnnnnnnnnnnnnnnnnnnnnnnnnnnnnnnnnnnnnnnnnnnnnnnnnnnnnnnnnnnnnnnnnnnnnnnnnnnnnnnnnnnnnnnnnnnnnnnnnnnnnnnnnnnnnnnnnnnnnnnnnnnnnnnnnnnnnnnnnnnnnnnnnnnnnnnnnnnnnnnnnnnnnnnnnnnnnnnnnnnnnnnnnnnnnnnnnnnnnnnnnnnnnnnnnnnnnnnnnnnnnnnnnnnnnnnnnnnnnnnnnnnnnnnnnnnnnnnnnnnnnnnnnnnnnnnnnnnnnnnnnnnnnnnnnnnnnnnnnnnnnnnnnnnnnnnnnnnnnnnnnnnnnnnnnnnnnnnnnnnnnnnnnnnnnnnnnnnnnnnnnnnnnnnnnnnnnnnnnnnnnnnnnnnnnnnnnnnnnnnnnnnnnnnnnnnnnnnnnnnnnnnnnnnnnnnnnnnnnnnnnnnnnnnnnnnnnnnnnnnnnnnnnnnnnnnnnnnnnnnnnnnnnnnnnnnnnnnnnnnnnnnnnnnnnnnnnnnnnnnnnnnnnnnnnnnnnnnnnnnnnnnnnnnnnnnatattttggctaagtttggacatataactacacttacattgtttgcatctctctatgaagatacctctgtccaaacttttaaaagacataannnnnnnnnnnnnnnnnnnnnnnnnnnnnnnnnnnnnnnnnnnnnnnnnnnnnnnnnnnnnnnnnnnnnnnnnnnnnnnnnnnnnnnnnnaaatggcattttgtattgccacagaggtgggatgagccatatattagtgagatgttttattttgtaaaatgtaaatggattatttgccatcactagtacctctcaacttactttttagaggacaagaaacaatctgtagattggtttccatacagggaagttctctgtcctatgcaatgtttctaattaatttgcttaattctgagccattaatcctgctacactttgaatgatacattaattcagactaatctttggaggctttattttgtaagttagaactttcaagggaaacatgttcaacactattattttgttacaaatttataactttgttattacattgtataacaaatacaaggtttataagctatgagaattggtgctatcaccattagctattcgttataaatgtcaagaaaatgttcaccaggtgcaagaatgtaccttttctttttagaaagccagatgtactttagacatgaatgcaactatttaaagaatagcttcatctatgttattccttatatgtcaaaagattcttacttaaacttggtcttctttcaaattgtttgtatgaagatgctgtacccacttgaacagtcctcaggtgtttacataaatactatgttttacagttttcatattttaaaatattaataaaattaaatcacagtag

SEQ ID NO: 30433 - DNA, 484 bp, Macaca Mulatta
gtttgccataagcattgcgtttattttatagcaggctgcctctaaaaatcagacttcttgaataggagtactcaagttgtatactctgtgcatgtgtgtggtttttcccattgtagctgggttgtatatgatggagaaaatttcactggtaatcaatacgtgttggaggaaggccattatccttgtctgtctgcaatgggatgcccgcctggagcaactttcaagtctcttcgttttatagatgttgtaagtatatcattgtgaatagtgttgcagaaatgtatgcctcacatagctgatggtcagagtgaggtaaccagcaggtagaacctgctcttaaagtaagttaagggcttggaggtggaactgtccatttgcctctgtgtacatctagtttattgattctaactggcacatattttccaccaccctgttttactcacttaatcctcatatgcatatccctacggacctgtgtgggagt

SEQ ID NO: 30434 - DNA, 182 bp, Macaca Mulatta
  misc_feature (1)...(182): n = A,T,C or G
aggcacttaacgatgccaaacgggagcttcgctttcttttggtttatcttcatggagatgatcaccaggactctgatgagttttgtcgngcaacacactctgtgcacctgaagttatttcactaataaacacaaggatgctcttctgggcatgctctacaaacaaacctgagggatacaggg

SEQ ID NO: 30435 - DNA, 946 bp, Macaca Mulatta
  misc_feature (1)...(946): n = A,T,C or G
ttacggcagtcccagtcttactgcacagacacagagtgtcttcaggaatnnnnnnnnnnnnnnnngataatggcatcagtgttactatgatcttagtggcctttatggttattgcattgatcttgttcttactgagacctccgaatctaagaggatccaacctacctggaaagtcaaccagtcctcataatgnnnnnnnnnnnnnnnnnnnnnnnnnnnnnnnnnnnnnnnnnnnnnnnnnnnnnnnnnnnnnnnnnnnnnnnnnnnnnnnnnnnnnnnnnnnnnnnnnnnnnnnnnnnnnnnnnnnnnnnnnnnnnnnnnnnnnnnnnnnnnnnnnnnnnnnnnnnnnnnnnnnnnnnnnnnnnnnnnnnnnnnnnnnnnnnnnnnnnnnnnnnnnnnnnnnnnnnnnnnnnnnnnnnnnnnnnnnnnnnnnnnnnnnnnnnnnnnnnnnnnnnnnnnnnnnnnnnnnnnnnnnnnnnnnnnnnnnnnnnnnnnnnnnnnnnnnnnnnnnnnnnnnnnnnnnnnnnnnnnnnnnnnnnnnnnnnnnnnnnnnnnnnnnnnnnnnnnnnnnnnnnnnnnnnnnnnnnnnnnnnnnnnnnnnnnnnnnnnnnnnnnnnnnnnnnnnnnnnnnnnnnnnnnngttatttgaggttgtctgggatcgtatgaaagaaaattagaaccacactgtacttatatttaccttgatagtttatttgtgggtggcagttttctctagttttagggagtgtggcagctcttggaatatttcacaaattagagctgaaatctgtatcatccattacggctggtttatgtggctagactaggaggagagaagcaattaaatgattatttgctaattatttgactcccataaaaatgtctaaggttaagaaaactttcaataaacacagttgatcaagatggtagatgatttacagta

SEQ ID NO: 30436 - DNA, 317 bp, Macaca Mulatta
cttgaaaaatgttttgttgtcgttgctttgtttgtattgctcattattctatttgtctcttcttaacattgttgaatacatttggttttgagtgtcagacttcaactctgaacatacaagttgtatttaacaagactcaaagtgcagtggttgttagtatgtaatgtctttccttttaaaaaaagttttccaattgatttgctaccattgtttgttggtgacagtacttaagaccctgagtaacgccagtttcccaaagaatgtaaaatgttttcatctaaactgttgatatatttaaaaaagttcttaacacagca

SEQ ID NO: 30437 - DNA, 326 bp, Macaca Mulatta
  misc_feature (1)...(326): n = A,T,C or G
tagtaaaaggagatgcagaagaaattgcagaccactggtnnnnnnnnnnnnnnnnnnnnnnnnnnnnnnnnnnnnnnnnnnnnnnnnnnnnnnnnnnnnnnnnnnnnnnnnnnnnnnnnnnnnnnnnnnnnnnnnnnnnnnnnnnnnnnnnnnnnnnnnnnnnnnnnnnnnnnnnnnnnnnnnnnnnnnnnnnnnnnnnnnnnnnnnnnnnnnnnnnnnnnnnnnnnnnnnnnnnnnnnnnnnnnnnnnnnnnnnnnnnnggattactcaactggctgcagagtcgcatcaacatacccatcgggccctacagtgccctgaggtag

SEQ ID NO: 30438 - DNA, 1761 bp, Macaca Mulatta
  misc_feature (1)...(1761): n = A,T,C or G
ggaaatctacaaagatgcaaatactcaagttcacacattaagaaaaatggtcaaagaaaaagaagaagcaattcaaagacagttctannccctggaaaaaaagattcatgaactggagaaacaagggaccattaaaattcagaagaaaggggatggggatatcgccatactgccagtcgtggcttctggcacgttgtccatggggtcagaagtggtagcaggtaactctgtgggacccacaacgggggccgcttcctcgggacccttgccccctcctccaccaccactgcatctctcatcagacannnnnnnnnnnnnnnnnnnnnnnnnnnnnnnnnnnnnnnnnnnnnnnnnnnnnnnnnnnnnnnnnnnnnnnnnnnnnnnnnnnnnnnnnnnnnnnnnnnnnnnnnnnnnnnnnnnnnnnnnnnnnnnnnnnnnnnnnnnnnnnnnnnnnnnnnnnnnnnnnnnnnnnnnnnnnnnnnnnnnnnnnnnnnnnnnnnnnnnnnnnnnnnnnnnnnnnnnnnnnnnnnnnnnnnnnnnnnnnnnnnnnnnnnnnnnnnnnnnnnnnnnnnnnnnnnnnnnnnnnnnnnnnnnnnnnnnnnnnnnnnnnnnnnnnnnnnnnnnnnnnnnnnnnnnnnnnnnnnnnnnnnnnnnnnnnnnnnnnnnnnnnnnnnnnnnnnnnnnnnnnnnnnnnnnnnnnnnnnnnnnnnnnnnnnnnnnnnnnnnnnnnnnnnnnnnnnnnnnnnnnnnnnnnnnnnnnnnnnnnnnnnnnnnnnnnnnnnnnnnnnnnnnnnnnnnnnnnnnnnnnnnnnnnnnnnnnnnnnnnnnnnnnnnnnnnnnnnnnnnnnnnnnnnnnnnnnnnnnnnnnnnnnnnnnnnnnnnnnnnnnnnnnnnnnnnnnnnnnnnnnnnnnnnnnnnnnnnnnnnnnnnnnnnnnnnnnnnnnnnnnnnnnnnnnnnnnnnnnnnnnnnnnnnnnnnnnnnnnnnnnnnnnnnnnnnnnnnnnnnnnnnnnnnnnnnnnnnnnnnnnnnnnnnnnnnnnnnnnnnnnnnnnnnnnnnnnnnnnnnnnnnnnnnnnnnnnnnnnnnnnnnnnnnnnnnnnnnnnnnnnnnnnnnnnnnnnnnnnnnnnnnnnnnnnnnnnnnnnnnnnnnnnnnnnnnnnnnnnnnnnnnnnnnnnnnnnnnnnnnnnnnnnnnnnnnnnnnnnnnnnnnnnnnnnnnnnnnnnnnnnnnnnnnnnnnnnnnnnnnnnnnnnnnnnnnnnnnnnnnnnnnnnnnnnnnnnnnnnnnnnnnnnnnnnnnnnnnnnnnnnnnnnnnnnnnnnnnnnnnnnnnnnnnnnnnnnnnnnnnnnnnnnnnnnnnnnnnnnnnnnnnnnnnnnnnnnnnnnnnnnnnnnnnnnnnnnnnnnnnnnnnnnnnnnnnnnnnnnnnnnnnnnnnnnnnnnnnnnnnnnnnnnnnnnnnnnnnnnnnnnnnnnnnnnnnnnnnnnnnnnnnnnnnnnnnnnnnnnnnnnnnnnnnnnnnnnnnnnnnnnnnnnnnnnnnnnnnnnnnnnnnnnnnnnnnnnnnnnnnnnnnnnnnnnnnnnnnnnnnnnnnnnnnnnnnnnnnnnnnnnnnnnnnnnnnnnnnnnnnnnnnnnnnnnnnnnnnnnnnnnnnnnnnnnnnnnnagcaagcagaagaggaaaacgagcttaggaaaaagcaggaacaagctctcatggaaaaactcctggagcaagaagctctgatggagcagcaggatccaaa

SEQ ID NO: 30439 - DNA, 429 bp, Macaca Mulatta
tgcctgaacctgctaagtctgctcctgccccaaagaagggctccaaaaaggcggtgaccaaggcgcagaagaaggatggcaagaagcgcaagcgtagtcgcaaggagagttattccgtttacgtgtacaaggtgctaaagcaggtccaccctgacactggcatctcatcgaaagccatgggtatcatgaactccttcgtcaacgatatcttcgagcgcattgctggggaggcttcccgcctggcgcattacaacaagcgctccaccatcacctccagggagatccagactgccgtgcgcctgctgctgcccggggaactggccaagcatgccgtgtccgagggcaccaaggctgtcaccaagtacaccagctctaagtaattctaacgtcttcatacccaatcccaaaggctcttttaagagccaccca

SEQ ID NO: 30440 - DNA, 1688 bp, Macaca Mulatta
  misc_feature (1)...(1688): n = A,T,C or G
aggttacagaccaccctggaaaagaagagttctgttctcctccctatgctcattacgaagtccctccaactttctatcggtcagccatgctccttaagccccagctaggattgggtgcaatgtcccgtttaccgtctgcaaagagcaggattctgattgcaagtcagaggtcttcagcgagcgccatccacccaccaggacccataacaacagccgccagtctctacagttccgatccttcannnnnnnnnnnnnnnnnnnnnnnnnnnnnnnnnnnnnnnnnnnnnnnnnnnnnnnnnnnnnnnnnnnnnnnnnnnnnnnnnnnnnnnnnnnnnnnnnnnnnnnnnnnnnnnnnnnnnnnnnnnnnnnnnnnnnnnnnnnnnnnnnnnnnnnnnnnnnnnnnnnnnnnnnnnnnnnnnnnnnnnnnnnnnnnnnnnnnnnnnnnnnnnnnnnnnnnnnnnnnnnnnnnnnnnnnnnnnnnnnnnnnnnnnnnnnnnnnnnnnnnnnnnnnnnnnnnnnnnnnnnnnnnnnnnnnnnnnnnnnnnnnnnnnnnnnnnnnnnnnnnnnnnnnnnnnnnnnnnnnnnnnnnnnnnnnnnnnnnnnnnnnnnnnnnnnnnnnnnnnnnnnnnnnnnnnnnnnnnnnnnnnnnnnnnnnnnnnnnnnnnnnnnnnnnnnnnnnnnnnnnnnnnnnnnnnnnnnnnnnnnnnnnnnnnnnnnnnnnnnnnnnnnnnnnnnnnnnnnnnnnnnnnnnnnnnnnnnnnnnnnnnnnnnnnnnnnnnnnnnnnnnnnnnnnnnnnnnnnnnnnnnnnnnnnnnnnnnnnnnnnnnnnnnnnnnnnnnnnnnnnnnnnnnnnnnnnnnnnnnnnnnnnnnnnnnnnnnnnnnnnnnnnnnnnnnnnnnnnnnnnnnnnnnnnnnnnnnnnnnnnnnnnnnnnnnnnnnnnnnnnnnnnnnnnnnnnnnnnnnnnnnnnnnnnnnnnnnnnnnnnnnnnnnnnnnnnnnnnnnnnnnnnnnnnnnnnnnnnnnnnnnnnnnnnnnnnnnnnnnnnnnnnnnnnnnnnnnnnnnnnnnnnnnnnnnnnnnnnnnnnnnnnnnnnnnnnnnnnnnnnnnnnnnnnnnnnnnnnnnnnnnnnnnnnnnnnnnnnnnnnnnnnnnnnnnnnnnnnnnnnnnnnnnnnnnnnnnnnnnnnnnnnnnnnnnnnnnnnnnnnnnnnnnnnnnnnnnnnnnnnnnnnnnnnnnnnnnnnnnnnnnnnnnnnnnnnnnnnnnnnnnnnnnnnnnnnnnnnnnnnnnnnnnnnnnnnnnnnnnnnnnnnnnnnnnnnnnnnnnnnnnnnnnnnnnnnnnnnnnnnnnnnnnnnnnnnnnnnnnnnnnnnnnnnnnnnnnnnnnnnnnnnnnnnnnnnnnnnnnnnnnnnnnnnnnnnnnnnnnnnnnnnnnnnnnnnnnnnnnnnnnnnnnnnnnnnnnnnnnnnnnnnnnnnnnnnnnnnnnnnnnnnnnnnnnnnnnnnnnnnnnnnnnnnnnnnnnnnnnnnnnnnnnnnnnnnnnnnnnnnnnnnnnnnnnnnnnnnnnnnnnnnnnnnnnnnnnnnnnnnnnnnnggcagaaaagaacattatcctagaagaaaagatccaggttctccaacagcagaacgaagacctcagagcaaggattgaccaaaacacagttgtcacca

SEQ ID NO: 30441 - DNA, 105 bp, Macaca Mulatta
aggtacatgtggggcccgtgcggggcacaagtgtgggctggctcaaactgagaagtgccaatccccaggaccaccctgtgatccagcccaactacttgtcaacag

SEQ ID NO: 30442 - DNA, 377 bp, Macaca Mulatta
cccactcccacctgcgttacaaggggactctgtccatgttacaatgcaatgtcttcccggggcttccacctgacttcctggactctgaggtcaacttattcctggtacccttcatggacagtgaagcagagagtgaaaacccaccatgagcagggcctagttccagcccactcttctccctgctgcctgggtatcgcggccaccccagtttccagtccttggtaagcaagctccggagccaagtgatgtccatggcccggccacagctgtcacacacaatcctcaccgagaagaactggttccactacgctgcccggatctgggatggggtgaaaaagtcctctgctttggcagagtacagccgtctgctggcctga

SEQ ID NO: 30443 - DNA, 391 bp, Macaca Mulatta
acttattctggttgttgctaataatgttaacctgctatttatattccagtgcccttcgcatggcgaagcaggggggaaaagttatttttttcttaaagtacaaagagacgggggaacttttgtagaggactttttaaaagctattttccattcttcggaaagtgttttggttttccttggacctcgaagaagctatagagttcaatgttattttacagttattgtaaatatagagaacaaatggaatgactaatcattgtaaattaagagtatctgctatttattctttataatatcccgtgtagtaaatgagaaagaagtgcagagcaggattaaagaaaaccactaaaaccgactgggctccacactgattttctgtgttggtgattga

SEQ ID NO: 30444 - DNA, 681 bp, Macaca Mulatta
cggagctccggcccttcccctgcacccagtgtggcaagagcttctctgaccgggctgggctgcggaaacacagccgcactcacagctcagtgcgcccctacacctgcccccattgtcccaaggccttcttgagtgccagcgacctgcgcaagcatgaacgtacccaccctgtgcccatggggacccccacacccctggagcccctggcggctttgctaggaatacctgaagaggggccggcctgaaacccatgacccccagcaccacactctgggagcccagcccccattgggggcttcctgtacctccttttgcctggctctgctctttagactccagatccctacccctcagcaactagctaacctgtcgcccagctaagagagctgggacaatggaggctggcagcggctgagacatgactgtctaggagtaacactcattaaagctttcattttggcaccaggtcgtcttctgtgttctggttaggagtgaatgggtgggagtttgggcatcagataaggttcagcggagacccctggatccacagatttgaaactagaagggtctttggacacagtttcccaaagtatgtttcaggatgtctagtgacaacaggttccatgggcagtaagaaaggaaattctctgtgcccttcttgggattcttagtgatcaaaag

SEQ ID NO: 30445 - DNA, 402 bp, Macaca Mulatta
tccatattgtaactgttcttttttctttcttcctataggaggatctccttatatagcagccaaaatcaatgaagctaaagatttactagaaggtcaagctaaaaaatgaagtaaatgtatgatgaattttaagttcatattagtttatgtatatgagtactaagtttttataataaaatgcctcagagctacaattttaaaaaatgatttagcacaagctaaatctcaaagccttggtatatttttcttgtttaaatttggggatttaaaatcagattagtttagaatatttgcatattaattatgggcaagcacacaccatctgaatagaaatattgttcattactcatttagcagatgatttgggacctatgtctacttttcaaagcaaagtgaagatga

SEQ ID NO: 30446 - DNA, 3487 bp, Macaca Mulatta
  misc_feature (1)...(3487): n = A,T,C or G
tgcgcaagctcaagttggaccagtgctttcagctgcgtttctttgagcaggatgctgagaagnnnnnnnnnnnnnnnnnnnnnnnnnnnnnnnnnnnnnnnnnnnnnnnnnnnnnnnnnnnnnnnnnnnnnnnnnnnnnnnnnnnnnnnnnnnnnnnnnnnnnnnnnnnnnnnnnnnnnnnnnnnnnnnnnnnnnnnnnnnnnnnnnnnnnnnnnnnnnnnnnnnnnnnnnnnnnnnnnnnnnnnnnnnnnnnnnnnnnnnnnnnnnnnnnnnnnnnnnnnnnnnnnnnnnnnnnnnnnnnnnnnnnnnnnnnnnnnnnnnnnnnnnnnnnnnnnnnnnnnnnnnnnnnnnnnnnnnnnnnnnnnnnnnnnnnnnnnnnnnnnnnnnnnnnnnnnnnnnnnnnnnnnnnnnnnnnnnnnnnnnnnnnnnnnnnnnnnnnnnnnnnnnnnnnnnnnnnnnnnnnnnnnnnnnnnnnnnnnnnnnnnnnnnnnnnnnnnnnnnnnnnnnnnnnnnnnnnnnnnnnnnnnnnnnnnnnnnnnnnnnnnnnnnnnnnnnnnnnnnnnnnnnnnnnnnnnnnnnnnnnnnnnnnnnnnnnnnnnnnnnnnnnnnnnnnnnnnnnnnnnnnnnnnnnnnnnnnnnnnnnnnnnnnnnnnnnnnnnnnnnnnnnnnnnnnnnnnnnnnnnnnnnnnnnnnnnnnnnnnnnnnnnnnnnnnnnnnnnnnnnnnnnnnnnnnnnnnnnnnnnnnnnnnnnnnnnnnnnnnnnnnnnnnnnnnnnnnnnnnnnnnnnnnnnnnnnnnnnnnnnnnnnnnnnnnnnnnnnnnnnnnnnnnnnnnnnnnnnnnnnnnnnnnnnnnnnnnnnnnnnnnnnnnnnnnnnnnnnnnnnnnnnnnnnnnnnnnnnnnnnnnnnnnnnnnnnnnnnnnnnnnnnnnnnnnnnnnnnnnnnnnnnnnnnnnnnnnnnnnnnnnnnnnnnnnnnnnnnnnnnnnnnnnnnnnnnnnnnnnnnnnnnnnnnnnnnnnnnnnnnnnnnnnnnnnnnnnnnnnnnnnnnnnnnnnagttgtggacatggatggaagaccttcagaaggagatgttggaggatgtctgtgcagactctgtggatgcagtccaggaactgatcaagcagttccagcagcagcagaccgccactctagatgccacgctcaatgtcatcaaggaaggcgaagaccttatccagcagctcaggtcagcgcctccctccctgggggagcccagcgaggccagnnnnnnnnnnnnnnnnnnnnnnnnnnnnnnnnnnnnnnnnnnnnnnnnnnnnnnnnnnnnnnnnnnnnnnnnnnnnnnnnnnnnnnnnnnnnnnnnnnnnnnnnnnnnnnnnnnnnnnnnnnnnnnnnnnnnnnnnnnnnnnnnnnnnnnnnnnnnnnnnnnnnnnnnnnnnnnnnnnnnnnnnnnnnnnnnnnnnnnnnnnnnnnnnnnnnnnnnnnnnnnnnnnnnnnnnnnnnnnnnnnnnnnnnnnnnnnnnnnnnnnnnnnnnnnnnnnnnnnnnnnnnnnnnnnnnnnnnnnnnnnnnnnnnnnnnnnnnnnnnnnnnnnnnnnnnnnnnnnnnnnnnnnnnnnnnnnnnnnnnnnnnnnnnnnnnnnnnnnnnnnnnnnnnnnnnnnnnnnnnnnnnnnnnnnnnnnnnnnnnnnnnnnnnnnnnnnnnnnnnnnnnnnnnnnnnnnnnnnnnnnnnnnnnnnnnnnnnnnnnnnnnnnnnnnnnnnnnnnnnnnnnnnnnnnnnnnnnnnnnnnnnnnnnnnnnnnnnnnnnnnnnnnnnnnnnnnnnnnnnnnnnnnnnnnnnnnnnnnnnnnnnnnnnnnnnnnnnnnnnnnnnnnnnnnnnnnnnnnnnnnnnnnnnnnnnnnnnnnnnnnnnnnnnnnnnnnnnnnnnnnnnnnnnnnnnnnnnnnnnnnnnnnnnnnnnnnnnnnnnnnnnnnnnnnnnnnnnnnnnnnnnnnnnnnnnnnnnnnnnnnnnnnnnnnnnnnnnnnnnnnnnnnnnnnnnnnnnnnnnnnnnnnnnnnnnnnnnnnnnnnnnnnnnnnnnnnnnnnnnnnnnnnnnnnnnnnnnnnnnnnnnnnnnnnnnnnnnnnnnnnnnnnnnnnnnnnnnnnnnnnnnnnnnnnnnnnnnnnnnnnnnnnnnnnnnnnnnnnnnnnnnnnnnnnnnnnnnnnnnnnnnnnnnnnnnnnnnnnnnnnnnnnnnnnnnnnnnnnnnnnnnnnnnnnnnnnnnnnnnnnnnnnnnnnnnnnnnnnnnnnnnnnnnnnnnnnnnnnnnnnnnnnnnnnnnnnnnnnnnnnnnnnnnnnnnnnnnnnnnnnnnnnnnnnnnnnnnnnnnnnnnnnnnnnnnnnnnnnnnnnnnnnnnnnnnnnnnnnnnnnnnnnnnnnnnnnnnnnnnnnnnnnnnnnnnnnnnnnnnnnnnnnnnnnnnnnnnnnnnnnnnnnnnnnnnnnnnnnnnnnnnnnnnnnnnnnnnnnnnnnnnnnnnnnnnnnnnnnnnnnnnnnnnnnnnnnnnnnnnnnnnnnnnnnnnnnnnnnnnnnnnnnnnnnnnnnnngagaccacccaggagactcaggaactgctgaaagaatttccggaattcagggtgcctgccaagnnnnnnnnnnnnnnnnnnnnnnnnnnnnnnnnnnnnnnnnnnnnnnnnnnnnnnnnnnnnnnnnnnnnnnnnnnnnnnnnnnnnnnnnnnnnnnnnnnnnnnnnnnnnnnnnnnnnnnnnnnnnnnnnnnnnnnnnnnnnnnnnnnnnnnnnnnnnnnnnnnnnnnnnnnnnnnnnnnnnnnnnnnnnnnnnnnnnnnnnnnnnnnnnnnnnnnnnnnnnnnnnnnnnnnnnnnnnnnnnnnnnnnnnnnnnnnnnnnnnnnnnnnnnnnnnnnnnnnnnnnnnnnnnnnnnnnnnnnnnnnnnnnnnnnnnnnnnnnnnnnnnnnnnnnnnnnnnnnnnnnnnnnnnnnnnnnnnnnnnnnnnnnnnnnnnnnnnnnnnnnnnnnnnnnnnnnnnnnnnnnnnnnnnnnnnnnnnnnnnnnnnnnnnnnnnnnnnnnnnnnnnnnnnnnnnnnnnnnnnnnnnnnnnnnnnnnnnnnnnnnnnnnnnnnnnnnnnnnnnnnnnnnnnnnnnnnnnnnnnnnnnnnnnnnnnnnnnnnnnnnnnnnnnnnnnnnnnnnnnnnnnnnnnnnnnnnnnnnnnnnnnnnnnnnnnnnnnnnnnnnnnnnnnnnnnnnnnnnnnnnnnnnnnnnnnnnnnnnnnnnnnnnnnnnnnnnnnnnnnnnnnnnnnnnnnnnnnnnnnnnnnnnnnnnnnnnnnnnnnnnnnnnnnnnnnnnnnnnnnnnnnnnnnnnggaacttttgacttgctgtgaagaagggaaaggggagctcaaggatggcctggaagtgatgctcagtgtcccaaagaaagccaatgatgccatgcatgtcagcatgctggaagg

SEQ ID NO: 30447 - DNA, 134 bp, Macaca Mulatta
gcagtccagatagctgactcagtctggagaggaaccagggaaggcaccctgagacgtggtctcagtggagtaggtggtccaccagcctgtgttggagaatcagactccttaagtcaaggtcttcccagacgtct

SEQ ID NO: 30448 - DNA, 218 bp, Macaca Mulatta
aggtgtgtgagtgccacctggttgcttatggcttcatgtttttatattaagaaatttgaaatgcgaaccttaaatttacatttacaggaaatgtgacataactcatacatcagcactgaattaaacaaaacaaaataccactgttgctatatcttttctagtaataattatgaccttatcatttaacttggagtaagtcaagaatgcagaagagtaac

SEQ ID NO: 30449 - DNA, 478 bp, Macaca Mulatta
aaagagactttctctttcatacttcttgaatctcatcaatgaattccagtgaaacagcgccgtttcttagtatcattaaataactagaaagtagcaagtattgctctctgctgctttatatcattaacatattaataataccaagaaggaaatatttgaataagtatcagattctgatccagtatctgatactggacacctgtgaggctgggataattacttttgaactacatctctactctagtttctggaccttgctctgtccctttaacacagggtgatcaaacctgaatgaggatcagaactcagccaggcacttactaaagcaagattcctaaacctctgttccaggggtaattctgacatcaccagtccaggcatagtcagctgaaattataaatctaagatacagctacatcaagatacagctgtgtcatttaattctgaaactcccagtatactacccttcttcatcact

SEQ ID NO: 30450 - DNA, 486 bp, Macaca Mulatta
  misc_feature (1)...(486): n = A,T,C or G
ccaagctgtttggcaactcttcgaaattccagagcaatctaagagcaccaaacaaaattcgctatgtttacagtgatactattaagaaaatgaatgtgattctgctctgtctttttaaatatgatcaaataaaaaaatgtatgcatcacatcatttctnnnnnnnnnnnnnnnnnnnnnnnnnnnnnnnnnnnnnnnnnnnnnnnnnnnnnnnnnnnnnnnnnnnnnnnnnnnnnnnnnnnnnnnnnnnnnnnnnnnnnnnnnnnnnnnnnnnnnnnnnnnnnnnnnnnnnnnnnnnnnnnnnnnnnnnnnnnnnnnnnnnnnnnnnnnnnnnnnnnnnnnnnnnnnnnnnnnnnnnnnnnnnnnnnnnnnnnnnnnnnnnnnnnnnnnnnnnnnnnnnnnnnnnnnnnnnnnnnnnnnnnnnnnnnnnnnnnnnnnnnnnnnnnnnnnnnnnnnnnnnnnnnnnnnnnnnnnnnnnnnnnnnnnn

SEQ ID NO: 30451 - DNA, 4856 bp, Macaca Mulatta
  misc_feature (1)...(4856): n = A,T,C or G
ggttgtcggacaagtaaccgcaagagcttgattgtgacctcnnnnnnnnnnnnnnnnnnnnnnnnnnnnnnnnnnnnnnnnnnnnnnnnacaggtaacagtccttgggacagcccccggaatttctctccaaatgcacctgctcacttttcctttgttcctgcccgtannnnnnnnnnnnnnnnnacaggactgatgggcggcgctggtctttggcctctttgccctcttcaggatatggaactaacactcctagctccactgtctcantcatcatgctcctcacaggaaaagctgcatcagttgcctttccagcctacagctgatgagctgcactttttaacgaagcatttcagcacagagagcgtaccagatgaggagggacggcagtccccagccatgcggccccgctcccggagcctcagnnnnnnnnnnnnnnnnnnnnnnnnnnnnnngaaataataatgatgaatcatgtgtacaaagacatattcccaaaggnaggccaccgcacaaatggaagaacgactagcagagtttatttcctccaataccccagacagcgtgctgcccttggcggatggagccctgagctttattcatcatcaggtgattgagatggcccgagactgcctggataaatctcggagtggcctcattacatcacaatacttctatgaacttcaagagaatttggagaaacttgtacaagatgtgannnnnnnnnnnnnnnnnnnnnnnnnnnnnnnnnnnnnnnnnnnnnnnnnnnnnnnnnnnnnnnnnnnnnnnnnnnnnnnnnnnnnnnnnnnnnnnnnnnnnnnnnnnnnnnnnnnnnnnnnnnnnnnnagaaatggcccagttgagcagctgtgacagtcctgacactccagagacagatgattctattgagngggccgtggggcatctctgccatctaaaaagacaccctctgaagaggacttcgagaccattaagctcatcagcaatggcgcctatgggngggctgtattcctggtgcggcacaagtccacccggcagcgctttgccatgaagaagatcaacaagcagaacctgatcctacggaaccagatccagcaggccttcgtggagcgtgacatactgactttcgctgagaacccctttgtggtcagcatgttctgctcctttgagaccaagcgccacttgtgcatggtgatggagtatgttgaaggngttgcagggggagactgtgccactctgctgaagaatattggggccctgcctgtggacatggtgcgtctatactttgcggaaactgtgctggccctgtagtacttacacaactatggcatcgtgcaccgtgacctcaagcctgacaancctcctaattacatcaatggggcacatcaagctcacggactttggactgtccaaaattggtctcatgagtctgacaacgaacttgtatgagggtcacattgaaaaggatgcccgggaattcctggacaagcaggtancaggtatgcgggaccccagaatacattgcgcctgaggtgatccctgcgccagggctatgggaagccggtggactggtgggccatgggcattatcctgtatgagttcctggtgggctgcgtccctttttttggagacactccggaggagctctttggccaagtgatcagtgnnnnnnnnnnnnnnnnnnnnnnnnnnnnnnnnnnnnnnnnnnnnnnnnnnnnnnnnnnnnnnnnnnnnnnnnnnnnnnnnnnnnnnnnnnnnnnnnnacaggcagtgcctatgaggtaaagcagcacccattctttactggtctggactggacaggacttctccgccagaaagctgaatttattcctcagctggagtcagaggacgatactagctattttgacannnnnnnnnnnnnnnnnnnnnnnnnnnnnnnnnnnnnnnnnnnnnnnnnnnnnnnnnnnnnnnnnnnnnnnnnnnnnnnnnnnnnnnnnnnnnnnnnnnnnnnnnnnnnggtgtacagcagcatggagcggctctcactgctcgaggagcgccggacaccaccccccaccaagcgcagcctgagtgaggagaaggaggaccgctcagatggcctggcagggctcaaaggccgagaccggagctgggtgattggctcccctgagatnattacggaagcggctgtcggtgtctgagtcgtcccacacagagagtgactccagccctcccatgacagtgcgacgccgctgctcaggcctcctggatgcgcctcggttccccgagggccctgaggaggccagcagcgccctcaggaggcaaccgcaggaggggatatgggtcctgactcccccctctggagagggggcctctgggcctgttgctgaacgctcaggggagcagcggccaaagctggatgaggaagctgttggccggagcagtggttccagtccaggtatggncagctatggagaccagaggccgtgggaccccgcagctggctgagggagccacagccaaggccatcagtgacctggctgtgcgtagggcccgccaccggctgctctgcggggactcagcagagaagcgccccactcgccctgtcaacaaggtgatcaagtctgcctcagccacagccctctcactcctcattccttcggnnnnnnnnnnnnnnnnnnnnnnnnnnnnnnnnnnnnnnnnnnnnnnnnnnnnnnnnnnnnnnnnnnnnnnnnnnnnnnnnnnnnnnnnnnnnnnnnnnnnnnnnnnnnnnnnnnnnnnnnnnnnnnnnnnnnnnnnnnnnnnnnnnnnnnnnnnnnnnnnnnnnnnnnnnnnnnnnnnnnnnnnnnnnnnnnnnnnnnnnnnnnnnnnnnnnnnnnnnnnnnnnnnnnnnnnnnnnnnnnnnnnnnnnnnnnnnnnnnnnnnnnnnnnnnnnnnnnnnnnnnnnnnnnnnnnnnnnnnnnnnnnnnnnnnnnnnnnnnnnnnnnnnnnnnnnnnnnnnnnnnnnnnnnnnnnnnnnnnnnnnnnnnnnnnnnnnnnnnnnnnnnnnnnnnnnnnnnnnnnnnnnnnnnnnnnnnnnnnnnnnnnnnnnnnnnnnnnnnnnnnnnnnnnnnnnnnnnnnnnnnnnnnnnnnnnnnnnnnnnnnnnnnnnnnnnnnnnnnnnnnnnnnnnnnnnnnnnnnnnnnnnnnnnnnnnnnnnnnnnnnnnnnnnnnnnnnnnnnnnnnnnnnnnnnnnnnnnnnnnnnnnnnnnnnnnnnnnnnnnnnnnnnnnnnnnnnnnnnnnnnnnnnnnnnnnnnnnnnnnnnnnnnnnnnnnnnnnnnnnnnnnnnnnnnnnnnnnnnnagtgggagggaattcatcacagagcagctcccccagctccagcgtgcccagttccccagccggctctgggcacacacggcccagctccctccacggtctggcacccaagctccaacgccagtaccgctctccgcggcgcaagtcagcaggcagcatcccactgtcaccacgagaccacaccccttctcccccacccccagcagcttcacttcagcggtccccatcacccctgtctggccatgtagcccaggcctttcccacaaagcttcacttgtcacaaccgcctgggcagaaaagtctcgcggcccaagagtgcggagccaccccgttcttaattgctcaagagggtgcagtcagctgagaaactggcagcagcacttgccgcttctgagaagaagctagccacttctcgcaagcacagccttgacctgccccactctgagctaaagaaggaactgccgcccagggaagtgagccctctggaggtagttggagccaggggtgtgctgtctggcaagggggccctaccggggaagggggtgctgcagcctnnnnnnnnnnnnnnnnnnnnnnnnnnnnnnnnnnnnnnnnnnnnnnnnnnnnnnnnnnnnnnnnnnnnnnnnnnnnnnnnnnnnnnnnnnnnnnnnnnnnnnnnnnnnnnnnnnnnnnnnnnnnnnnnnnagggtgcgcaggagctgagcctggcacctcacccagcagtgagccagagtgtggcccccaaaggaacagaagagagtggggaaggaggaaactttcccatccagagaccctaggagcccgggcccaggggtcccaagcctattgacagggatcacactggggcctcccagaagggaaagtcccagcggtccccacaggaggcttcggagcccacaagccattgaggaggctgccagctcctcctcaccaggccccaacctgggtaggtctggagccacagaccccatcccttctgaaggttgctggaaggctcagcacctccacacccaggcactagcagcactttcttccagcacttcaggactcacccccaccagcagttgctctcctcccagctccacctctgggaagctgggcatgtggtcctggaaattccatattgagggcccagacagggcatccccaagcagaaaggcaaccatggcaggtgggctagtcaacctccaggattttggaaaccacaactccagcccaccctaagaacctgtctcccagggagcaggggaagacacagccacccagtgccnnnnnnnnngcccgtccaccttgtgaggatcccagccagggctggctatgggagtctgagtgtgcacaagcagtgaaagaggatccagccctgagcatcacccaagtgcctgatgcctcaggtgacagaaggcaggacgttccatgccaaggctgccccctcacccaggagtctgagtccagcctctggaggggccaagaaccagggggccatcaaaagcatcgggatttggcattggttccagatgagcttttaaagcaaacata

SEQ ID NO: 30452 - DNA, 846 bp, Macaca Mulatta
  misc_feature (1)...(846): n = A,T,C or G
tggtcttctgtctgtcgagcgaggaaccgcgccgcccgctgcgaagcgacatggtccacttccaggccttttatgtccagcagctgctacacaacaagttcgtggtcatcttgggggactccanttcagcgggctgtgtacaaggacctggtgctcttgctccagaaagactcactgctaacagctgcccagctgaaagccaaggnnnnnnnnnnnnnnnnnnnnnnnnnnnnnnnnnnnnnnnnnnnnnnnnnnnnnnnnnnnnnnnnnnnnnnnnnnnnnnnnnnnnnnnnnnnnnnnnnnnnnnnnnnnnnnnnnnnnnnnnnnnnnnnnnnnnnnnnnnnnnnnnnnnnnnnnnnnnnnnnnnnnnnnnnnnnnnnnnnnnnnnnnnnnnnnnnnnnnnnnnnnnnnnnnnnnnnnnnnnnnnnnnnnnnnnnnnncagatatggtcgctgctcaatggagagctgcaacaagaacctggagcgggtgtttgtgcgcatggaccaagtattgccagactcctgcctgctggtgtggaacatggcgatgcccctcggggagcgcatcactgggggtttcctcctgccagaggcaagntcnnnnnnnnnggcaggctccttgcggcgggatgtggttgaagggaatttctacagtgctacgctggctggggaccactgctttgatgtcctagatctccactttcatttccggcatgcggtacagcaccgtcatcgggatggtgtccactgggaccagcatgcgcaccgccacctctcacacctgtttctgacccatgtggctgacgcctggggtgtggagctgcccaagcgtgactatccccct

SEQ ID NO: 30453 - DNA, 685 bp, Macaca Mulatta
  misc_feature (1)...(685): n = A,T,C or G
gggggtttacagatggtggccacagtggcagttctctgggtgggaaaggcgctcagagtagtcaagtttcctgaccttgacagaaatgtacctcgaaagacgtttccactacctctactatattttgggaaccaaatcacgggactgttcagcacaaagaaactgaacttgccaatgtttacagttctgagaaggttctccatcctgtttacaatgtttgctgaaggagttttactcaagaagactttttcttggggtattaaaatgactgtatttgcaatgattattggagcctttgtagctgccagctctgacttggcatttgatctggaaggatatgtttttattctgataaacgatgtcctgacagcagcaaatggtgcatatgtaaaacaaaaattagattcaaaagagctgggaaaatatggactgctctattacaatgcattgttcatgattctgcccaccctggccattgcgtatttcacaggagatgcacaaaaggctgtggagttttgaagctgggccgacacctctttcttctgcagttcaccctctcctgtgtgatggggtttatcttaatgtacgccacagtactctgcacgcagtatattctgctcttacactacatagttggcggattaagatatattatacttaaattgaatgccttggtgaattaatn

SEQ ID NO: 30454 - DNA, 91 bp, Macaca Mulatta
gctttgagcttcctggatctccggttgacccggcaggacggcatcctgagacacggggagctgggcgacgactggggccacgtcaaggacc

SEQ ID NO: 30455 - DNA, 1616 bp, Macaca Mulatta
  misc_feature (1)...(1616): n = A,T,C or G
cagaaacatttgtttgggtgaacagtgcatctgcacattcccagagtgttgctaaggccaaatacgaatttttatttggcagagctgaagggaaaactccagatactagtnnnnnnnnnnnnnnnnnnnnnnnnnnnnnnnnnnnnnnnnnnnnnnnnnnnnnnnnnnnnnnnnnnnnnnnnnnnnnnnnnnnnnnnnnnnnnnnnnnnnnnnnnnnnnnnnnnnnnnnnnnnnnnnnnnnnnnnnnnnnnnnnnnnnnnnnnnnnnnnnnnnnnnnnnnnnnnnnnnnnnnnnnnnnnnnnnnnnnnnnnnnnnnnnnnnnnnnnnnnnnnnnnnnnnnnnnnnnnnnnnnnnnnnnnnnnnnnnnnnnnnnnnnnnnnnnnnnnnnnnnnnnnnnnnnnnnnnnnnnnnnnnnnnnnnnnnnnnnnnnnnnnnnnnnnnnnnnnnnnnnnnnnnnnnnnnnnnnnnnnnnnnnnnnnnnnnnnnnnnnnnnnnnnnnnnnnnnnnnnnnnnnnnnnnnnnnnnnnnnnnnnnnnnnnnnnnnnnnnnnnnnnnnnnnnnnnnnnnnnnnnnnnnnnnnnnnnnnnnnnnnnnnnnnnnnnnnnnnnnnnnnnnnnnnnnnnnnnnnnnnnnnnnnnnnnnnnnnnnnnnnnnnnnnnnnnnnnnnnnnnnnnnnnnnnnnnnnnnnnnnnnnnnnnnnnnnnnnnnnnnnnnnnnnnnnnnnnnnnnnnnnnnnnnnnnctcagcggtgacctgccactcggcaggcagtggttggtttcttaaaagagcagaggtctgctcttgggagagagcacccagggggatgtgatcaaagcagctccatgggacgcccaggccgggtcaaacatgtggaatttcaaggagtggagatactgtggacaggaggagataagagagagacccagcatcctgtagattctgagacatcactgcgaagaacagcctctcctgaaagcaaagagttttccaaagtgccgtgccgtctcatctcatcagctggtttgtgtcattcaagtcgtttaactgaccatgtttgggatgagtcctggaaagctccttcagagaggcctggcactagctcgaggacattctcccctgtgcgtcttgatgagagtggagaggatgaagtcttcctaaaggaaaacaaacagcgtcttgagaagacacctgagccagagagagacaaggaaaggnnaggatcactgaacaagaggagcacgttaagggggaagatgaagacatcctcgggcctggatatacagaggactccactgatgtgtacagctcccagtttgaaaccattttggacaacacttctttatactacagtgcggagtccctggagacattatactcagagcctgatagctattttagctttgaaatgcccctcactccaatgatacaacagcgcattaaagaaggtggtcagttcttggagaggacatcagggggaggacatcaggatatcctgagtgtgtcagcagatggtggaatcgtgatgggctattctagtggggtcaccaatgggctgaatgatgccaacgactccatctacacgaagggcaccccggagattgctttctggggaa

SEQ ID NO: 30456 - DNA, 3006 bp, Macaca Mulatta
  misc_feature (1)...(3006): n = A,T,C or G
ggtctctgatgaaaaccttactggagtgaatcctgctgcagccatgcgtgtggtatatgatggtggagtttttcttggacccatatttggagacatgttggctactgccaaccagcatagtcaggtnnnnnnnnnnnnnnnnnnnnnnnnnnnnnnnnnnnnnnnnnnnnnnnnnnnnnnnnnnnnnnnnnnnnnnnnnnnnnnnnnnnnnnnnnnnnnnnnnnnnnnnnnnnnnnnnnnnnnnnnnnnnnnnnnnnnnnnnnnnnnnnnnnnnnnnnnnnnnnnnnnnnnnnnnnnnnnnnnnnnnnnnnnnnnnnnnnnnnnnnnnnnnnnnnnnnnnnnnnnnnnnnnnnnnnnnnnnnnnnnnnnnnnnnnnnnnnnnnnnnnnnnnnnnnnnnnnnnnnnnnnnnnnnnnnnnnnnnnnnnnnnnnnnnnnnnnnnnnnnnnnnnnnnnnnnnnnnnnnnnnnnnnnnnnnnnnnnnnnnnnnnnnnnnnnnnnnnnnnnnnnnnnnnnnnnnnnnnnnnnnnnnnnnnnnnnnnnnnnnnnnnnnnnnnnnnnnnnnnnnnnnnnnnnnnnnnnnnnnnnnnnnnnnnnnnnnnnnnnnnnnnnnnnnnnnnnnnnnnnnnnnnnnnnnggggaaagatggacacgttgtgaatgtgactgtgatcagagggaaccattctgcagttcttcccagagcatttacatatgtctcttccttaaatccagttattgtgactctaagcagaaacacaagcaacatagcagnnnnnnnnnnnnnnnnnnnnnnnnnnnnnnnnnnnnnnnnnnnnnnnnnnnnnnnnnnnnnnnnnnnnnnnnnnnnnnnnnnnnnnnnnnnnnnnnnnnnnnnnnnnnnnnnnnnnnnnnnnnnnnnnnnnnnnnnnnnnnnnnnnnnnnnnnnnnnnnnnnnnnnnnnnnnnnnnnnnnnnnnnnnnnnnnnnnnnnnnnnnnnnnnnnnnnnnnnnnnnnnnnnnnnnnnnnnnnnnnnnnnnnnnnnnnnnnnnnnnnnnnnnnnnnnnnnnnnnnnnnnnnnnnnnnnnnnnnnnnnnnnnnnnnnnnnnnnnnnnnnnnnnnnnnnnnnnnnnnnnnnnnnnnnnnnnnnnnnnnnnnnnnnnnnnnnnnnnnnnnnnnnnnnnnnnnnnnnnnnnnnnnnnnnnnnnnnnnnnnnnnnnnnnnnnnnnnnnnnnnnnnnnnnnnnnnnnnnnnnnnnnnnnnnnnnnnnnnnnnnnnnnnnnnnnnnnnnnnnnnnnnnnnnnnnnnnnnnnnnnnnnnnnnnnnnnnnnnnnnnnnnnnnnnnnnnnnnnnnnnnnnnnnnnnnnnnnnnnnnnnnnnnnnnnnnnnnnnnnnnnnnnnnnnnnnnnnnnnnnnnnnnnnnnnnnnnnnnnnnnnnnnnnnnnnnnnnnnnnnnnnnnnnnnnnnnnnnnnnnnnnnnnnnnnnnnnnnnnnnnnnnnnnnnnnnnnnnnnnnnnnnnnnnnnnnnnnnnnnnnnnnnnnnnnnnnnnnnnnnnnnnnnnnnnnnnnnnnnnnnnnnnnnnnnnnnnnnnnnnnnnnnnnnnnnnnnnnnnnnnnnnnnnnnnnnnnnnnnnnnnnnnnnnnnnnnnnnnnnnnnnnnnnnnnnnnnnnnnnnnnnnnnnnnnnnnnnnnnnnnnnnnnnnnnnnnnnnnnnnnnnnnnnnnnnnnnnnnnnnnnnnnnnnnnnnnnnnnnnnnnnnnnnnnnnnnnnnnnnnnnnnnnnnnnnnnnnnnnnnnnnnnnnnnnnnnnnnnnnnnnnnnnnnnnnnnnnnnnnnnnnnnnnnnnnnnnnnnnnnnnnnnnnnnnnnnnnnnnnnnnnnnnnnnnnnnnnnnnnnnnnnnnnnnnnnnnnnnnnnnnnnnnnnnnnnnnnnnnnnnnnnnnnnnnnnnnnnnnnnnnnnnnnnnnnnnnnnnnnnnnnnnnnnnnnnnnnnnnnnnnnnnnnnnnnnnnnnnnnnnnnnnnnnnnnnnnnnnnnnnnnnnnnnnnnnnnnnnnnnnnnnnnnnnnnnnnnnnnnnnnnnnnnnnnnnnnnnnnnnnnnnnnnnnnnnnnnnnnnnnnnnnnnnnnnnnnnnnnnnnnnnnnnnnnnnnnnnnnnnnnnnnnnnnnnnnnnnnnnnnnnnnnnnnnnnnnnnnnnnnnnnnnnnnnnnnnnnnnnnnnnnnnnnnnnnnnnnnnnnnnnnnnnnnnnnnnnnnnnnnnnnnnnnnnnnnnnnnnnnnnnnnnnnnnnnnnnnnnnnnnnnnnnnnnnnnnnnnnnnnnnnnnnnnnnnnnnnnnnnnnnnnnnnnnnnnnnnnnnnnnnnnnnnnnnnnnnnnnnnnnnnnnnnnnnnnnnnnnnnnnnnnnnnnnnnnnnnnnnnnnnnnnnnnnnnnnnnnnnnnnnnnnnnnnnnnnnnnnnnnnnnnnnnnnnnnnnnnnnnnnnnnnnnnnnnnnnnnnnnnnnnnnnnnnnnnnnnnnnnnnnnnnnnnnnnnnnnnnnnnnnnnnnnnnnnnnnnnnnnnnnnnnnnnnnnnnnnnnnnnnnnnnnnnnnnnnnnnnnnnnnnnnnnnnnnnnnnnnnnnnnnnnnnnnnnnnnnnnnnnnnnnnnnnnnnnnnnnnnnnnnnnnnnnnnnnnnnnnnnnnnnnnnnnnnnnnnnnnnnnnnnnnnnnnnnnnnnnnnnnnnnnnnnnnnnnnnnnnnnnnnnnnnnnnnnnnnnnnnnnnnnnnnnnnnnnnnnnnnnnnnnnnnnnnnnnnnnnnnnnnnnnnnnnnnnnngtgtccttggctttcctgtgtggcctgaagcatgaggaggacagctgtgaggctgccagacacacctatgtgcagtgtgatttgacagttgccgtggggacagagcgaatgctcgaatcgtggccttacctctacatttgtgaggaaagttcccaatgcctctttgtgccagatcattgggcggagtcaatgtttccatcgttctcaggcctctttgtca

SEQ ID NO: 30457 - DNA, 1283 bp, Macaca Mulatta
  misc_feature (1)...(1283): n = A,T,C or G
gggccctgacggcgaggtcatgaagaagaacatgatgttaatcaagacctgtgcctgccattacaactgtcccggagacaatgacatctttgagtcactgtactacaggaagatgtacggagacatggcgtgaagccagagagtgagacattaactcattagactggaacttgaaatgattcacatctcatttttatgtaaaaatgatttcagtagcacaagttatttaaatctgtttttctaactgggggaaaagattccgacccaattcgaaacattgtgccatgtcaaacaaatagtctatcaaccccagacactggtttgaagaatgttaagacttgacagtggaactgcattagtacacagcaccagaatgtatattaaggtgtgactttaggagcagtgggagggtaccaacagaaaggttggtatcatcagatagcatcttatacgagtaatgtgcctgctatttgaagtgtaattgagaaggaaaatgttagcgtgctcactgacatgccggtagccccagtgacagcgaggatgtgcattctctagtcatcaagagactgagtctagttgttccttaagtcagaacagcagattcagctctgacattctgattcgaatgacactgttcaggaatcggaatcctgtcgattagactggacagcttgtggcaagtgaatttgcctgtaacaagccacatttttaaaaatttatattgtaaatattgtgtgccnnnnnnnnnnnnnnnnnnnnnaaataatatacagttatctaagttaatttaaagttgtttgtgcntnnnnnnnnnnnnnnnnnntgctttgatatttcaatgttagcctcaatttctgaacaccataggtagaatgtaaagcttgtctgatcattcaaagcgtgaaatggatacttatatggaaattctgctcagatagaatgacagtccatcaaaacagattgtttgcaaaagcgaggcattagtgaccttggaaggctgatttctaggtaggaaatgtggtagcctcacttttaatgaacaaatggcctttattaaaaaccgagcggctctatatagctgatcagttttctcacctagaagcatttgtttctactttgatatgacctgtttttccggaaagttttaatttgtttgagaagtgttgaccaaaaagtttcattggtttgcacccttttctagtttgaaaataaagtatnnnnnnnnnnnnnnnnnntataaaaaaaacnnnnnnnnnnnnnnnnntcggccccccggcccccga

SEQ ID NO: 30458 - DNA, 663 bp, Macaca Mulatta
tgtcgctgttttttgtcatcatgcgtggagaatatgatgccctgcttccatggccgtttaagcagaaagtgacactcatgctgatggatcaggggtcctctcggcgccatttgggagatgcgttcaagcccgaccccaacagcagcagcttcaagaagcccactggagagatgaatatcgcctctggctgcccagtctttgtggcccagactgttctagaaaatgggacatatattaaagatgatacaatttttattaaagtcatagtggatacttcggatctgcccgatccctgatgagtagctggggaggtggatttagcagaaggcaactcctctgggggatttgaaccggtctgtcttcaccgaggtcctcgcactcagaaaaggaccttgtgggacggaggaagcggcagaaggcggacgcgtgccggcgggaggagccacgcgtgagcacacgtgacacgttttataatagactagccacacttcactctgaagaattatttatccttcagcgagataaatattgctgtcagagaaaggttccatttccatttttaaagatctagttaattacggtggaaaacatatatgctaaacaaaagaaacatgattttcttccttaaacttgaacaccaaaaaaacacacacacacacatgt

SEQ ID NO: 30459 - DNA, 258 bp, Macaca Mulatta
  misc_feature (1)...(258): n = A,T,C or G
nagttactgcgtgacttcccagacgagctgagagctgacattgctatgcacctgaatcgggagatcttgcagctgccgctgttcggggcagccagcaggggctgcctgcgggccctatcgctgcacatcaagacctcgttctgcgctccgggcgagtacctgttgcgccgtggggatgccctgcaggcacactactatgtctgctccggctcacttgaggtgctccgagacaacatggtgctggccatcctgggtaag

SEQ ID NO: 30460 - DNA, 96 bp, Macaca Mulatta
atgctgcgtgggacaatgacggcgtggagaggaacaaggcctgaggtcacactggcttgcctcctcttagccacagcaggctgctttgctgacttg

SEQ ID NO: 30461 - DNA, 413 bp, Macaca Mulatta
ttcaaaccagtgctgtccggctcctacccagactcggccccgtcgccgctggacaaaacagggggctccatgttgagcgctgggccttcggcgccgctggggggctccccgcgctcctcagctcgacgctactctggccgcgccacctgcgactgccccaactgccaggaggcagagcggctgggccctgccggggcgagcttgcggcgcaagggcctgcacagctgccacatcccgggctgcggcaaggtgtatggcaagacttcgcacctcaaggcgcaactgcgctggcacacgggcgagcggcccttcgtgtgcaactggctcttctgcggcaagcgcttcacacgctccaaggagctgcagcggcacctgcggacccacaccggcgagatacgggtcgcctgtccagt

SEQ ID NO: 30462 - DNA, 437 bp, Macaca Mulatta
agatgggggaaaaggtttgctttggtgagtgagaaaaggctgggtgtgtgatccatcccctcacgtttcagaacttccaggctttctacctcgactctcaccgcagccagcacatacacctaggctgtttttctttcctccacatccgagggacacaggagcagctaggatctgcattttcaggttccgagcctgacccctggaactgaccagtgctcaattgtcagacttggcctatggttttgaccttgccagtgaagtttcagttttgaagtgattaaatgtcactttctcatcagtttcacttctggaggttttctgatcccactccctggtggcagggatgtacctgggagtttgaatcaggcccatttgagcgtggtagccgtgttgggtgaaggtcaggggctcagtgaggcactgggggggttttcagt

SEQ ID NO: 30463 - DNA, 4659 bp, Macaca Mulatta
  misc_feature (1)...(4659): n = A,T,C or G
tgttccagacgcagtccaggaatcatgccggaggacttctgcaactctactttttggaattcctcattcctggacagtccagaggcagacctgccactttgttttgagcaaactgttctggtgtggattcccttgggcttcctatggctcctggccccctggcagcttctccacgtgtataaatccaggaccaagagatcctctatcaccaaactctaccttgctaagcaggtatttgttggttttcttcttattctagcagccatagagctggcccttgtactcacagaagactctggacaagccacagtccctgctgttcgatataccaatccaagcctctacctaggcacatggctcctggttttgctgatccaatacagcagacaatggtgtatacagaaaaactcctggttcctgtccctattctgggttctctcaatactctgtggcactttccaatttcagactctgatctggacactcttgcagggtgacaattctaatctggcctactcctgcctgttcttcatctcctatggattccagatcctgatcctgatcttttcagcattttcagaaaataatgagtcatcaaataatccatcatccacagcttcatttctgagtagcattacctacagttggtatgacagcatcattctgaaaggctacaagcatcctctgacactcgaagatgtctgggaagttgatgaagagatgaaaaccaagatactagtgagcaagtttgaaacgcacatgaagacagagctgcagaaagccaggcgggcactccagaaacggcagcagaagagctcccagcagaactctggagccaggctgcctggcttgaacaagaatcagagtcaaagccaagatgtccttgtcctggatgacannnnnnnnnnnnnnnnnnnntctgggaccaaaaaagatgttccaaaatcctggttgatcaaggctctgttcaaaactttctacacagtgctcctgaaatcgttcctactgaagctagtgaatgacatcttcacgtttgtgagtcctcagctgctgaaattgctgatctcctttgcaagtgaccgtgacacatatctgtggattggatatctctgtgcaatcctcttattcgctgcggctctcattcagtctttctgccttcagtgttatttccagctgtgcttcatgctgggtgtaaaagtacggacagctatcatggcttctgtatataagaaggcattgaccctatccaacttggccaggaaggagtacaccgttggagaaacagtgaacctgatgtctgtggatgcccagaagctcatggatgtgaccaacttcatacacttgctgtggtcatgtgttctacagattgtcttatccatcttcttcctatggagagagttgggaccctcagtcttagcaggtgttggggtgatggtgcttgtaatcccaattaatgcgatactgtccaccaagagtaggaccattcaggtcaaaaatatgaagaataaggacaaacgtttaaagatcatgaatgagattcttagtggaattaagatcctgaaatattttgcctgggaaccttcattcagagaccaagtccaaaacctccgaaagaaagagctcaagaacctgctggcctttagtcaactacaatgtgtagtaatgttcatcttccagttaactccagtcctggtatctgtggtcacattttctgtttatgtcctggtggatagcaacaatattttggatgcacaaaaggccttcacctccattactctcttcaacatcctgcgctttcccctgagcatgcttcccatgatgatctcctccatgctccaggccggtgtttccacagagcggctggagaagtacttgggaggtgatgacttggacacatctgccattcgacatgactgcaattttgacaaagccgtgcagttttctgaggcctcctttacctgggaacgtgatatggaagccacaatccgagatgtgaacctggacattatgccaggccaacttgtggctgtgatggggcctgtcggctccgggaagtcctccttgatatcagccatgctgggagaaatggaaaatgtccacgggcacatcaccatcaggggcaccactgcctatatcccacagcagtcctggattcagaatggcaccatcaaggaaaacatcctttttggagccgagttgaatgaaaagaggtaccagcaagtcctggaggcctgtgctctcctcccagacttggaaacgcggcctggaggagatttggctgagattggagagaagggtataaatctcagtgggggtcagaagcagcggatcagcctggccagagctacctaccaaaatttagacatctatcttctagatgaccctttgtctgctgtggatgctcatgtaggaaaacatatttttaataaggtcttgggccccaatggcctgttgaaaggcaagactcgactcttggttacacatagcatgcactttcttcctcaagtggatgagatagtagttctggggaatggcacaattatagagaaaggatcctacagtgctctcctggcccaaaaaggagagtttgctaagaatctgaagacatttctaagacatacaggccctgaagaggaaaccacagtccatgatggcagtgaagaagaagacgatgactctgggctgatatccagtatggaagagatccctgaagatgcagcctccataaccatgagaagagagaacagctttcgtcgaacgcttagccgcagttctaggtccagcagcaggcatctgaagtccctgaaaaactccttgaaaactcggaatgtgaaaagcctgaaggaagatgaagaactagtgaaaggacaaaaactaattaagaaggaattcgtagaaactggaaaggtgaagttctccatctacctggagtacctacgagcagtaggatttttttcaatattcttcatcatccttgcatttgtgatgaattctgtggcttttattggatccaacctctggctcagtgcttggaccagtgactctaaaatcttcaatagcaccgactatccaaaatctcagagggacatgagacttggagtctacggagctctgggattagcgcaaggtatatttgtgttcatagcacatttctggagtgcctttggtttcgtccatgcatcaaatatcttgcacaagcaactgctcaacaatatccttcgagcacccatgagattttttgacacaacacccacaggccggattgtgaacaggtttgccggtgatatttccacggtggatgacaccctgcctcagtccatgcgcagctggattacatgcttcttggggataatcagcacccttgtcatgatctgcatggccacgcctgtcttcaccatcatcgttattcctcttggcattatttatgtatctgttcagatattttatgtgtctacctcccgccagctgaggcgtctggactctgtcaccaggtccccaatctactctcacttcagcgaggctgtgtcaggtttgccggttatccgtgcctttgagcaccagcagcgatttctgaaacaaaatgaggtgaggattgacaccaaccagaaatgtgtcttttcctggatcacctccaacaggtggctagcaatccgcctggagctggttgggaacctgatcgtcttcttttcagccttgatgatggttatctacagagataccctaaatggggacactgttggttttgttctgtccaatgcactcaatatcacacaaaccctgaactggctggtgaggatgacatcagaaatagagaccaacattgtggcggctgagcgaataactgagtacacaaaagtggaaaatgaggcaccctgggtgactgataagaggcctccgccagattggcccagcaaaggcaggatccagtttaacaactaccaagtgcggtaccgacctgagctggatctggtcctcagagggatcacttgtgacatcggtagcatggagaagattggtgtggtgggcaggacaggagctggaaagtcatccctcacaaactgcctcttcagaatcttagaagctgccggtggtcagatcatcattgatggagtagatattgcttccattgggctccacgacctccgagagaagctgaccatcatcccccaggaccccatcctgttctctggaagcctgaggatgaatctcgaccctttcaacaactactcagatgaggagatttggaaggccctggagctggctcacctcaagtcttttgtggccaacctgcaacttgggttatcccacgaagtaacagaggccggtggcaacctgagcataggccagaggcagctgctgtgcctgggcagggctctgcttcggaaatccaagatcctggtcctggatgaggccactgctgcggtggatctggagacagacaacctcattcagacgaccatccaaaacgagttcgcccactgcacagtgatcaccatcgcccacaggctgcacaccatcatggacagtgacaaggtaatggtcctagacaatgggaagattgtagagtacggcagccctgaagaactgctacaaacccctggacctttttactttatggctaaggaagctggcattgagaatgtgaacagcattctttga

SEQ ID NO: 30464 - DNA, 4509 bp, Macaca Mulatta
  misc_feature (1)...(4509): n = A,T,C or G
naggatcaagcagccgaccgtgaaactccatggaaacaaagactccatctgcaagccctgccacatggcccagcttgcctctgtctgcggatcagatggccacacatacagctctgtnnnnnnnnnnnnnnnnnnnnnnnnnnnnnnnnnnnnnnnnnnnnnnnnnnnnnnnnnnnnnnnnnnnnnnnnnnnnnnnnnnnnnnnnnnnnnnnnnnnnnnnnnnnnnnnnagagacttgcaccccatagaacctggctgacctgggagatcggctgcgggactcgtaccagctccttcatgagaactccaagcagaatggctcagccagcagtgcagccagtccggccagcggnnnnnnnnnnnnnnnnnnnnnnnnnnnnnnnnnnnnnnnnnnnnnnnnnnnnnnnnnnnnnnnnnnnnnnnnnnnnnnnnnnnnnnnnnnnnnnnnnnnnnnnnnnnnnnnnnnnnnnnnnnnnnnnnnnnnnnnnnnnnnnnnnnnnnnnnnnnnnnnnnnnnnnnnnnnnnnnnnnnnnnnnnnnnnnnnnnnnnnnnnnnnnnnnnnnnnnnnnnnnnnnnnnnnnnnnnnnnnnnnnnnnnnnnnnnnnnnnnnnnnnnnnnnnnnnnnnnnnnnnnnnnnnnnnnnnnnnnnnnnnnnnnnnnnnnnnnnnnnnnnnnnnnnnnnnnnnnnnnnnnnnnnnnnnnnnnnnnnnnnnnnnnnnnnnnnnnnnnnnnnnnnnnnnnnnnnnnnnnnnnnnnnnnnnnnnnnnnnnnnnnnnnnnnnnnnnnnnnnnnnnnnnnnnnnnnnnnnnnnnnnnnnnnnnnnnnnnnnnnnnnnnnnnnnnnnnnnnnnnnnnnnnnnnnnnnnnnnnnnnnnnnnnnnnnnnnnnnnnnnnnnnnnnnnnnnnnnnnnnnnnnnnnnnnnnnnnnnnnnnnnnnnnnnnnnnnnnnnnnnnnnnnnnnnnnnnnnnnnnnnnnnnnnnnnnnnnnnnnnnnnnnnnnnnnnnnnnnnnnnnnnnnnnnnnnnnnnnnnnnnnnnnnnnnnnnnnnnnnnnnnnnnnnnnnnnnnnnnnnnnnnnnnnnnnnnnnnnnnnnnnnnnnnnnnnnnnnnnnnnnnnnnnnnnnnnnnnnnnnnnnnnnnnnnnnnnnnnnnnnnnnnnnnnnnnnnnnnnnnnnnnnnnnnnnnnnnnnnnnnnnnnnnnnnnnnnnnnnnnnnnnnnnnnnnnnnnnnnnnnnnnnnnnnnnnnnnnnnnnnnnnnnnnnnnnnnnnnnnnnnnnnnnnnnnnnnnnnnnnnnnnnnnnnnnnnnnnnnnnnnnnnnnnnnnnnnnnnnnnnnnnnnnnnnnnnnnnnnnnnnnnnnnnnnnnnnnnnnnnnnnnnnnnnnnnnnnnnnnnnnnnnnnnnnnnnnnnnnnnnnnnnnnnnnnnnnnnnnnnnnnnnnnnnnnnnnnnnnnnnnnnnnnnnnnnnnnnnnnnnnnnnnnnnnnnnnnnnnnnnnnnnnnnnnnnnnnnnnnnnnnnnnnnnnnnnnnnnnnnnnnnnnnnnnatgagtcgggccaggacgcccagccacaccattaacctgtccctctgctgatccccaagcactggaaaaactttcctgacccaaggcagagtgatgaaggtggcggcggcggaggaggagggcagcagctgagaggccggggacagggtgccttgccaggctgtccaaggtctgtcccagggggcccaggtggtgcgggtagaacagggtggggagaggggtcggctcagcaggaggaggctgtggctgcagagactggaggagcttttaggagttgagaaggggcagctctgaatcccagaccctggaatagcctgtcccttttctctgggtctcgtggtggagccatggtctgggctgctctcttggggacactgggcggtggttacacagttgacctctgcctggctcccccttggtgcanctcctgccttcatccccttgctggggtcccctcgtccacttgagggcgcctgagggccagcagcagcaggcgaagagcctgggtctaggctaggggtgtgtgtgcccacctcctccctgacccttaacactcccgtcctgcccagaccaacagagagacctgtccctgagaccccagagagaagcagctgtcgaaggctgcaggcttcccgcgctctgagaccatgatcttcctcctgccaggggagagccacccacaggccatgtccagnnnnnnnnnnnnnnnnnnnnnnnnnnnnnnnnnnnnnnnnnnnnnnnnnnnnnnnnnnnnnnnnnnnnnnnnnnnnnnnnnnnnnnnnnnnnnnnnnnnnnnnnnnnnnnnnnnnnnnnnnnnnnnnnnnnnnnnnnnnnnnnnnnnnnnnnnnnnnnnnnnnnnnnnnnnnnnnnnnnnnnnnnnnnnnnnnnnnnnnnnnnnnnnnnnnnnnnnnnnnnnnnnnnnnnnnnnnnnnnnnnnnnnnnnnnnnnnnnnnnnnnnnnnnnnnnnnnnnnnnnnnnnnnnnnnnnnnnnnnnnnnnnnnnnnnnnnnnnnnnnnnnnnnnnnnnnnnnnnnnnnnnnnnnnnnnnnnnnnnnnnnnnnnnnnnnnnnnnnnnnnnnnnnnnnnnnnnnnnnaacctgggggccgtcttggtggcctgggagtgtgaggaggggcctcctgtgtgctgggtgggcggcgggtgtggggtcaatgcggtgaggctctctgggtgaagctcccaacctggcagtccccagcctcccagcatctgcgagtgtctgttggactttacagaagagcctcaccctgtctgcccctcactctgccctggaatcaacatcttccgagtccttcttgggggaaatagcagagccccacttagccccataaaccgctttccattccgcagcccagttctgagtgttgaggtgtcatgccattccaggtcccccagccccttcttcctcctgtcctctctctgtcctccacctccgcctccagccccggctcagttcagggaaatgctgttccacatcagccctctgctctctgaggcagccgcgcctctgactcggagctacttgaaacttcgctcttgctaggattgaagtctacctgtctcttccctctgccccagctggagttctggaactttcctactggggggaggttgttaaggatgctggggggcctgggaagggaaggaattcagaggaagggtgttccctgtcctcttgttgtcgccctctgctcctggggcacgtgctccctctgtctctgggtcttctgactgtacacgtttgtgtgtccttgtaaatatgttttatgaagaaagcaaaagggattgaactagcctctggcaggattgcaggggtccagccttgcctgtctcagaagcctctacactgctttttgccccactgagactgnnnnnnnnnnnnnnnnnnnnnnnnnnnnnnnnnnnnnnnnnnnnnnnnnnnnnnnnnnnnnnnnnnnnnnnnnnnnnnnnnnnnnnnnnnnnnnnnnnnnnnnnnnnnnnnnnnnnnnnnnnnnnnnnnnnnnnnnnnnnnnnnnnnnnnnnnnnnnnnnnnnnnnnnnnnnnnnnnnnnnnnnnnnnnnnnnnnnnnnnnnnnnnnnnnnnnnnnnnnnnnnnnnnnnnnnnnnnnnnnnnnnnnnnnnnnnnnnnnnnnnnnnnnnnnnnnnnnnnnnnnnnnnnnnnnnnnnnnnnnnnnnnnnnnnnnnnnnnnnnnnnnnnnnctccttggcccgtgggtgccgggggaggtggatgtcagatctggtaggttggagcacagaaaataaatgtgccttgagagaccactcagagaaggtccaagggtgatggagaaggaagcatggcctgggagcttggaagggaggggcggtgggtggtggcatcttgactgccccctgttgtcccacacgggggtggtcacacttcactccagcccgcctggcttcagccttccatgagctccacctgcttccaacttcaccttggagggggtgggatctgttggcatcaacacgggaccccctgcttcaccaaagcccgagccctcagcccttggggagaacgaatggctgagctttgattcccggggtccttgagaggctgcaggctggtggcagtcccaggggagagacaccacgggtgcagaaggagacccagacatcccgaggaagttcccagcgagcaaactgctttccagcctgaagcctgcttaaactgtgtgatgtgcaataaccgagcttagagttaggaattgtgttcaagtgcttggatttccgtctgtagatttaagtgctgaaattgtatctctcagtaattttagatgtctttaaaaaatcgaaaaaccaagtgttagactgtgtgtgtgcgttgatgggcactcaagcgtcccgtgagtcatccagccatccctttcccctgcacccaatcctctcacgtcccgccccgcctgcaattggggacgctgcctcgt

SEQ ID NO: 30465 - DNA, 711 bp, Macaca Mulatta
  misc_feature (1)...(711): n = A,T,C or G
cagtgaccaccgtagtccggaggccttccgcacgcgcatctaggcggccacacaaatggagtctgtgctgggtgctggtgggaagcccaactgcctggtcattgttgagatcgacagggcccccgtggnnnnnnnnnnnnnnnnnnnnnnnnnnnnnnnnnnnnnnnnnnnnnnnnnnnnnnnnnnnnnnnnnnnnnnnnnnnnnnnnnnnnnnnnnnnnnnnnnnnnnnnnnnnnnnnnnnnnnnnnnnnnnnnnnnnnnnnnnnnnnnnnnnnnnnnnnnnnnnnnnnnnnnnnnnnnnnnnnnnnnnnnnnnnnnnnnnnnnnnnnnnnnnnnnnnnnnnnnnnnnnnnnnnnnnnnnnnnnnnnnnnnnnnnnnnnnnnnnnnnnnnnnnnnnnnnnnnnnnnnnnnnnnnnnnnnnnnnnnnnnnnnnnnnnnnnnnnnnnnnnnnnnnnnnnnnnnnnnnnnnnnnnnnnnnnnnnnnnnnnnnnnnnnnnnnnnnnnnnnnnnnnnnnnnnnnnnnnnnnnnnnnnnnnnnnnnnnnnnnnnnnnnnnnnnnnnnnnnnnnnnnnnnnnnnnnnnnnnnnnnnnnnnnnnnnnnnnnnnnnnnnnnnnnnnnnnnnggaccccacgggatgctggcctggtcgtacagcagtacatgggacatgccggcntgggcttgtgcgatgtgctgctcccggcctggac

SEQ ID NO: 30466 - DNA, 438 bp, Macaca Mulatta
ggaaccaacatccaagaggcccagaagatactcaacaacagcggactccccattacttcagccattgacctggaggatgcagccaagaaggctgtggccaagaagtgatgtctttgtcctgatccgatggggaaagaaagccatttttccataaaaagggacggttcatcattgtgaaagaaatggttatctcattggggaggaaaaggggggagaaggcaagaatcactgaaaaatcttaaatctgtgttttctggaataatatatgtagacagcctaaatctgattttagtctttataaaaataatatcttgtattctcatacttttctgtcattgtaagcctgcccagtaggcagtgttttgcagactctgggaagtggtctatgtggccaaatattgtgtgtatagacagaatttgaaatcaggtcctgcttcc

SEQ ID NO: 30467 - DNA, 175 bp, Macaca Mulatta
gacaagacttaaaacctgtcttggatagagaatatttagccatttacctcaaaatggtattttttacatgcaatgcatgtggtgaatcagtgaagaaaatacaagtggaaaagcatgtgtctgtttgcagaaactgtgaatgcctttcttgcattgactgtggtaaagatttctg

SEQ ID NO: 30468 - DNA, 196 bp, Macaca Mulatta
  misc_feature (1)...(196): n = A,T,C or G
nagcatcactcgtaagagacgttatgtggcctcagtgtccctacatgaccggatctacgtcattggtggctatgatggccgttcccgccttagttcagtggaatgtctagactacacagcagatgaggatggggtctggtattctgtggcccctatgaatgtccgacgaggtcttgctggagccaccaccctggga

SEQ ID NO: 30469 - DNA, 515 bp, Macaca Mulatta
  misc_feature (1)...(515): n = A,T,C or G
gggggcagttactgatatagccaaggtgggacgctgctggagggagctagaagggatcagccagccatgcctccagttcagagagataaccaactggctggcaaagtaacaaatgaaaagtaacctgactctattgacccgcttaaccctacacagggggaaggatggaaatgagcagctgtttgctttgaaacagtggaacagttttgcagccttagaaaatggcatgtaacgtacctaaccaaagacagcggactctgtcaacaacaggagaagctctatacgaaattcttggtctgcgtaagggagcatcaaatgaagaaattaagaaaacctacagaaaattggccctganacaccatccagacaagaatccagatgatccagctgctactgagaagttaaagaaatcacaacgcccacgcaatacttactgacctctcaaagagaagcatatacgacaagtacggatcgcctggactctacgtagcccaagcagtttggagacgaaattt

SEQ ID NO: 30470 - DNA, 408 bp, Macaca Mulatta
aggaaaatcagtaataaagctgtaacatataggaatcgttgtcagtttgtgtcttgatctcatggtgcttgggatcagggtacacattttatgcaaacactaaggcttttcgctaacaacatagcaggtcaaaattcacacatacaaaagtttaactctgtactgttcacacttttctttttaatcctgtaagtaatgctgcattttgattgttcttttttggtatttaatgtgggctgattttacaatgttatattcacttgcagatacatacctctgctgctttctcttctataaatagtgatgctataaacttcctttcacagagatcattctatttcaaatcatttgaatgattattacaatgatttcattcaaataaaaattttaaaaatttaagcatcttca

SEQ ID NO: 30471 - DNA, 306 bp, Macaca Mulatta
agaccacgtgctgctgaccaacctgctgtagtgcatcttgctgctgagactctcatctgaactcacccgattctcatcaaccagcattcttgatgtagctcatctatgagctgagtcatgggaagctagttggaaaacttcagttccaaccaattcttagattgaatctggcctccaaatatatgctccccctacattttacctctctaccaaatgaacatgggttgtaatttgctccaaaatctgtcaactatcttaattgaaatatttgctctctgccgtaatttctcatatggagctattcca

SEQ ID NO: 30472 - DNA, 297 bp, Macaca Mulatta
acagcagttggtaaactgcttttagggatactggctgacttcaagtggattaataccttgtatctttatgttgctaccttaatcatcatgggcctggccttgtgtgcaattccatttgccaaaagctatgtcacactggcgttgctttctgcgattctagggttttttactggtaattggtccatctttccatatgtgaccacaaagactgtgggaattgaaaaattagcccatgcctatgggatattaatgttttttgctggacttggaaatagccttggaccacccatcgttggt

SEQ ID NO: 30473 - DNA, 172 bp, Macaca Mulatta
agacatatccagttcaatcacatggtggaaactatatgggtcagagcattcaccaagtaactgttgcccaaagctatagcctaggacccgatcagattggtccactgagatctctgcctccaaatgtgaattcctcagtgacaacacagcctgctcaaacttcatatttaag

SEQ ID NO: 30474 - DNA, 815 bp, Macaca Mulatta
gcaacataagcctcataaacaggcagcacaaacacaaccatcccagaattcacatctccctcaaaaccagcaacagcagcaaaaattacaaatgaagaataaagaagaagtactccagacttttcctcacccccaaagcaacaatgatcagcaaagagaaggatcattctttggccagattaaagtggaagaatgttttcatggtgaaaatcagtattcaaaatcaagtgagttccagacccataatgtccaaatgagactggaggaagtacagaatatgaatagtagaaattccccttatagtcagaccgtaaaatcaagtgcatgcaaaatacaggtttcttgttcaaacaatacacacttagtttcagagaataaagaacagactatacatcctgaactttttgcaggaaacaagacccaaaatttgcatcacatgcaatattttccaaataatgtgatcccaaagcaagatcttcttcacaggtgctttcaagaacaggagcagaagtcacaacaagcttcagttctacagggatataaaagtagaaaccaagatatgtctggtcaacaagctgcgcaacttgctcagcaaaggtacttgatacataaccaagcaaatgtttttcctgtgcctgacaagggaggaagtcacactcagacccctccccagaaggacattcaaaagcatgctgctctaaggtggcatctcttacacaagcaagaacagcagcaaacacagcaaccccaaagtgagtcttgccatagtcagatgcacaggccagttaaggtggaacctggatccatgccacatg

SEQ ID NO: 30475 - DNA, 609 bp, Macaca Mulatta
  misc_feature (1)...(609): n = A,T,C or G
gggggttcctggcaccctgtacatccttagccatagcttacaagtgaacagctggttgtgatggcaggaggccctcccaacaccaaggcagagatggaaatgtccctgacagaagaactgaatcatggacgccaagggcaaaaccaagagcacctggtgatagcggaaatgatggagcatggatctcggtccctgggtgcctcccagaagaggcagaagttggaacaaaaagctgctggctcggcttcagcgaaacgagtttggaatatgactgccacccgatccaagaaaatggggtcccagctgccaatgcccagaatgctgagagaatcaggccatggggatgcccatctccaggagtaccctggcaatttccaaggcatgcgtttccattatgatcgcaacccaggtacagatgcagtggcacagactagcctggaagagctcaatgtactggagatggaagtcatgagaagacagctatatgcagtcaaccggcgtctgcgcgccctggaggagcagggcgccacctgtgcgccagagggagaccctgatcatcgccgtgctggtgtcagccagcatagccaacctgtggctgtggatgaacan

SEQ ID NO: 30476 - DNA, 179 bp, Macaca Mulatta
ttatagaatgcacacttctcttcaccttttaataaatctcagtgaatggatgggagtggacatatgtttcgaatatggggaccctgaagactttttagaatgaaataaagatctttaattcaagaagtgttcactgaaggcttattacaggcaaacctcattgggtttgccaagatgat

SEQ ID NO: 30477 - DNA, 524 bp, Macaca Mulatta
agagtggtattattatgggcaaataatcatattcccagttcaacgattaggttaataaagaaccagataattaattagttactttttaaatcttgcaattgtatgtgtgattatggagttttgaaaacattacattttttaaatcttaaaactgaaaacttgtttttagtgtttctatttcttagctgaactgctaattcaagtgaggaatatgatgaaataaaagcattaactacagacatttaaaatagtaatgattaattaggtgagaaatctattacaggaatgtgacttttccttcttttaggggtgtacatctctaaaagctttttacttgactatttgtttttcaacatttgaaaaatacttaagttccctgtgtatccatgaaaattctgcatagattttgacattccataattttaacctcctaaagctaaattcaatagctcggaaaccattctttctaagttactttttttcccagggaaaatggaaataagcaaaatataatgttttaagaa

SEQ ID NO: 30478 - DNA, 72 bp, Macaca Mulatta
agagaaaggatgagtgcctctcgagaagtgcagccagtagaacctgaaaactgccgccttattgaggaactt

SEQ ID NO: 30479 - DNA, 658 bp, Macaca Mulatta
  misc_feature (1)...(658): n = A,T,C or G
gggaaattgttgcctactcttcaatgattttgtttacatcccttaatcatgaaagaatgaaagaactggaagaaaacctcaatattgcaattgatgtcatagatgcttaccaaaaacatcctgaatcagaatggccggtcttgattattacagacctctttctgaaaagcccggaattggtacaagccatgtttcccaaactgaacaatcaagaaagagttacactgttagaccttatgatagccaagataacgagtgatgagccactcaccacggatgacatccctgtgtttttgcggcatgctgagttgattgcaagcacctttgtggatcagtgcaagacagtgctcaagttggcctctgaggagcctcctgatgatgaggaggcactggctacgattaggcttctcgatgtcctgtgtgaaatgactgcgaatactgagctgctcggctatctgcaggttttccctggcttgctggaaagagtgattgatcttttacgggtgattcatgntactggaaaagaaacccacaacatcttcagtaattgtggttgtgtgagagcagaaggtgatatctccnatgtggccgaagggtttaagtctcatcttattcgtctgattggaaatctgtgttacaagataaagataacaagaca

SEQ ID NO: 30480 - DNA, 160 bp, Macaca Mulatta
agctccaagcgcttggtgaccctggcccggggactttcgcccgcctttctgcgcttcgggggcaaaaggaccgacttcctgcagttccagaacctgaggaacccggcgaaaagccgcgggggcccgggcccggattactatctcaaaaactatgaggatg

SEQ ID NO: 30481 - DNA, 145 bp, Macaca Mulatta
  misc_feature (1)...(145): n = A,T,C or G
naggctctcttatacttcattcatgtgatggatcacattgctgtgaaggagtatgtattagtgtattttcacacactgaccagcgaatacaatcatctggactctgacttcctgaagaaactctacgatgttgttgatgtcaagt

SEQ ID NO: 30482 - DNA, 644 bp, Macaca Mulatta
ctgggatgacactgaagtacatgttggggtaaatgcttggaagaactgggttcagtggaaaaatgccaaggaagagcagggggatctaggatgtggaggggttgaacaggcctcatctagcccacgttctgaccccttaggaagtactcaagaccatgcactctctcaagaatcctcagagccaggctgtagagtccgctctgtcaagctgaaggaagatattctgtcctgcacttttgctgagttgagtttgggtttatgccagttatccaagaggtgcggagaccaaatggtgaaaaatatgatccagacagtatcttatacttgtgccttggaattcaacagtacctgtttgaaaatggtagaatagataacatttttactgagccctattccagatttatgattgaacttaccaaactcttgaaaatatgggaacctacaatacttcctaatggttacatgttctctcgcattgaagaagagcatttgtgggagtgcaaacagctgggcgcttactcgccaatcgtccttttaaacaccctccttttcttcaataccaaatacttccaactaaagaatgttactgagcacttgaagctttcctttgcccatgtgatgagacggaccaggactctgaagta

SEQ ID NO: 30483 - DNA, 3372 bp, Macaca Mulatta
  misc_feature (1)...(3372): n = A,T,C or G
ggccagtcacccagccctaccttcattccccgctccgctcagcccatcacctttaccttcgcctctttcgctgccaccaaatttggctccactaagatgaagaagggtggcggggcagcaagtggtgggtttgtagccagcagtggggcaggtggccagcagccaccacagcagcctcgcatggcccgttcacccaccaacagcctgctgaagcacaagagcctctctctgtctatgcattcactgaacttcatcacggccaacccagcccctcagtcccagctctcgcccaatgccaaggagttcgtgtacaacggtggtggctcgcccagcctcttcttcgatgcggccgatggccagggcagnnnnnnnnnnnnnnnnnnnnnngcagtggggctggcacctgcaacagcagcagctttgacatggcccaggtatttggaggtggtgccaacagcctcttcctggagaagacaccctttgtggaaggcctcagctacaacctgaacaccatgcagtatcccagccagccgttccagcccgtggtgctggccaactgaccgtctacctgcctgtggggccagaagcacccaagaccacagaaaagagaaagnnnnnnnnnnnnnnnnnnnnnnnnnnnnnnnnnnnnnnnnnnnnnnnnnnnnnnnnnnnnnnnnnnnnnnnnnnnnnnnnnnnnnnnnnnnnnnnnnnnnnnnnnnnnnnnnnnnnnnnnnnnnnnnnnnnnnnnnnnnnnnnnnnnnnnnnnnnnnnnnnnnnnnnnnnnnnnnnnnnnnnnnnnnnnnnnnnnnnnnnnnnnnnnnnnnnnnnnnnnnnnnnnnnnnnnnnnnnnnnnnnnnnnnnnnnnnnnnnnnnnnnnnnnnnnnnnnnnnnnnnnnnnnnnnnnnnnnnnnnnnnnnnnnnnnnnnnnnnnnnnnnnnnnnnnnnnnnnnnnnnnnnnnnnnnnnnnnnnnnnnnnnnnnnnnnnnnnnnnnnnnnnnnnnnnnnnnnnnnnnnnnnnnnnnnnnnnnnnnnnnnnnnnnnnnnnnnnnnnnnnnnnnnnnnnnnnnnnnnnnnnnnnnnnnnnnnnnnnnnnnnnnnnnnnnnnnnnnnnnnnnnnnnnnnnnnnnnnnnnnnnnnnnnnnnnnnnnnnnnnnnnnnnnnnnnnnnnnnnnnnnnnnnnnnnnnnnnnnnnnnnnnnnnnnnnnnnnnnnnnnnnnnnnnnnnnnnnnnnnnnnnnnnnnnnnnnnnnnnnnnnnnnnnnnnnnnnnnnnnnnnnnnnnnnnnnnnnnnnnnnnnnnnnnnnnnnnnnnnnnnnnnnnnnnnnnnnnnnnnnnnnnnnnnnnnnnnnnnnnnnnnnnnnnnnnnnnnnnnnnnnnnnnnnnnnnnnnnnnnnnnnnnnnnnnnnnnnnnnnnnnnnnnnnnnnnnnnnnnnnnnnnnnnnnnnnnnnnnnnnnnnnnnnnnnnnnnnnnnnnnnnnnnnnnnnnnnnnnnnnnnnnnnnnnnnnnnnnnnnnnnnnnnnnnnnnnnnnnnnnnnnnnnnnnnnnnnnnnnnnnnnnnnnnnnnnnnnnnnnnnnnnnnnnnnnnnnnnnnnnnnnnnnnnnnnnnnnnnnnnnnnnnnnnnnnnnnnnnnnnnnnnnnnnnnnnnnnnnnnnnnnnnnnnnnnnnnnnnnnnnnnnnnnnnnnnnnnnnnnnnnnnnnnnnnnnnnnnnnnnnnnnnnnnnnnnnnnnnnnnnnnnnnnnnnnnnnnnnnnnnnnnnnnnnnnnnnnnnnnnnnnnnnnnnnnnnnnnnnnnnnnnnnnnnnnnnnnnnnnnnnnnnnnnnnnnnnnnnnnnnnnnnnnnnnnnnnnnnnnnnnnnnnnnnnnnnnnnnnnnnnnnnnnnnnnnnnnnnnnnnnnnnnnnnnnnnnnnnnnnnnnnnnnnnnnnnnnnnnnnnnnnnnnnnnnnnnnnnnnnnnnnnnnnnnnnnnnnnnnnnnnnnnnnnnnnnnnnnnnnnnnnnnnnnnnnnnnnnnnnnnnnnnnnnnnnnnnnnnnnnnnnnnnnnnnnnnnnnnnnnnnnnnnnnnnnnnnnnnnnnnnnnnnnnnnnnnnnnnnnnnnnnnnnnnnnnnnnnnnnnnnnnnnnnnnnnnnnnnnnnnnnnnnnnnnnnnnnnnnnnnnnnnnnnnnnnnnnnnnnnnnnnnnnnnnnnnnnnnnnnnnnnnnnnnnnnnnnnnnnnnnnnnnnnnnnnnnnnnnnnnnnnnnnnnnnnnnnnnnnnnnnnnnnnnnnnnnnnnnnnnnnnnnnnnnnnnnnnnnnnnnnnnnnnnnnnnnnnnnnnnnnnnnnnnnnnnnnnnnnnnnnnnnnnnnnnnnnnnnnnnnnnnnnnnnnnnnnnnnnnnnnnnnnnnnnnnnnnnnnnnnnnnnnnnnnnnnnnnnnnnnnnnnnnnnnnnnnnnnnnnnnnnnnnnnnnnnnnnnnnnnnnnnnnnnnnnnnnnnnnnnnnnnnnnnnnnnnnnnnnnnnnnnnnnnnnnnnnnnnnnnnnnnnnnnnnnnnnnnnnnnnnnnnnnnnnnnnnnnnnnnnnnnnnnnnnnnnnnnnnnnnnnnnnnnnnnnnnnnnnnnnnnnnnnnnnnnnnnnnnnnnnnnnnnnnnnnnnnnnnnnnnnnnnnnnnnnnnnnnnnnnnnnnnnnnnnnnnnnnnnnnnnnnnnnnnnnnnnnnnnnnnnnnnnnnnnnnnnnnnnnnnnnnnnnnnnnnnnnnnnnnnnnnnnnnnnnnnnnnnnnnnnnnnnnnnnnnnnnnnnnnnnnnnnnnnnnnnnnnnnnnnnnnnnnnnnnnnnnnnnnnnnnnnnnnnnnnnnnnnnnnnnnnnnnnnnnnnnnnnnnnnnnnnnnnnnnnnnnnnnnnnnnnnnnnnnnnnnnnnnnnnnnnnnnnnnnnnnnnnnnnnnnnnnnnnnnnnnnnnnnnnnnnnnnnnnnnnnnnnnnnnnnnnnnnnnnnnnnnnnnnnnnnnnnnnnnnnnnnnnnnnnnnnnnnnnnnnnnnnnnnnnnnnnnnnnnnnnnnnnnnnnnnnnnnnnnnnnnnnnnnnnnnnnnnnnnnnnnnnnnnnnnnnnnnnnnnnnnnnnnnnnnnnnnnnnnnnnnnnnnnnnnnnnnnnnnnnnnnnnnnnnnnnnnnaggcaagcctggagaggagcccggggagcacgtttatgaacttttttctttagtgaaggaggaatacaatcaccgtttttgtattcagaatgttgtgcaatattttggaatgggacattggtgtgtttagagattttagtttnnnnnnnnnnnnnnnnattgatcaaatctgtacagtttctattgttccagattttttaagtttgtattaaaagcatgatatataa

SEQ ID NO: 30484 - DNA, 1318 bp, Macaca Mulatta
  misc_feature (1)...(1318): n = A,T,C or G
ggcatctgggggctgaacgaggaggagcggctgatccggcacctgtttcaagagaagggctacaacaaggagctccggcccgtggcacacaaagaggagagtgtggacgtcaccctggccctcacgctctccaacctcatctccctnnnnnnnnnnnnnnnnnnnnnnnnnnnnnnnnnnnnnnnnnnnnnnnnnnnnnnnnnnnnnnnnnnnnnnnnnnnnnnnnnnnnnnnnnnnnnnnnnnnnnnnnnnnnnnnnnnnnnnnnnnnnnnnnnnnnnnnnnnnnnnnnnnnnnnnnnnnnnnnnnnnnnnnnnnnnnnnnnnnnnnnnnnnnnnnnnnnnnnnnnnnnnnnnnnnnnnnnnnnnnnnnnnnnnnnnnnnnnnnnnnnnnnnnnnnnnnnnnnnnnnnnnnnnnnnnnnnnnnnnnnnnnnnnnnnnnnnnnnnnnnnnnnnnnnnnnnnnnnnnnnnnnnnnnnnnnnnnnnnnnnnnnnnnnnnnnnnnnnnnnnnnnnnnnnnnnnnnnnnnnnnnnnnnnnnnnnnnnnnnnnnnnnnnnnnnnnnnnnnnnnnnnnnnnnnnnnnnnnnnnnnnnnnnnnnnnnnnnnnnnnnnnnnnnnnnnnnnnnnnnnnnnnnnnnnnnnnnnnnnnnnnnnnnnnnnnnnnnnnnnnnnnnnnnnnnnnnnnnnnnnnnnnnnnnnnnnnnnnnnnnnnnnnnnnnnnnnnnnnnnnnnnnnnnnnnnnnnnnnnnnnnnnnnnnnnnnnnnnnnnnnnnnnnnnnnnnnnnnnnnnnnnnnnnnnnnnnnnnnnnnnnnnnnnnnnnnnnnnnnnnnnnnnnnnnnnnnnnnnnnnnnnnnnnnnnnnnnnnnnnnnnnnnnnnnnnnnnnnnnnnnnnnnnnnnnnnnnnnnnnnnnnnnnnnnnnnnnnnnnnnnnnnnnnnnnnnnnnnnnnnnnnnnnnnnnnnnnnnnnnnnnnnnnnnnnnnnnnnnnnnnnnnnnnnnnnnnnnnnnnnnnnnnnnnnnnnnnnnnnnnnnnnnnnnnnnnnnnnnnnnnnnnnnnnnnnnnnnnnnnnnnnnnnnnnnnnnnnnnnnnnnnnnnnnnnnnnnnnnnnnnnnnnnnnnnnnnnnnnnnnnnnnnnnnnnnnnnnnnnnnnnnnnnnnnnnnnnnnnnnnnnnnnnnnnnnnnnnnnnnnnnnnnnnnnnnnnnnnnnnncagcaagctctgagcaggcccagcaggaactccttatgagctgaagccagctgtggatggggcaaacttcattgttaaccacatgagggaccagaacaattacaatgagg

SEQ ID NO: 30485 - DNA, 344 bp, Macaca Mulatta
gatcacttcctataaggacaatggtagacattttataaagatgttttttcacacagattaattactgggacaaaagtaatttggaagcccagttccttaggtgggataggaatgaaagcctaaaactcttcctttagctttgttcctattacttgcaacttcccatatttatgtgccttttgtctatttataatgccactggaagaggagggagaactttttctgttatttgatttcttttataaactgtgtgaggttttagaagctacaaacactacaaggcttggaggggtctgtgcctgaagctcagcagtgtgggtcagacagtctaaagatcctaaaga

SEQ ID NO: 30486 - DNA, 2881 bp, Macaca Mulatta
  misc_feature (1)...(2881): n = A,T,C or G
agtgctgccagatcctggtagtaaatggcgcggagctggacgtccgcgaccgcgacgggtacacggccgccgacctgtcggacttcaacggccacagccactgcacccgctacctgcgcactgtggagaacctnnnnnnnnnnnnnnnnnnnnnnnnnnnnnnnnnnnnnnnnnnnnnnnnnnnnnnnnnnnnnnnnnnnnnnnnnnnnnnnnnnnnnnnnnnnnnnnnnnnnnnnnnnnnnnnnnnnnnnnnnnnnnnnnnnnnnnnnnnnnnnnnnnnnnnnnnnnnnnnnnnnnnnnnnnnnnnnnnnnnnnnnnnnnnnnnnnnnnnnnnnnnnnnnnnnnnnnnnnnnnnnnnnnnnnnnnnnnnnnnnnnnnnnnnnnnnnnnnnnnnnnnnnnnnnnnnnnnnnnnnnnnnnnnnnnnnnnnnnnnnnnnnnnnnnnnnnnnnnnnnnnnnnnnnnnnnnnnnnnnnnnnnnnnnnnnnnnnnnnnnnnnnnnnnnnnnnnnnnnnnnnnnnnnnnnnnnnnnnnnnnnnnnnnnnnnnnnnnnnnnnnnnnnnnnnnnnnnnnnnnnnnnnnnnnnnnnnnnnnnnnnnnnnnnnnnnnnnnnnnnnnnnnnnnnnnnnnnnnnnnnnnnnnnnnnnnnnnnnnnnnnnnnnnnnnnnnnnnnnnnnnnnnnnnnnnnnnnnnnnnnnnnnnnnnnnnnnnnnnnnnnnnnnnnnnnnnnnnnnnnnnnnnnnnnnnnnnnnnnnnnnnnnnnnnnnnnnnnnnnnnnnnnnnnnnnnnnnnnnnnnnnnnnnnnnnnnnnnnnnnnnnnnnnnnnnnnnnnnnnnnnnnnnnnnnnnnnnnnnnnnnnnnnnnnnnnnnnnnnnnnnnnnnnnnnnnnnnnnnnnnnnnnnnnnnnnnnnnnnnnnnnnnnnnnnnnnnnnnnnnnnnnnnnnnnnnnnnnnnnnnnnnnnnnnnnnnnnnnnnnnnnnnnnnnnnnnnnnnnnnnnnnnnnnnnnnnnnnnnnnnnnnnnnnnnnnnnnnnnnnnnnnnnnnnnnnnnnnnnnnnnnnnnnnnnnnnnnnnnnnnnnnnnnnnnnnnnnnnnnnnnnnnnnnnnnnnnnnncagcccgattcaccgctgccgtctgtgtcacctgcactgtcaccagtccggagccccacaccgccagctgcggggtttcagccgctgctcaatggaagcttggttccggtgccgcccactactcctgcgccgggcgtgcagctggacgtggaggcgctcatccccacgcacgatgagcagggccggcccatccccgagtggaagcgccaggtgatggtgcgcaagctgcagctgaagatgcaggaggaggaggagcagaggcggaannnnnnnnnnnnnnnnnnnnnnnnnnnnnnnnnnnnnnnnnnnnnnnnnnnnnnnnnnnnnnnnnnnnnnnnnnnnnnnnnnnnnnnnnnnnnnnnnnnnnnnnnnnnnnnnnnnnnnnnnnnnnnnnnnnnnnnnnnnnnnnnnnnnnnnnnnnnnnnnnnnnnnnnnnnnnnnnnnnnnnnnnnnnnnnnnnnnnnnnnnnnnnnnnnnnnnnnnnnnnnnnnnnnnnnnnnnnnnnnnnnnnnnnnnnnnnnnnnnnnnnnnnnnnnnnnnnnnnnnnnnnnnnnnnnnnnnnnnnnnnnnnnnnnnnnnnnnnnnnnnnnnnnnnnnnnnnnnnnnnnnnnnnnnnnnnnnnnnnnnnnnnnnnnnnnnnnnnnnnnnnnnnnnnnnnnnnnnnnnnnnnnnnnnnnnnnnnnnnnnnnnnnnnnnnnnnnnnnnnnnnnnnnnnnnnnnnnnnnnnnnnnnnnnnnnnnnnnnnnnnnnnnnnnnnnnnnnnnnnnnnnnnnnnnnnnnnnnnnnnnnnnnnnnnnnnnnnnnnnnnnnnnnnnnnnnnnnnnnnnnnnnnnnnnnnnnnnnnnnnnnnnnnnnnnnnnnnnnnnnnnnnnnnnnnnnnnnnnnnnnnnnnnnnnnnnnnnnnnnnnnnnnnnnnnnnnnnnnnnnnnnnnnnnnnnnnnnnnnnnnnnnnnnnnnnnnnnnnnnnnnnnnnnnnnnnnnnnnnnnnnnnnnnnnnnnnnnnnnnnnnnnnnnnnnnnnnnnnnnnnnnnnnnnnnnnnnnnnnnnnnnnnnnnnnnnnnnnnnnnnnnnnnnnnnnnnnnnnnnnnnnnnnnnnnnnnnnnnnnnnnnnnnnnnnnnnnnnnnnnnnnnnnnnnnnnnnnnnnnnnnnnnnnnnnnnnnnnnnnnnnnnnnnnnnnnnnnnnnnnnnnnnnnnnnnnnnnnnnnnnnnnnnnnnnnnnnnnnnnnnnnnnnnnnnnnnnnnnnnnnnnnnnnnnnnnnnnnnnnnnnnnnnnnnnnnnnnnnnnnnnnnnnnnnnnnnnnnnnnnnnnnnnnnnnnnnnnnnnnnnnnnnnnnnnnnnnnnnnnnnnnnnnnnnnnnnnnnnnnnnnnnnnnnnnnnnnnnnnnnnnnnnnnnnnnnnnnnnnnnnnnnnnnnnnnnnnnnnnnnnnnnnnnnnnnnnnnnnnnnnnnnnnnnnnnnnnnnnnnnnnnnnnnnnnnnnnnnnnnnnnnnnnnnnnnnnnnnnnnnnnnnnnnnnnnnnnnnnnnnnnnnnnnnnnnnnnnnnnnnnnnnnnnnnnnnnnnnnnnnnnnnnnnnnnnnnnnnnnnnnnnnnnnnnnnnnnnnnnnnnnnnnnnnnnnnggcgcggctggagcgacgccttcgaggacctcaggcaccggttcttcgggaatggcctgcaggctgagccagccccagaagaacaggagaagaaaaaggaagagaaagaacgagagctaaccgaagaggccgctccagttcagacaggggt

SEQ ID NO: 30487 - DNA, 630 bp, Macaca Mulatta
  misc_feature (1)...(630): n = A,T,C or G
ggggaggcgaccggctccgcagcaagatggcggacgagaaagacagggaagagataatagtagcagaatttcacaaaaaaatcaaggaagcatttgaagtgtttgaccatgagtcgaataatacagtggatgtgagagagattggaacaattatcaggtcattaggatgctgccctactgaaggagagctgcatgatctgattgcagaggtagaagaagaagaacccactggatacattcgattcgaaaaatttcttccggtgatgacagaaatactactagaaaggagatacagaccaattccagaagatgtccttcntcgagcttttgagttttagattcagctaaacgtgggtttcttactaaggatgaactgatcaagtttatgactgaaaaaggtgacccttttcccaagaagaaatggaaaaatgttttccgctgcaattgatccaaaatcaattcaattctttcaaggactttttaacaatggggggaaaaagaaaattaatgttccaaaaaaatttctatttaagggaaagttaaaaatctctcccccgtttttttccctcgaaaaaaaaaaccaggaactcgggtcctcttgggaatttaacccggggggaactttttttg

SEQ ID NO: 30488 - DNA, 2902 bp, Macaca Mulatta
  misc_feature (1)...(2902): n = A,T,C or G
gtctttggtagatgagtggctggatagctacaagcaagaccaggatgcaggatttctggagcttgttaactttttcatacgatcttgcggatgtaaaggnnnnnnnnnnnnnnnnnnnnnnnnnnnnnnnnnnnnnnnnnnnnnnnnnnnnnnnnnnnnnnnnnnnnnnnnnnnnnnnnnnnnnnnnnnnnnnnnnnnnnnnnnnnnnnnnnnnnnnnnnnnnnnnnnnnnnnnnnnnnnnnnnnnnnnnnnnnnnnnnnnnnnnnnnnnnnnnnnnnnnnnnnnnnnnnnnnnnnnnnnnnnnnnnnnnnnnnnnnnnnnnnnnnnnnnnnnnnnnnnnnnnnnnnnnnnnnnnnnnnnnnnnnnnnnnnnnnnnnnnnnnnnnnnnnnnnnnnnnnnnnnnnnnnnnnnnnnnnnnnnnnnnnnnnnnnnnnnnnnnnnnnnnnnnnnnnnnnnnnnnnnnnnnnnnnnnnnnnnnnnnnnnnnnnnnnnnnnnnnnnnnnnnnnnnnnnnnnnnnnnnnnnnnnnnnnnnnnnnnnnnnnnnnnnnnnnnnnnnnnnnnnnnnnnnnnnnnnnnnnnnnnnnnnnnnnnnnnnnnnnnnnnnnnnnnnnnnnnnnnnnnnnnnnnnnnnnnnnnnnnnnnnnnnnnnnnnnnnnnnnnnnnnnnnnnnnnnnnnnnnnnnnnnnnnnnnnnnnnnnnnnnnnnnnnnnnnnnnnnnnnnnnnnnnnnnnnnnnnnnnnnnnnnnnnnnnnnnnnnnnnnnnnnnnnnnnnnnnnnnnnnnnnnnnnnnnnnnnnnnnnnnnnnnnnnnnnnnnnnnnnnnnnnnnnnnnnnnnnnnnnnnnnnnnnnnnnnnnnnnnnnnnnnnnnnnnnnnnnnnnnnnnnnnnnnnnnnnnnnnnnnnnnnnnnnnnnnnnnnnnnnnnnnnnnnnnnnnnnnnnnnnnnnnnnnnnnnnnnnnnnnnnnnnnnnnnnnnnnnnnnnnnnnnnnnnnnnnnnnnnnnnnnnnnnnnnnnnnnnnnnnnnnnnnnnnnnnnnnnnnnnnnnnnnnnnnnnnnnnnnnnnnnnnnnnnnnnnnnnnnnnnnnnnnnnnnnnnnnnnnnnnnnnnnnnnnnnnnnnnnnnnnnnnnnnnnnnnnnnnnnnnnnnnnnnnnnnnnnnnnnnnnnnnnnnnnnnnnnnnnnnnnnnnnnnnnnnnnnnnnnnnnnnnnnnnnnnnnnnnnnnnnnnnnnnnnnnnnnnnnnnnnnnnnnnnnnnnnnnnnnnnnnnnnnnnnnnnnnnnnnnnnnnnnnnnnnnnnnnnnnnnnnnnnnnnnnnnnnnnnnnnnnnnnnnnnnnnnnnnnnnnnnnnnnnnnnnnnnnnnnnnnnnnnnnnnnnnnnnnnnnnnnnnnnnnnnnnnnnnnnnnnnnnnnnnnnnnnnnnnnnnnnnnnnnnnnnnnnnnnnnnnnnnnnnnnnnnnnnnnnnnnnnnnnnnnnnnnnnnnnnnnnnnnnnnnnnnnnnnnnnnnnnnnnnnnnnnnnnnnnnnnnnnnnnnnnnnnnnnnnnnnnnnnnnnnnnnnnnnnnnnnnnnnnnnnnnnnnnnnnnnnnnnnnnnnnnnnnnnnnnnnnnnnnnnnnnnnnnnnnnnnnnnnnnnnnnnnnnnnnnnnnnnnnnnnnnnnnnnnnnnnnnnnnnnnnnnnnnnnnnnnnnnnnnnnnnnnnnnnnnnnnnnnnnnnnnnnnnnnnnnnnnnnnnnnnnnnnnnnnnnnnnnnnnnnnnnnnnnnnnnnnnnnnnnnnnnnnnnnnnnnnnnnnnnnnnnnnnnnnnnnnnnnnnnnnnnnnnnnnnnnnnnnnnnnnnnnnnnnnnnnnnnnnnnnnnnnnnnnnnnnnnnnnnnnnnnnnnnnnnnnnnnnnnnnnnnnnnnnnnnnnnnnnnnnnnnnnnnnnnnnnnnnnnnnnnnnnnnnnnnnnnnnnnnnnnnnnnnnnnnnnnnnnnnnnnnnnnnnnnnnnnnnnnnnnnnnnnnnnnnnnnnnnnnnnnnnnnnnnnnnnnnnnnnnnnnnnnnnnnnnnnnnnnnnnnnnnnnnnnnnnnnnnnnnnnnnnnnnnnnnnnnnnnnnnnnnnnnnnnnnnnnnnnnnnnnnnnnnnnnnnnnnnnnnnnnnnnnnnnnnnnnnnnnnnnnnnnnnnnnnnnnnnnnnnnnnnnnnnnnnnnnnnnnnnnnnnnnnnnnnnnnnnnnnnnnnnnnnnnnnnnnnnnnnnnnnnnnnnnnnnnnnnnnnnnnnnnnnnnnnnnnnnnnnnnnnnnnnnnnnnnnnnnnnnnnnnnnnnnnnnnnnnnnnnnnnnnnnnnnnnnnnnnnnnnnnnnnnnnnnnnnnnnnnnnnnnnnnnnngttctacaatgactatggtgacattatcaaggaaacattaactagagcaaggcagattgaccgaagtcattgttcccgaatcctgctgctgagcctcaagcagnnnnnnnnnnnnnnnnnnnnnnnnnnnnnnnnnnnnnnnnnnnnnnnnnnnnnnnnnnnnnnnnnnnnnnnnnnnnnnnnnnnnnnnnnnnnnnnnnnnnnnnnnnnnnnnnnnnnnnnnnnnnnnnnnnnnnnnnnnnnnnnnnnnnnnnnnnnnnnnnnnnnnnnnnnnnnnnnnnnnnnnnnnnnnnnnnnnnnnnnnnnnnnnnnnnnnnnnnnnnnnnnnnnnnnnnnnnnnnnnnnnnnnnnnnnnnnnnnnnnnnnnnnnnnnnnnnnnnnactgtcctacctagaaaagtgcctgcagcaagtctcccaggcacctggccgtccctggggcccagtcaccacctactgccactccctcagccctgtggagaacacagcagagaccagccctcaggtcctccccagctccaaaaggaggcgtgttgaag

SEQ ID NO: 30489 - DNA, 298 bp, Macaca Mulatta
acaaaagttgttgccttcctaagaaccttctttaataaactcattttaaaactctgagtagtaactggtgatactattaaggtagcaatatgaagatactagataatgcgttttctcatttcctttgcaaggaagatgatgctctttcagaatgcttaatttcaataaagtcatgttagttttgcaactttacctgatgaaagcatcagcaggggcaaaaccaaattctggatggaattttattaagaaaatcccttgctttttaaaatacaaaaccaaagttaatcattggtataaa

SEQ ID NO: 30490 - DNA, 93 bp, Macaca Mulatta
ggtgtctccagtgaaaatctgtgactttgacttgggcagtggggtgaaactgaacaactcctgcacccccataaccacaccggagctgaccac

SEQ ID NO: 30491 - DNA, 254 bp, Macaca Mulatta
gcccaccccagccagaccagggcctcccgccaccccttgcagctgtcccggtcccctggaagagcacggacccctgccaaggccacagggagtccccaggagccctggtggagacctctgcaggggaggaggcccaaggccaggagggccctgcagccacccagctggacgtgttgcgcctgcgcagctcttccatggagatccgagagaagggctctgagttcctgaaggaggagctgcacagagcgcagaag

SEQ ID NO: 30492 - DNA, 321 bp, Macaca Mulatta
gtctcctggagggggcataattgggtaaattttctgccaaataaggtaccttctggtgatgtgcatgaaggcacttgtctgtgttagaggaatatctgggcctgcctgatgtgaaatatttggttttatgcatttcctcaaacaccgactgctcttcaggcactttcgaaccatatttccttttctcacaatccactatagtgatctgatccattagaaagctgccctaggaagagctgcattacgcaaacaccgaagataattaattttatttagaacagaatagaatagcagaaagtacgtatctaaaactaaaattta

SEQ ID NO: 30493 - DNA, 669 bp, Macaca Mulatta
gggggcgccctctgagccgctcggttgacaccaggctctctagtaggcctggcctacccagaaacagcaggagaaagaaacaggccagctgtgagaagtcaaggacaccgagtcagtcatggcacctaaggcagcaaaaggggccaagacagagccagctccacctccagccggggccaaaccccaggaggacaagaaggacgataaggagccattggacaaacctcaaaagttggtgcagcccaagcacgaaggggcacgctgaggtcaagattctgagtttgggctgcctaatagcggcaatgatactgttgtcctcactcagcgtgcaccccatcctgacgcttatcatcaccatggagatatccatcttcagtttcttcatcatactgtacagctttgccgttcatagatacatacccttcatcctgtggcccatttctgacctcttcaacgacctgtttgcctgtgcgttcctggtgggagccgtggtctttgctgtgaaaagtcggcgatccatgcatctccactacttacttgctgtgatccttggtggtggtggctggagtttttgctttgatcaaaatgtgtcttcaaagaacacttccaaggcaaaaggccaaaagcttaacctgatttctctccggcaaaaaaaaacccccgcaggag

SEQ ID NO: 30494 - DNA, 860 bp, Macaca Mulatta
  misc_feature (1)...(860): n = A,T,C or G
ggattcaggggcggccggctttgttgggtgtgcttggtttggtgtccctgcggctgaccgtgattggtgattcgcagcatcttcgtaaccgctaacaggtcaaaatgcagatcttcgtgaagaccctgaccggcaagaccatcacccttgaggtggagcccagnnnnnnnnnnnnnnnnnnnnnnnnnnnnnnnnnnnnnnnnnnnnnnnnnnnnnnnnnnnnnnnnnnnnnnnnnnnnnnnnnnnnnnnnnnnnnnnnnnnnnnnnnnnnnnnnnnnnnnnnnnnnnnnnnnnnnnnnnnnnnnnnnnnnnnnnnnnnnnnnnnnnnnnnnnnnnnnnnnnnnnnnnnnnnnnnnnnnnnnnnnnnnnnnnnnnnnnnnnnnnnnnnnnnnnnnnnnnnnnnnnnnnnnnnnnnnnnnnnnnnnnnnnnnnnnnnnnnnnncatcccctccccgaaccaacagaagcttttcctttgccaggcaagccagcttgaaataatggccccacctcttttctaaattacaacattcaataaaggaatccaacccctgccccctggatcctgccccctgaaaagggtggtattccaaattttttccttgaaaaaccccctggaaccgggcaaaaaccactcctcccttggaaggttggagaccccaatgtgaccccattcctaaaaaattgtggaaggcccaataatccccagaaataaaaaaaggggcttcccccttcccgaaacagagagaaaggctctcttcttttttccagtgcaaaccaaacttggataaaaagggcccccctttttctttttgagataacaactttcccaaaatggagtgtcaaccccttgacctctg

SEQ ID NO: 30495 - DNA, 277 bp, Macaca Mulatta
  misc_feature (1)...(277): n = A,T,C or G
tggcccccgagatggaccagttctacaggtccaccatggccatctacaagnnnnnnnnnnnnnnnnnnnnnnnnnnnnnnnnnnnnnnnnnnnnnnnnnnnnnnnnnnnnnnnnnnnnnnnnnnnnnnnnnnnnnnnnnnnnnnnnnnnnnnnnnnnnnnnnnnnnnnnnnnnnnnnnnnnnnnnnnnnnnnnnnnnnnnnnnnnnnnnnnnggggagatcttggtgcagatgtctgacacccagcggcacctgaactctgacctggaggtggtggt

SEQ ID NO: 30496 - DNA, 1309 bp, Macaca Mulatta
  misc_feature (1)...(1309): n = A,T,C or G
cctgaagatcacaactggcacttccccaaagctctcaccaatggcagtttctccccctcggggaataacggctctgtgaactggaggacgggaagcttccacggccctggccacatcagcctcaggagggaaaacagcagcgacaaccccaaggaactgaagaggcgcaattcttccagctccatgagcagccgcctgagcatctatgacaacgtgccgggctccatcctctactccagttcaggggacctggcagatctggagaatgaggacatcttccccgagctggacgacatcctctaccacgtgaaggggatgcagcggatagtcaatcagtggtcggagaagttttctgatgagggagattcggactcagccctggactcggtctctccctgcccatcctctccaaaacagatacacctggatgtggacaacgaccgaaccacacccagcgacttggacagcacaggcaactccctgaatgaaccggaagagccctctgacatcccggaaaggagggattctggggttggggcttccctaaccaggtccaacagnnnnnnnnnnnnnnnnnnnnnnnnnnnnnnnnnnnnnnnnnnnnnnnnnnnnnnnnnnnnnnnnnnnnnnnnnnnnnnnnnnnnnnnnnnnnnnnnnnnnnnnnnnnnnnnnnnnnnnnnnnnnnnnnnnnnnnnnnnnnnnnnnnnnnnnnnnnnnnnnnnnnnnnnnnnnnnnnnnnnnnnnnnnnnnnnnnnnnnnnnnnnnnnnnnnnnnnnnnnnnnnnnnnnnnnnnnnnnnnnnnnnnnnnnnnnnnnnnnnnnnnnnnnnnnnnnnnnnnnnnnnnnnnnnnnnnnnnnnnnnnnnnnnnnnnnnnnnnnnnnnnnnnnnnnnnnnnnnnnnnnnnnnnnnnnnnnnnnnnnnnnnnnnnnnnnnnnnnnnnnnnnnnnnnnnnnnnnnnnnnnnnnnnnnnnnnnnnnnnnnnnnnnnnnnnnnnnnnnnnnnnnnnnnnnnnnnnnnnnnnnnnnnnnnnnnnnnnnnnnnnnnnnnnnnnnnnnnnnnnnnnnnnnnnnnnnnnnnnnnnnnnnnnnnnnnnnntgtgcccaaggaccagcgcctgcaggccatcaaggctgccatcatgctgctgcctgacaagaaccgggaggttctgtagaccctgctttatttcttgagcgatgtcacagcagccataagagaaaacctgatgaccccaaccaacctggccatgtgcttagcgccttccctcttccctctcaacaccctgaagagagagaattcctctcccagn

SEQ ID NO: 30497 - DNA, 201 bp, Macaca Mulatta
atgttcattgaatggatgcattttttccttttaattttaatatattcttgtatacatcacacatattagaaattctaaaaatacttattctgtggccaatttgtcttctgttgtgatttttacatatttagaatggtattgcttttattattgtaatccaatcttacagatttggaaaatgtttaaattgcaggacaatat

SEQ ID NO: 30498 - DNA, 481 bp, Macaca Mulatta
  misc_feature (1)...(481): n = A,T,C or G
agctcaccgcccaggatggagtcatctttaagcaagatggtctcgtgcacagcctcttcatcgcgcgcgtgcaggggacccaagccgggaggtacacttttgtagctggtgaccagcagagtgaggccactctgaccgtccaggngattcccctaccattgctccagatgtgacagagaaactgagagagccactggtggtcaaggctgggaagccggtgacagtgaagatccccttccagagccacctccccgttcaggctgcctggagaaaggacggggccaaggtggtgggcagtggtgacaaggaggcccaggtggacctgggggaccgctacacacggctgtgcctccccagcacaggcaggaaggacagtggccagtacagtgtgacgctgaggagtgagggaggctctgtgcaggccgagctcaccctgaaagtcataggtaccaaccccatctcccccaaccaaggcctgaga

SEQ ID NO: 30499 - DNA, 457 bp, Macaca Mulatta
ggttcgggctccccacccaggcgcttgctgccccgtcaggttagccactctgcgctccatctgcccaacaccagccttggcccctgtgagccgggagctcagcggggaggtccaggcctctgtggagcagctgccctggggagggaggggccttttgcccctgcagcacccatgaccctgctctgtcttggcttctcggcagttacaacaccatcacccagcaggtggacgcccactgcggctgctgccgccccctccactcctatgagcagcaggtggagctgccctgcccagaccccagcgcgcctggccggcagctcgtactcaccctgcaggtgttcagccgctgcgagtgcagctctgtggcctgtggagcctagcagggtcgctgcccgctctcctggggctgaaggactgcagatgaccgacaggacaaacacccgccggcccccctccc

SEQ ID NO: 30500 - DNA, 767 bp, Macaca Mulatta
  misc_feature (1)...(767): n = A,T,C or G
tgcacgagcagctggccgccctgntcgttatgccccgntaaacaaaccaaatgnnnnnnnnnnnnnnnnnnnnnnnnnnnnnnnnnnnnnnnnnntaannnnnnnnnnnnnnnnnnncacaaggtgaaggccgaggaagagaagaaggccaaggtggctccgcctgccaagcaggcccagcagaagaaggctcctgccaagaaggccaacagcacgaccgtggccggcagacagctgaagaaaggcagcaagcaggcatctgcctcctacgactcggaggaagaggaggaaggcctgcccatgagctacgacgaaaagcgccagcttagcctggacatcaaccggctgcccggggagaagctgggccgggtggtacacatcatccagtctcgggagccctcgctcagggactccaaccccgacgagatagaaattgaatttgagactctgaaacccaccactttgcgggaactggagagatatgtcaagtcttgtttacagaaaaagcaaaggaaaccgttctcagcaagcgggaagaaacaggcagccaagtcgaaagaggagctagctcaggaaaagaagaaggagctggaaaagcgtctgcaggacgtcagcgggcagctgagcagcagcaagaaacccggccggaaagagaaacccggctcagcaccctcaggtggcccgtccaggctcagcagcagcagctcctctgagtcttggagcagcagttccagcgggtccaggtccgacagcagcgactcagagtg

SEQ ID NO: 30501 - DNA, 1164 bp, Macaca Mulatta
  misc_feature (1)...(1164): n = A,T,C or G
gacttgcaccttcgagatcccctgtgttttcccaactggagaaggatgaacagttgtgggtgcccagctgggtggatgtgactccagtcagcagagcagaagccaggagaggttttggtcttgnnnnnnnnnnnnnnnnnnnnnnnnnnnnnnnnnnnnnnnnnnnnnnnnnnnnnnnnnnnnnnnnnnnnnnnnnnnnnnnnnnnnnnnnnnnnnnnnnnnnnnnnnnnnnnnnnnnnnnnnnnnnnnnnnnnnnnnnnnnnnnnnnnnnnnnnnnnnnnnnnnnnnnnnnnnnnnnnnnnnnnnnnnnnnnnnnnnnnnnnnnnnnnnnnnnnnnnnnnnnnnnnnnnnnnnnnnnnnnnnnnnnnnnnnnnnnnnnnnnnnnnnnnngcagccttcccacctggttccagttgtgggcaacagcaagaagtccatgtggcagagaagctgttcaaatgcagtgactgtgggaaggtgttctcaaaggccttcgccctccttgaccatctgataacgcatgctgaagacagacccttcagatgcccagcaggcagaagtgcttccaaggagaagtcaactcacattaatccccgaaaaattcgacctggagaaacagcccatgtgtgtaatgagtgtgggaaggccttctgttacccgtccaagttgaggaaacaccagaaggttcacacaggcataaaaccttttaagtgtagtgactgtgggaaaaccttcaaccgcaaagacgccctggttctacaccagaggattcacactggagaaaggccttatgagtgcagcaaatgtgggaaaaccttcagtgttctgtctaccctcattcggcaccggaaagtgcacattggagaaaggccctatgagtgtacagaatgtgggaagttctttaaatacagtaatagcttcattcttcaccagagagttcacactggagaaaggccttttgaatgcaagcaatgtgggaaagcctacgtgacccgttcaggcctctatcagcactggaaagtccacactggggaacggccctatgaatgtagcctgtgtgggaaaaccttcactaccagatcctaccgcaatcggcaccagcagttccacactgaagagaggtaaagggaatgtacagagtgtgggaaagccttcaaacatagt

SEQ ID NO: 30502 - DNA, 120 bp, Macaca Mulatta
agccgaatatgtgggagtgcatggttctgcagtgtggcctgatgtaatcaagctaccatctttcaacaccatgtagccaaagaagcaatatcgtggaaagcttaagagatgaatttgttt

SEQ ID NO: 30503 - DNA, 444 bp, Macaca Mulatta
  misc_feature (1)...(444): n = A,T,C or G
ccgtggcccctatgtgccctggggacagcagcctcgaccttcaaagagaagggccctagccaaccnccagccaaggcctcaatagatggacctaggccttatttcctctttatgaacatggattggacagatctgacacttcctttccattgcttggcctgaacagactgaccttgttaacttaagcctggagtccatgcctggtcttctttttgttcattgctgttaccaagaaagccaaggaggagcagtctgactcattcttcttggctgcagcctcttccccacttcctggggttgacccagcattattcctgcctccccactccctattctctttgcctttgtgtaaaactaaaattgaaataaagaagttgcacaaaagtagttgtgggttttgcatgtctatatttaatggatgcctctccattaaacaattagttc

SEQ ID NO: 30504 - DNA, 1015 bp, Macaca Mulatta
  misc_feature (1)...(1015): n = A,T,C or G
tccagttctccaacgggaagctacagagtccgggcaacatgcgctttaccttgtatgagaacaaagattccaccaaccccaggaagaggaatcaacggatcctggngcagctgaaacagatagactttcctatgtgggaaacaattttggtactggagccctcaaatgcaacactttgtgcaggnnnnnnnnnnnnnnnnnnnnnnnnnnnnnnnnnnnnnnnnnnnnnnnnnnnnnnnnnnnnnnnnnnnnnnnnnnnnnnnnnnnnnnnnnnnnnnnnnnnnnnnnnnnnnnnnnnnnnnnnnnnnnnnnnnnnnnnnnnnnnnnnnnnnnnnnnnnnnnnnnnnnnnnnnnnnnnnnnnnnnnnnnnnnnnnnnnnnnnnnnnnnnnnnnnnnnnnnnnnnnnnnnnnnnnnnnnnnnnnnnnnnnnnnnnnnnnnnnnnnnnnnnnnnnnnnnnnnnnnnnnnnnnnnnnnnnnnnnnnnnnnnnnnnnnnnnnnnnnnnnnnnnnnnnnnnnnnnnnnnnnnnnnnnnnnnnnnnnnnnnnnnnnnnnnnnnnnnnnnnnnnnnnnnnnnnnnnnnnnnnnnnnnnnnnnnnnnnnnnnnnnnnnnnnnnnnnnnnnnnnnnnnnnnnnnnnnnnnnnnnnnnnnnnnnnnnnnnnnnnnnnnnnnnnnnnnnnnnnnnnnnnnnnnnnnnnnnnnnnnnnnnnnnnnnnnnnnnnnnnnnnnnnnnnnnnnnnnnnnnnnnnnnnnnnnnnnnnnnnnnnnnnnnnnnnnnnnnnnnnnnnnnnnnnnnnnnnnnnnnnnnnnnnnnnnnnnnnnnnnnnnnnnnnnnnnnnnnnnnnnnnnnnnnnnnnnnnnnnnnnnnnnnnnnnnnnnnnnnnnnnnnnnnngattacggaacttaatttcggattctatgaaggcgaagattactgcatatgtgatcatacttgccttgcacatacatgacttccaaattgacctgacaatgttacagggggacttgaagctca

SEQ ID NO: 30505 - DNA, 652 bp, Macaca Mulatta
  misc_feature (1)...(652): n = A,T,C or G
ggcagaagctgaggaagattgtcattctgatactgtcagagcagaagatgatgaagaaaacgaaagtcctgctgaaacagatctgcaggcatgnnnnnnnnnnnnnnnnnnnnnnnnnnnnnnnnnnnnnnnnnnnnnnnnnnnnnnnnnnnnnnnnnnnnnnnnnnnnnnnnnnnnnnnnnnnnnnnnnnnnnnnnnnnnnnnnnnnnnnnnnnnnnnnnnnnnnnnnnnnnnnnnnnnnnnnnnnnnngctcgagaactcttcctaaaagcagtagaagaagaacaaaatggagctctctatgaannnnnnnnnnnnnnnnnnnnnnnnnnnnnnnnnnnnnnnnnnnnnnnnnnnnnnnnnnnnnnnnnnnnnnnnnnnnnnnnnnnnnnnnnnnnnnnnnnnnnnnnnnnnnnnnnnnnnnnnnnnnnnnnnnnnnnnnnnnnnnnnnnnnnnnnnnnnnnnnnnnnnnnnnnnnnnnnnnnnnnnnnnnnnnnnnnnnnnnnnnnnnnnnnnnnnnnnnnnnnnnnnnnncagtgctgccaatggaggtcttgatgtacatcttccgatgggtggtgtccagtgacctggacctcagatcattggagcagttgtcactggtatgcagaggattctacatctgtgcca

SEQ ID NO: 30506 - DNA, 1110 bp, Macaca Mulatta
  misc_feature (1)...(1110): n = A,T,C or G
aggagctcatggtgaaacggcagggaagctgcacacgggacggagccggaatgaccaggtnnnnnnnnnnnnnnnnnnnnnnnnnnnnnnnnnnnnnnnnnnnnnnnnnnnnnnnnnnnnnnnnnnnnnnnnnnnnnnnnnnnnnnnnnnnnnnnnnnnnnnnnnnnnnnnnnnnnnnnnnnnnnnnnnnnnnnnnnnnnnnnnnnnnnnnnnnnnnnnnnnnnnnnnnnnnnnnnnnnnnnnnnnnnnnnnnnnnnnnnnnnnnnnnnnnnnnnnnnnnnnnnnnnnnnnnnnnnnnnnnnnnnnnnnnnnnnnnnnnnnnnnnnnnnnnnnnnnnnnnnnnnnnnnnnnnnnnnnnnnnnnnnnnnnnnnnnnnnnnnnnnnnnnnnnnnnnnnnnnnnnnnnnnnnnnnnnnnnnnnnnnnnnnnnagttcctgttctgggcttcgctatgcatgacccatctcagcaggatggctgaagacctcatcctctactgcaccaaggaattcannnnnnnnnnnnnnnnnnnnnnnnnnnnnnnnnnnnnnnnnnnnnnnnnnnnnnnnnnnnnnnnnnnnnnnnnnnnnnnnnnnnnnnnnnnnnnnnnnnnnnnnnnnnnnnnnnnnnnnnnnnnnnnnnnnnnnnnnnnnnnnnnnnnnnnnnnnnnnnnnnnnnnnnnnnnnnnnnnnnnnnnnnnnnnnnnnnnnnnnnnnnnnnnnnnnnnnnnnnnnnnnnnnnnnnnnnnnnnnnnnnnnnnnnnnnnnnnnnnnnnnnnnnnnnnnnnnnnnnnnnnnnnnnnnnnnnnnnnnnnnnnnnnnnnnnnnnnnnnnnnnnnnnnnnnnnnnnnnnnnnnnnnnnnnnnnnnnnnnnnnnnnnnnnnnnnnnnnnnnnnnnnnnnnnnnnnnnnnnnnnnnnnnnnnnnnnnnnnnnnnnnnnnnnnnnnnnnnnnnnnnnnnnnnnnnnncagccccctgttctcaggtgacatgagccacgtgtgggactatgggcacagtgtggggcagtatcgtgccctaggtggcactgcgtgctccggcatcaacaggcagatctgccaggtgcgggcactattgcaggcacagcagg

SEQ ID NO: 30507 - DNA, 451 bp, Macaca Mulatta
tgcccagtcaagggtaaagtgtttagacttcatcgtgctctggtccatctgggaaactgaagcactcaagttggcccacccagcccagcggacctcctaatcccacagacagtggggatggagattcaggaaggggaagaggtgggagtcaggtagcaggtagaatgtggacagcctgggaggggctgcacacggtgaccccttccttatccctccccacagggattggttttcagagacatttcggaaagtgaaggagaaactcaggattaactcatgagcacctgaagggtgacatcccaggagggggctctgaaatttcccgcacctcagcacctgtgctgaggactccctccatgtggccccaggtgccaccaataaaaagcctatagaaaattctctcctgagtgcttcttcactgtgggccaggggtgccagagagggtaggggg

SEQ ID NO: 30508 - DNA, 617 bp, Macaca Mulatta
ctgcagaatcctactggatgtccacttggatgtcctgaagccacctgaaactcagcatatctacgaatgatcaaatgggatgccagcgctcagttatccaagcaagaaatatgctacgtgcttgactctaccctcacaaaactgggcaaagtcctgctggtctctctccttaatagttctcaaatctgtccctttagtttcatccctctgttactgttctcattcaggttcttattacatctcaccaaagccactgctgcacattcttaactgtgtccaagtggtaataattaaaaacagcttactgtctttatcattatcactcttaacccaccctaaaatttcctaaaggtatcctgttgacctcaggatacattaaagctacttagtggtaactggtttctgcctaccacttcctcccctaccacctaacactcacacatataaatacttggttcaactgtttgctctccttgaaatgaatgcctcctctgtgcccagctagcagttacccatcctttaaaactcatcccctttaaaacgtgccctaccacgtgtagatttgggttaagtgtctcaataaaatcttaaatgaataaatgcatggctagtaagtt

SEQ ID NO: 30509 - DNA, 917 bp, Macaca Mulatta
  misc_feature (1)...(917): n = A,T,C or G
aggctccgctgagcagggccccttgacagtgcacgtggtgtgggtgaaccacggggccttccgcctgcagtggtgcccacagtgctgcttccaccgcccgccccggacctaccactgcccctggtgcaacatctgtgtggaggtgagagcccctctacctgtccaccagccgtcgccccacatctggctgggaccaggagcctccctcatacaggggctggggctgggcgtgaagctgtctttcaggaccgctaaaggccaagggtgacagtacctcccagccactcttggtcactcatgtgcttcctgcctgcacctgtcctgggaggctgcccattgcctgcagaggtgctgacatgtacaggcatccacatctgtcctgggctgggtcaggccaggggaggagaggcagtcctctgtcccacccctgggcttgctaacatgagataccccagcccctcaggctggctgcccgcctggtctggaaggccttgcctgtcctcacctgggtgtccaaggtggagggtctaccggctctgagtgaccgtccccctcgtgagcacggcctgcacaggtttccaagtgcaggaggctggctgggccagggtgttactgtcatcttcatcgaatggatgagaaagtggaggcccagagctggtttccgttctgcccaaagttccagcagggtgcgtctcacagaaggccaggccagccttttctctaaaggtcttccgacaggancaggactttgaccaccactgcaagtgggtcaacaactgcatcggtcaccgcaactttcgcttcttcatgctgctcgtcctgtccctgtgcctctactcaggcgccctgctggtcacctgtctcatcttcctggtgcgcacgacccacctacccttctccaccgacaaggccgtcgc

SEQ ID NO: 30510 - DNA, 1621 bp, Macaca Mulatta
  misc_feature (1)...(1621): n = A,T,C or G
atttctacgacttttctctcagctgagccttttcctccggccctgatgctcttcaattcggtgcttcgccagccccagcttggcgtcctgagaaatgnnnnnnnnnnnnnnnnnnnnnnnnnnnnnnnnnnnnnnnnnnnnnnnnnnnnnnnnnnnnnnnnnnnnnnnnnnnnnnnnnnnnnnnnnnnnnnnnnnnnnnnnnnnnnnnnnnnnnnnnnnnnnnnnnnnnnnnnnnnnnnnnnnnnnnnnnnnnnnnnnttacagcagcaggtgatcaaacagccaaattttgggatgtgaaagctggtgagctgattggaacgtgcaaaggtcatcaatgcagcctcaagtcagttgccttttctaagtttgagaaagnagctgtattctgtacaggtggaagagatggcaacattatggtctgggataccaggtgcaacaaaaaannnnnnnnnnnnnnnnnnnnnnnnnnnnnnnnnnnnnnnnnnnnnnnnnnnnnnnnnnnnnnnnnnnnnnnnnnnnnnnnnnnnnnnnnnnnnnnnnnnnnnnnnnnnnnnnnnnnnnnnnnnnnnnnnnnnnnnnnnnnnnnnnnnnnnnnnnnnnnnnnnnnnnnnnnnnnnnnnnnnnnnnnnnnnnnnnnnnnnnnnnnnnnnnnnnnnnnnnnnnnnnnnnnnnnnnnnnnnnnnnnnnnnnnnnnnnnnnnnnnnnnnnnnnnnnnnnnnnnnnnnnnnnnnnnnnnnnnnnnnnnnnnnnnnnnnnnnnnnnnnnnnnnnnnnnnnnnnnnnnnnnnnnnnnnnnnnnnnnnnnnnnnnnnnnnnnnnnnnnnnnnnnnnnnnnnnnnnnnnnnnnnnnnnnnnnnnnnnnnnnnnnnnnnnnnnnnnnnnnnnnnnnnnnnnnnnnnnnnnnnnnnnnnnnnnnnnnnnnnnnnnnnnnnnnnnnnnnnnnnnnnnnnnnnnnnnnnnnnnnnnnnnnnnnnnnnnnnnnnnnnnnnnnnnnnnnnnnnnnnnnnnnnnnnnnnnnnnnnnnnnnnnnnnnnnnnnnnnnnnnnnnnnnnnnnnnnnnnnnnnnnnnnnnnagtaacagtaacgagtagccagagtactcctgccaaagcccccagggtaaagtgcaatgcatccatttcttccccgtcatccgcagcttgtgccccaagctgtgctggagacctccctcttccttcaaatactcctacgttctctattaaaacccctcctgccaaggcccggtctcccctcaacagaagaggttctgtctcctccgtctctcccaagccaccttcatctttcaagatgtcaattagaaactgggtgacccgaacaccttcctcatcaccacccatcactccacctgcttccgagactaagatcacgtctccaagaaaagcccttattcccgtgagccagaagtcatcccaagcagaggcttgctctgagtctagaaatagagtaaagaggaggctagactcaagctgtctggagagtgtgaaacaaaagtgtgtgaagagttgtaactgtgtgactgagcttgatggccaagttgaaaatcttcatttggatctgtgatgccttgctggtaaccaggaagaccttagtaaggactc

SEQ ID NO: 30511 - DNA, 291 bp, Macaca Mulatta
  misc_feature (1)...(291): n = A,T,C or G
gtacctctgttctacaggtgacagctactgatgcagatgaccctacctatggaaacagtgctcgggtggtttacagcattctccagggacaaccctacttctccgtcgatcctaaaacaggncaggagttattagaacggccttacataacatggacagagaagccagagaacattactcggtggtcattcaagccaaagacatggctgggcaagttggagggctttcggggtctacaacagtcaacatcaccttaaccgatgtcaatgacaacccaccgcgctttcctca

SEQ ID NO: 30512 - DNA, 2704 bp, Macaca Mulatta
  misc_feature (1)...(2704): n = A,T,C or G
agatcataatgggcgtgattctgctctataatttacttggatcaagtgcattggttggtgcagctgtcattgtgctccttgcgccaattcagtactttattgctacaaagtgggcagaggnnnnnnnnnnnnnnnnnnnnnnnnnnnnnnnnnnnnnnnnnnnnnnnnnnnnnnnnnnnnnnnnnnnnnnnnnnnnnnnnnnnnnnnnnnnnnnnnnnnnnnnnnnnnnnnnnnnnnnnnnnnnnnnnnnnnnnnnnnnnnnnnnnnnnnnnnnnnnnnnnnnnnnnnnnnnnnnnnnnnnnnnnnnnnnnnnnnnnnnnnnnnnnnnnnnnnnnnnnnnnnnnnnnnnnnnnnnnnnnnnnnnnnnnnnnnnnnnnnnnnnnnnnnnnnnnnnnnnnnnnnnnnnnnnnnnnnnnnnnnnnnnnnnnnnnnnnnnnnnnnnnnnnnnnnnnnnnnnnnnnnnnnnnnnnnnnnnnnnnnnnnnnnnnnnnnnnnnnnnnnnnnnnnnnnnnnnnnnnnnnnnnnnnnnnnnnnnnnnnnnnnnnnnnnnnnnnnnnnnnnnnnnnnnnnnnnnnnnnnnnnnnnnnnnnnncagccaaaaactataaacaggaaacagcctggaagatatcacctggacagctatgagcaatcaacacgacgtctacgtcccacagaaacagaggacatcgcaataaaggnnnnnnnnnnnnnnnnnnnnnnnnnnnnnnnnnnnnnnnnnnnnnnnnnnnnnnnnnnnnnnnnnnnnnnnnnnnnnnnnnnnnnnnnnnnnnnnnnnnnnnnnnnnnnnnnnnnnnnnnnnnnnnnnnnnnnnnnnnnnnnnnnnnnnnnnnnnnnnnnnnnnnnnnnnnnnnnnnnnnnnnnnnnnnnnnnnnnnnnnnnnnnnnnnnnnnnnnnnnnnnnnnnnnnnnnnnnnnnnnnnnnnnnnnnnnnnnnnnnnnnnnnnnnnnnnnnnnnnnnnnnnnnnnnnnnnnnnnnnnnnnnnnnnnnnnnnnnnnnnnnnnnnnnnnnnnnnnnnnnnnnnnnnnnnnnnnnnnnnnnnnnnnnnnnnnnnnnnnnnnnnnnnnnnnnnnnnnnnnnnnnnnnnnnnnnnnnnnnnnnnnnnnnnnnnnnnnnnnnnnnnnnnnnnnnnnnnnnnnnnnnnnnnnnnnnnnnnnnnnnnngatgatccattctcagccctggacattcacttgagtgatcannnnnnnnnnnnnnnnnnnnnnnnnnnnnnnnnnnnnnnnnnnnnnnnnnnnnnnnnnnnnnnnnnnnnnnnnnnnnnnnnnnnnnnnnnnnnnnnnnnnnnnnnnnnnnnnnnnnnnnnnnnnnnnnnnnnnnnnnnnnnnnnnnnnnnnnnnnnnnnnnnnnnnnnnnnnnnnnnnnnnnnnnnnnnnnnnnnnnnnnnnnnnnnnnnnnnnnnnnnnnnnnnnnnnnnnnnnnnnnnnnnnnnnnnnnnnnnnnnnnnnnnnnnnnnnnnnnnnnnnnnnnnnnnnnnnnnnnnnnnnnnnnnnnnnnnnnnnnnnnnnnnnnnnnnnnnnnnnnnnnnnnnnnnnnnnnnnnnnnnnnnnnnnnnnnnnnnnnnnnnnnnnnnnnnnnnnnnnnnnnnnnnnnnnnnnnnnnnnnnnnnnnnnnnnnnnnnnnnnnnnnnnnnnnnnnnnnnnnnnnnnnnnnnnnnnnnnnnnnnnnnnnnnnnnnnnnnnnnnnnnnnnnnnnnnnnnnnnnnnnnnnnnnnnnnnnnnnnnnnnnnnnnnnnnnnnnnnnnnnnnnnnnnnnnnnnnnnnnnnnnnnnnnnnnnnnnnnnnnnnnnnnnnnnnnnnnnnnnnnnnnnnnnnnnnnnnnnnnnnnnnnnnnnnnnnnnnnnnnnnnnnnnnnnnnnnnnnnnnnnnnnnnnnnnnnnnnnnnnnnnnnnnnnnnnnnnnnnnnnnnnnnnnnnnnnnnnnnnnnnnnnnnnnnnnnnnnnnnnnnnnnnnnnnnnnnnnnnnnnnnnnnnnnnnnnnnnnnnnnnnnnnnnnnnnnnnnnnnnnnnnnnnnnnnnnnnnnnnnnnnnnnnnnnnnnnnnnnnnnnnnnnnnnnnnnnnnnnnnnnnnnnnnnnnnnnnnnnnnnnnnnnnnnnnnnnnnnnnnnnnnnnnnnnnnnnnnnnnnnnnnnnnnnnnnnnnnnnnnnnnnnnnnnnnnnnnnnnnnnnnnnnnnnnnnnnnnnnnnnnnnnnnnnnnnnnnnnnnnnnnnnnnnnnnnnnnnnnnnnnnnnnnnnnnnnnnnnnnnnnnnnnnnnnnnnnnnnnnnnnnnnnnnnnnnnnnnnnnnnnnnnnnnnnnnnnnnnnnnnnnnnnnnnnnnnnnnnnnnnnnnnnnnnnnnnnnnnnnnnnnnnnnnnnnnnnnnnnnnnnnnnnnnnnnnnnnnnnnnnnnnnnnnnnnnnnnnnnnnnnnnnnnnnnnnnnnnnnnnnnnnnnnnnnnnnnnnnnnnnnnnnnnnnnnnnnnnnnnnnnnnnnnnnnnnnnnnnnnnnnnnnnnnnnnnnnnnnnnnnnnnnnnnnnnnnnnnnnnnnnnnnnatccttctcaagttccagaacattggccacaagaaggggagattaagatacatgatctgtgtgtcagatatgaaaataatctgaaacctgttcttaagcacgtcaaagcttacatcaaacctggacaaaaggtn

SEQ ID NO: 30513 - DNA, 110 bp, Macaca Mulatta
agcgtgtttccttgactcaatggccaccttgggcctggcagcgtacggctatggaatccgctatgaatttgggatttttaaccagaagattgtcaatggctggcaggtgg

SEQ ID NO: 30514 - DNA, 151 bp, Macaca Mulatta
accgagcttttcctgctgtttgctggcctcccgcagaagtactacctgctgccggcacgtggtgtcagcccgacctccctggacaccacgcctgcccaggctttcaccatgcgtccgcgggcccagaccctgtgcgcggtgcccaggccct

SEQ ID NO: 30515 - DNA, 574 bp, Macaca Mulatta
acgcgggacactccagcgacagtggggatcagcgtaggtgagctgtggtctttttcaaggtgctgcagccacagcgttcgctacgaggattgagcgtctccacctatcttctgtgctgcaccatctacataatgaatcccagtatgaagcagaaacaagaagaaatcaaagagaatgtaaagaatagttctatccaaagaagaactctgaagatgattcagccttctgcatctggatctcttgttggaagagaaaatgagctgtccacaggcttatccaaaaggaaacatcggaatgaccagttaacatctacaacttccagccctggggttattgttccagaatctagtgaaaataaaaatcttggaggagtcacccaggagtcatttgatcttatgattaaagaaaatccatcctctcaatattggaaagaagtggcagaaaaacggaggaaggtgctgtatgaagcacttaaggaaaatgagaaacttcataaagaaatcgaacaaaaggacaacgaaattgcccgcctgaaaaaggagaacaaagaattggcagaagtagcagaacatgt

SEQ ID NO: 30516 - DNA, 136 bp, Macaca Mulatta
cttagcagaaggtcggtgtgtctaccaggcaaatgaagctctcttacaaacccctgcctgggtcttagggttgatcagtgacacacctctcccctcaaccttgaccatctccatctacccttaaatgctctatgcc

SEQ ID NO: 30517 - DNA, 2408 bp, Macaca Mulatta
  misc_feature (1)...(2408): n = A,T,C or G
gccaacggcgggtgggagcagcgcgggaacgtggcggcgcggcgggttgtggcggaggtncacggcctccccacatcctttggctgaagcccccggtcctcatccatgaagcctcgcccaccatgttttatgggacgcacttcatcatgtccccgcccaccaagagcaaactgaagcggcagagccagctgttgtccagcatgctgtcccggacgctgacctacaagtaccgggacctggactccaccttctctagcctgggcgccagtgacgatcccgccgagctctccacccagctctcagcccctggtgtcctgaaggtgtttggtgacagtgtctgcacaggaacccactacaagagtgtcctggccaccggcacctccagtgcccgtgagctggtgaaggaggcgctggagcggtacgccctggaccccgggcaggccggccagtacgtgctgtgtgacgtggtgggccaagccggcgacgccgggcagcagtggcaggcccagtgctttcgggtgtttggggacagtgagaagcccctcttgatccaggaattatggaaaccccgagaaggtttatcccggaggtttgagctgaggaagaggtcggacgtggaggagctggcagccaaggaggtggacaccatcacggcaggnnnnnnnnnnnnnnnnnnnnnnnnnnnnnnnnnnnnnnnnnnnnnnnnnnnnnnnnnnnnnnnnnnnnnnnnnnnnnnnnnnnnnnnnnnnnnnnnnnnnnnnnnnnnnnnnnnnnnnnnnnnnnnnnnnnnnnnnnnnnnnnnnnnnnnnnnnnnnnnnnnnnnnnnnnnnnnnnnnnnnnnnnnnnnnnnnnnnnnnnnnnnnnnnnnnnnnnnnnnnnnnnnnnnnnnnnnnnnnnnnnnnnnnnnnnnnnnnnnnnnnnnnnnnnnnnnnnnnnnnnnnnnnnnnnnnnnnnnnnnnnnnnnnnnnnnnnnnnnnnnnnnnnnnnnnnnnnnnnnnnnnnnnnnnnnnnnnnnnnnnnnnnnnnnnnnnnnnnnnnnnnnnnnnnnnnnnnnnnnnnnnnnnnnnnnnnnnnnnnnnnnnnnnnnnnnnnnnnnnnnnnnnnnnnnnnnnnnnnnnnnnnnnnnnnnnnnnnnnnnnnnnnnnnnnnnnnnnnnnnnnnnnnnnnnnnnnnnnnnnnnnnnnnnnnnnnnnnnnnnnnnnnnnnnnnnnnnnnnnnnnnnnnnnnnnnnnnnnnnnnnnnnnnnnnnnnnnnnnnnnnnnnnnnnnnnnnnnnnnnnnnnnnnnnnnnnnnnnnnnnnnnnnnnnnnnnnnnnnnnnnnnnnnnnnnnnnnnnnnnnnnnnnnnnnnnnnnnnnnnnnnnnnnnnnnnnnnnnnnnnnnnnnnnnnnnnnnnnnnnnnnnnnnnnnnnnnnnnnnnnnnnnnnnnnnnnnnnnnnnnnnnnnnnnnnnnnnnnnnnnnnnnnnnnnnnnnnnnnnnnnnnnnnnnnnnnnnnnnnnnnnnnnnnnnnnnnnnnnnnnnnnnnnnnnnnnnnnnnnnnnnnnnnnnnnnnnnnnnnnnnnnnnnnnccaggagcccatctcgctggccggctgcgccatggctgatctggttccagacttgcagcccattcttttctggatgtctaattccatcgagcttctgtactttatccagcagaaatgcccactctacatgcagagcatggaggagcagctggacgtcacaggncaggctctaaggagtcgctgttctcctgcacgctgacggccagcgaggaggccatggcggtgctggaggaggtggtgctgtacgccttccagcagtgcgtctactacgtctccaagnnnnnnnnnnnnnnnnnnnnnnnnnnnnnnnnnnnnnnnnnnnnnnnnnnnnnnnnnnnnnnnnnnnnnnnnnnnnnnnnnnnnnnnnnnnnnnnnnnnnnnnnnnnnnnnnnnnnnnnnnnnnnnnnnnnnnnnnnnnnnnnnnnnnnnnnnnnnnnnnnnnnnnnnnnnnnnnnnnnnnnnnnnnnnnnnnnnnnnnnnnnnnnnnnnnnnnnnnnnnnnnnnnnnnnnnnnnnnnnnnnnnnnnnnnnnnnnnnnnnnnnnnnnnnnnnnnnnnnnnnnnnnnnnnnnnnnnnnnnnnnnnnnnnnnnnnnnnnnnnnnnnnnnnnnnnnnnnnnnnnnnnnnnnnnnnnnnnnnnnnnnnnnnnnnnnnnnnnnnnnnnnnnnnnnnnnnnnnnnnnnnnnnnccagatgagctggacagccctgcgggccgcgttccccgccctgagcccagcacagctgcaccgaggggtgactcactaccagctggcctcggccatgggccccgtgagcacctgggagccgggggcccaggacagtcctgaggccttcaggtcag

SEQ ID NO: 30518 - DNA, 396 bp, Macaca Mulatta
aagatgccatctgtgtcttggttagcagagctggaccagtggtgccctggagggatgagccagctgcagctgggctctgtggttgacttatgggcccagccagccagactcaggccatggctcccctttttcttcctcaccctgatttcttgcttattcactggagtcctcctgaagaggaactgggcctgttgtactttctgtaccatttatttgttcccaatgtttatagtaataaaggcaccgctgatggggacctccactctgtccatgtctgaggaggaactggcgcttttgcagaggcttactctgggctctgaacttgaaccagtgtggtctgtgctcagggccctgtgtttctgaactgagggtgagggtgtcggggagttttccttt

SEQ ID NO: 30519 - DNA, 466 bp, Macaca Mulatta
gcttccctgagtacacaggagccaacaagtatgatgaggcagccagctacatccagagtaagtttgaggacctgaataagcgcaaagacaccaaggagatctacacgcacttcacgtgcgccaccgacaccaagaacgtgcagttcgtgtttgacgccgtcaccgatgtcatcatcaagaacaacctgaaggactgcggcctcttctgaggggcagcggggcctggcgggatgggccaccgccaactctgtaccccccaacccttgaagaagatgggggcaagaagaccacgctccccgcctgttccccggccgcttttctcctctttcctctctttgttctcagctccccctgtccctcagctccagatgtaggggaggggttgccacgggcctccttgtttgaagcctgcccttgtctgaggtgctggtaatggccatggtaccccctttctgggcatctgttc

SEQ ID NO: 30520 - DNA, 823 bp, Macaca Mulatta
tttgttctcctgggactgacagatcgggctgagctgcagccccttctttttgtggtatttctagtcatctaccttatcacagtaatcggcaatgtgagtatgatcttgttaatcagaagtgactcgacactacacactccaatgtacttctttctcagtcacctctcctttgtagatctctgttacaccaccagtgttactccttagatgctggttaactttttatccaagacaaaaaccatttccttcatcggctgcttcatccaatttcactttttcattgcactggtgatcacagattattatatgctcacagtgatggcttatgaccgctacatggccatctgcaagcccttgttatatggaagaaaaatgtccaggtgtgtctgcctctgtctcgctgctgctccctatatttatggctttgcaaatggtctagcacagaccatcctgatacttcgtctgtccttctgtggacccaatgagatcaaccacttttactgtgcggacccacccctcttagtcctcgcctgctcagatacttatgtcaaagagactgccatgttggtggtggctggttccaacctcatctgctctctcaccatcatcctcatttcctacactttgatcttcactgccattctgcgtatccacactgctgaggggaggcgcaaggccttctccacctgcgggtcccatgtgactgctgtcactgtcttctatgggacactgttctgcatgtacctgaggcccccttctgagacatctatacaacaggggaaaattgtagctgttttttatatctttgtgagtccgttgtaaa

SEQ ID NO: 30521 - DNA, 105 bp, Macaca Mulatta
agattgccatctgccccaacaaccatgaggtgcacatctacgaaaagagcggtgccaaatggaccaaggtgcacgagctcaaggagcacaacgggcaggtgacag

SEQ ID NO: 30522 - DNA, 1544 bp, Macaca Mulatta
ggggattattttttaactgtgctagggagtagaagcaggaggttttcaacctagtgacagtcacagagcagcacctaccccctcctcctttccacacctgcaaactcttttacttgagctgaatatttagtgtaattacatctcagctttgagggctcctgtggcaaattcccggattaaaaggttccctggttgtgaaaatacatgagataagtcatgaaggtcactatcatcctccttctgcttgcacaagtttcctgggccggaccgtttcaacagagaggcttatttgactttatgctagaagatgaggcttctgggataggcccagaacttcctgatgaccgcgactatgagccccctctaggcccagtgtgccccttccgctgtcaatgccatcttcgagtggtccagtgttctgacttgggtctggacaaagtgccaaaggatcttccccctgacacaactctgctagacctgcaaaacaacaaaataactgaaatcaaagatggagactttaagaacctgaagaaccttcacgcattgattcttgtcaacaataaaattagcaaaattagccctggagcatttacacctttggtgaagttggaacgactttatctgtccaagaatcagctgaaggaattgccagaaaaaatgcccaaaactcttcaggagctgcgtgcccatgagaatgagatcaccaaagtgcgaaaaactactttcaatggactgaaccagatgattgtcatagaactgggcaccaatccgctgaagagctcaggaattgaaaatggggctttccagggaatgaagaagctctcctacatccgcattgctgataccaatatcaccagcattcctcaaggtcttcctccttcccttactgaattacatcttgatggcaacaaaatcagcagagttgatgcagctagcctgaaaggactgaataatttggctaagttgggattgagtttcaacagcatctctgttgtcgacaatggctctctggccaacacgcctcatctgagggagcttcacttggacaacaacaagcttaccagagtacctgggtgggctggcagagcataagtacatccaggttgtctaccttcataacaaccaatatctctgtagttgggatcaagtgacttctgcccacctggacacaataccaaaaaggcttcttatttcgggtgtggagtccttttcagcgaacccgggtccaggtactggggagaatacagcccatccaccttccagatggtgtctaccgtgcgctctggcattccactcggaaactataagtaattcccaagaaagccctcctttttataacctgggcaaaaccttgtaacgtcatcggctacaacttaatacaaacgctcgaatactgggaaacctaactgccatgggggagggtcttaccccccccggaccttattttcgccctacagtcccaaatttcccccttctctaaccccatttgcccccccccatcacatgaacgaacttttttttgcccctgcccaacgttttttgct

SEQ ID NO: 30523 - DNA, 6686 bp, Macaca Mulatta
  misc_feature (1)...(6686): n = A,T,C or G
ctggagccctacgcggggccccagcagaactctcacgaccacggcttccccaaccacccttacaactcctactaccccaaccgcagcgcctaccccccgcccgccccggcctacgcgctgagctccccgagaggtggcactccgggctccggcgcggcggcggctcccggctccaagccgcctccctcctccagcgcctccgcctcttcgtcgtcttcgtccttcgctcagcagcgcttcggggccatggggggaggcggcccctccgcggccggcgggggaactccccagcccaccgccacccccaccctcaaccaactgctcacgtcgcccagctcggcccggggctaccagggctaccccgggggcgactacggcggcgggccccaggacgggggcgccggcaagggcccggcggacatggcctcgcagtgctggggggctnnnnnnnnnnnnnnnnnnnnnnnnnngcctcgggaggggcccaacaaaggagccaccacgcgcccatgagccccgggagcagcggcggcggggggcagccgctcgcccggacccctcagnnnnnnnnnnnnnnnnnnnnnnnnnnnnnnnnnnnnnnnnnnnnnnnnnnnnnnnnnnnnnnnnnnnnnnnnnnnnnnnnnnnnnnnnnnnnnnnnnnnnnnnnnnnnnnnnnnnnnnnnnnnnnnnnnnnnnnnnnnnnnnnnnnnnnnnnnnnnnnnnnnnnnnnnnnnnnnnnnnnnnnnnnnnnnnnnnnnnnnnnnnnnnnnnnnnnnnnnnnnnnnnnnnnnnnnnnnnnnnnnnnnnnnnnnnnnnnnnnnnnnnnnnnnnnnnnnnnnnnnnnnnnnnnnnnnnnnnnnnnnnnnnnnnnnnnnnnnnnnnnnnnnnnnnnnnnnnnnnnnnnnnnnnnnnnnnnnnnnnnnnnnnnnnnnnnnnnnnnnnnnnnnnnnnnnnnnnnnnnnnnnnnnnnnnnnnnnnnnnnnnnnnnnnnnnnnnnnnnnnnnnnnnnnnnnnnnnnnnnnnnnnnnnnnnnnnnnnnnnnnnnnnnnnnnnnnnnnnnnnnnnnnnnnnnnnnnnnnnnnnnnnnnnnnnnnnnnnnnnnnnnnnnnnnnnnnnnnnnnnnnnnnnnnnnnnnnnnnnnnnnnnnnnnnnnnnnnnnnnnnnnnnnnnnnnnnnnnnnnnnnnnnnnnnnnnnnnnnnnnnnnnnnnnnnnnnnnnnnnnnnnnnnnnnnnnnnnnnnnnnnnnnnnnnnnnnnnnnnnnnnnnnnnnnnnnnnnnnnnnnnnnnnnnnnnnnnnnnnnnnnnnnnnnnnnnnnnnnnnnnnnnnnnnnnnnnnnnnnnnnnnnnnnnnnnnnnnnnnnnnnnnnnnnnnnnnnnnnnnnnnnnnnnnnnnnnnnnnnnnnnnnnnnnnnnnnnnnnnnnnnnnnnnnnnnnnnnnnnnnnnnnnnnnnnnnnnnnnnnnnnnnnnnnnnnnnnnnnnnnnnnnnnnnnnnnnnnnnnnnnnnnnnnnnnnnnnnnnnnnnnnnnnnnnnnnnnnnnnnnnnnnnnnnnnnnnnnnnnnnnnnnnnnnnnnnnnnnnnnnnnnnnnnnnnnnnnnnnnnnnnnnnnnnnnnnnnnnnnnnnnnnnnnnnnnnnnnnnnnnnnnnnnnnnnnnnnnnnnnnnnnnnnnnnnnnnnnnnnnnnnnnnnnnnnnnnnnnnnnnnnnnnnnnnnnnnnnnnnnnnnnnnnnnnnnnnnnnnnnnnnnnnnnnnnnnnnnnnnnnnnnnnnnnnnnnnnnnnnnnnnnnnnnnnnnnnnnnnnnnnnnnnnnnnnnnnnnnnnnnnnnnnnnnnnnnnnnnnnnnnnnnnnnnnnnnnnnnnnnnnnnnnnnnnnnnnnnnnnnnnnnnnnnnnnnnnnnnnnnnnnnnnnnnnnnnnnnnnnnnnnnnnnnnnnnnnnnnnnnnnnnnnnnnnnnnnnnnnnnnnnnnnnnnnnnnnnnnnnnnnnnnnnnnnnnnnnnnnnnnnnnnnnnnnnnnnnnnnnnnnnnnnnnnnnnnnnnnnnnnnnnnnnnnnnnnnnnnnnnnnnnnnnnnnnnnnnnnnnnnnnnnnnnnnnnnnnnnnnnnnnnnnnnnnnnnnnnnnnnnnnnnnnnnnnnnnnnnnnnnnnnnnnnnnnnnnnnnnnnnnnnnnnnnnnnnnnnnnnnnnnnnnnnnnnnnnnnnnnnnnnnnnnnnnnnnnnnnnnnnnnnnnnnnnnnnnnnnnnnnnnnnnnnnnnnnnnnnnnnnnnnnnnnnnnnnnnnnnnnnnnnnnnnnnnnnnnnnnnnnnnnnnnnnnnnnnnnnnnnnnnnnnnnnnnnnnnnnnnnnnnnnnnnnnnnnnnnnnnnnnnnnnnnnnnnnnnnnnnnnnnnnnnnnnnnnnnnnnnnnnnnnnnnnnnnnnnnnnnnnnnnnnnnnnnnnnnnnnnnnnnnnnnnnnnnnnnnnnnnnnnnnnnnnnnnnnnnnnnnnnnnnnnnnnnnnnnnnnnnnnnnnnnnnnnnnnnnnnnnnnnnnnnnnnnnnnnnnnnnnnnnnnnnnnnnnnnnnnnnnnnnnnnnnnnnnnnnnnnnnnnnnnnnnnnnnnnnnnnnnnnnnnnnnnnnnnnnnnnnnnnnnnnnnnnnnnnnnnnnnnnnnnnnnnnnnnnnnnnnnnnnnnnnnnnnnnnnnnnnnnnnnnnnnnnnnnnnnnnnnnnnnnnnnnnnnnnnnnnnnnnnnnnnnnnnnnnnnnnnnnnnnnnnnnnnnnnnnnnnnnnnnnnnnnnnnnnnnnnnnnnnnnnnnnnnnnnnnnnnnnnnnnnnnnnnnnnnnnnnnnnnnnnnnnnnnnnnnnnnnnnnnnnnnnnnnnnnnnnnnnnnnnnnnnnnnnnnnnnnnnnnnnnnnnnnnnnnnnnnnnnnnnnnnnnnnnnnnnnnnnnnnnnnnnnnnnnnnnnnnnnnnnnnnnnnnnnnnnnnnnnnnnnnnnnnnnnnnnnnnnnnnnnnnnnnnnnnnnnnnnnnnnnnnnnnnnnnnnnnnnnnnnnnnnnnnnnnnnnnnnnnnnnnnnnnnnnnnnnnnnnnnnnnnnnnnnnnnnnnnnnnnnnnnnnnnnnnnnnnnnnnnnnnnnnnnnnnnnnnnnnnnnnnnnnnnnnnnnnnnnnnnnnnnnnnnnnnnnnnnnnnnnnnnnnnnnnnncccaacggcgggatgtgcgacccctacagtcgtgctgctggccctgggctaggaaatgtggcgatgggaccacgacagcactatccctatggaggtccttatgacagagtgaggnaggacggagcctggaatagggcctgagggaaacatgagcactggggccccacagcctaatctcatgccttccaacccagactcggggatgtattctcctagccgctaccccccnnnnnnnnnnnnnnnnnnnnnnnnnnacatgattcctatggcaatcagttctccacccaaggtaccccttctggcagccccttccccagccagcagaccacaatgtatcaacagcagcagcagnnnnnnnnnnnnnnnnnnnnnnnnnnnnnnnnnnnnnnnnnnnnnnnnnnnnnnnnnnnnnnnnnnnnnnnnnnnnnnnnnnnnnnnnnnnnnnnnnnnnnnnnnnnnnnnnnnnnnnnnnnnnnnnnnnnnnnnnnnnnnnnnnnnnnnnnnnnnnnnnnnnnnnnnnnnnnnnnnnnnnnnnnnnnnnnnnnnnnnnnnnnnnnnnnnnnnnnnnnnnnnnnnnnnnnnnnnnnnnnnnnnnnnnnnnnnnnnnnnnnnnnnnnnnnnnnnnnnnnnnnnnnnnnnnnnnnnnnnnnnnnnnnnnnnnnnnnnnnnnnnnnnnnnnnnnnnnnnnnnnnnnnnnnnnnnnnnnnnnnnnnnnnnnnnnnnnnnnnnnnnnnnnnnnnnnnnnnnnnnnnnnnnnnnnnnnnnnnnnnnnnnnnnnnnnnnnnnnnnnnnnnnnnnnnnnnnnnnnnnnnnnnnnnnnnnnnnnnnnnnnnnnnnnnnnnnnnnnnnnnnnnnnnnnnnnnnnnnnnnnnnnnnnnnnnnnnnnnnnnnnnnnnnnnnnnnnnnnnnnnnnnnnnnnnnnnnnnnnnnnnnnnnnnnnnnnnnnnnnnnnnnnnnnnnnnnnnnnnnnnnnnnnnnnnnnnnnnnnnnnnnnnnnnnnnnnnnnnnnnnnnnnnnnnnnnnnnnnnnnnnnnnnnnnnnnnnnnnnnnnnnnagcaagtctccattcctgcactctgggatgaaaatgcagaaggcaggtcccccagtacctgcctcacacatagcacctgcccctgtgcagccccccatgattcggcgggatatcaccttcccacctggctctgttgaagccacacagcctgtgttgaagcagaggaggcggctcacaatgaaagacattgnnnnnnnnnnnnnnnnnnnnnnnnnnnnnnnnnnnnnnnnnnnnnnnnnnnnnnnnnnnnnnnnnnnnnnnnnnnnnnnnnnnnnnnnnnnnnnnnnnnnnnnnnnnnnnnnnnnnnnnnnnnnnnnnnnnnnnnnnnnnnnnnnnnnnnnnnnnnnnnnnnnnnnnnnnnnnnnnnnnnnnnnnnnnnnnnnnnnnnnnnnnnnnnnnnnnnnnnnnnnnnnnnnnnnnnnnnnnnnnnnnnnnnnnnnnnnnnnnnnnnnnnnnnnnnnnnnnnnnnnnnnnnnnnnnnnnnnnnnnnnnnnnnnnnnnnnnnnnnnnnnnnnnnnnnnnnnnnnnnnnnnnnnnnnnnnnnnnnnnnnnnnnnnnnnnnnnnnnnnnnnnnnnnnnnnnnnnnnnnnnnnnnnnnnnnnnnnnnnnnnnnnnnnnnnnnnnnnnnnnnnnnnnnnnnnnnnnnnnnnnnnnnnnnnnnnnnnnnnnnnnnnnnnnnnnnnnnnnngggcgtgtgcaggagtttgacagtggcctgctgcactggcggattgttgcgggggacaccactgagcatatccagacccacttcgaaagcaagacagagctgctgccttcccggcctcatgcaccctgcccaccagccccccggaagcatgtgacaacagcagagggtacgccagggacaacagaccaggagggacccccacctgatggacctccagaaaaacggatcacagccactatggatgacatgttgtctactcggtctagcaccttgaccgaggatggagctaagagttcagaggccatcaaggagagcagcaagtttccatttggcattagcccagcacagagccaccggaatatcaagatcctagaggacgaaccccacagtaaggatgagaccccactgtgtacccttctggactggcaggattctcttgccaagcgctgtgtctgtgtctccaataccattcgaagcctgtcatttgtgccaggcaatgactttgagatgtccaaacacccagggctgctgctcatcctgggcaagctgatcctgctgcaccacaagcacccagaacnnnnnnnnnnnnnnnnnnnnnnnnnnnnnnnnnnnnnnnnnnnnnnnnnnnnnnnnnnnnnnnnnnnnnnnnnnnnnnnnnnnnnnnnnnnnnnnnnnnnnnnnnnnnnnnnnnnnnnnnnnnnnnnnnnnnnnnnnnnnnnnnnnnnnnnnnnnnnnnnnnnnnnnnnnnnnnnnnnnnnnnnnnnnnnnnnnnnnnnnnnnnnnnnnnnnnnnnnnnnnnnnnnnnnnnnnnnnnnnnnnnnnnnnnnnnnnnnnnnnnnnnnnnnnnnnnnnnnnnnnnnnnnnnnnnnnnnnnnnnnnnnnnnnnnnnnnnnnnnnnnnnnnnnnnnnnnnnnnnnnnnnnnnnnnnnnnnnnnnnnnnnnnnnnnnnnnnnnnnnnnnnnnnnnnnnnnnnnnnnnnnnnnnnnnnnnnnnnnnnnnnnnnnnnnnnnnnnnnnnnnnnnnnnnnnnnnnnnnnnnnnnnnnnnnnnnnnnnnnnnnnnnnnnnnnnnnnnnnnnnnnnnnnnnnnnnnnnnnnnnnnnnnnnnnnnnnnnnnnnnnnnnnnnnnnnnnnnnnnnnnnnnnnnnnnnnnnnnnnnnnnnnnnnnnnnnnnnnnnnnnnnnnnnnnnnnnnnnnnnnnnnnnnnnnnnnnnnnnnnnnnnnnnnnnnnnnnnnnnnnnnnnnnnnnnnnnnnnnnnnnnnnnnnnnnnnnnnnnnnnnnnnnnnnnnnnnnnnnnnnnnnnnnnnnnnnnnnnnnnnnnnnnnnnnnnnnnnnnnnnnnnnnnnnnnnnnnnnnnnnnnnnnnnnnnnnnnnnnnnnnnnnnnnnnnnnnnnnnnnnnnnnnnnnnnnnnnnnnnnnnnnnnnnnnnnnnnnnnnnnnnnnnnnnnnnnnnnnnnnnnnnnnnnnnnnnnnnnnnnnnnnnnnnnnnnnnnnnnnnnnnnnnnnnnnnnnnnnnnnnnnnnnnnnnnnnnnnnnnnnnnnnnnnnnnnnnnnnnnnnnnnnnnnnnnnnnnnnnnnnnnnnnnnnnnnnnnnnnnnnnnnnnnnnnnnnnnnnnnnnnacaaagctctgcctacatagaagactttttttattttaaccaaagttactgttgtttacagtgagtttgggnnnnnnnnnnnnnnnnnnntggctttcccagtccttgcatcaacgggacgccacatttcataactgtttttaatgg

SEQ ID NO: 30524 - DNA, 347 bp, Macaca Mulatta
ttcagtggtattaagtgcattcataatgttgagataccaacaccatcatccagctccagaagtttttcgtcttctcaaactaaaaatctgtacatgttttgtcttgtttttgagatggagtctcactttgttgcccaggctggagcgcagtggtgtgatctcggctcactgcaacctccgcctcctaggttcaagtgattcccctgcctcagcctcccgagtagctgggattacaggcgagtgccaccatgcctggctcatttttgtgtttttagtagagactgggtttcaccataattggccaggctggtcttgaactcctgacctcaggcgatccactgcctcag

SEQ ID NO: 30525 - DNA, 142 bp, Macaca Mulatta
ggttgacattgattgcagtcagaaggttgtagtttacgatcaaagctcccaagatgttgcctctctctcttcagactgttttctcactgtacttctgggtaaactggagaagagcttcaactctgttcacctgcttgcaggt

SEQ ID NO: 30526 - DNA, 797 bp, Macaca Mulatta
tctgtacctgtcctctagcatctgtctctcctgccatgctgactggctcttgctctctacaggataacctggtggctctgtgccattccctacagtattctcatcttcatctatgatgaaatcagaaaactcctcatccgtcagcacccgggtggtgaggctcccctgggccccgctctgactgagtggtcaccagccccctgactagctccgccatcccgcctagtccctccagacccaccactgactttctcccctcctcgctgccagccttgactgcacctggaacccagacctctccaccccttggctgcacccgcctgctccatctgaccctcagtgccctgtgttccagacctcccacctccaaccttgtccctgctttcccttctgcctgtctcccctggatgcctcccctcccttcttccagttcacactggcctcttctcttccacaggctgggtggagagggagacgtactactaaactcagcagaggaagagcttcctgtgacacaggggtgtcgtgagagctggggtggggccagagattataagtttgacacaacatctgagacactaggatgaattatcttggatgagaaagatgggcaatcctgggctggcttgagggcatcacaggcagaggatgaggtgggctgaagggaagcccggcctgcctctagctggagccctgcagggaggggcatggtcctgctgaatcctgtagccagtctagacagtaaatgtctggaaaagccctcaccggctggatgtgtcaaatctgatattgggggg

SEQ ID NO: 30527 - DNA, 1239 bp, Macaca Mulatta
  misc_feature (1)...(1239): n = A,T,C or G
tggggggaagcgccttaaaccagggggtcctggaaggggacgacgcccccggccagnccagtccctgtacgagcggttaagtcagaagatgttggacatctcgggggaccggggcgtgctgaaggatgtcatccgagaaggagctggagacctggtggcgcctgatgcttcggtgctagnnnnnnnnnnnnnnnnnnnnnnnnnnnnnnnnnnnnnnnnnnnnnnnnnnnnnnnnnnnnnnnnnnnnnnnnnnnnnnnnnnnnnnnnngatattacactgtggggcatggagctgggtcttctgagcatgcggagaggagagctgnccaggtttctgttcaaaccgaactacgcnctatggaactttgggctgccctcctttaaattcccccaaacaccactgtcctgttcgagattgagctgcttgacttcctagactctgctgagtcggacaagttttgtgctctctcggctnnnnnnnnnnnnnnnnnnnnnnnnnnnnnnnnnnnnnnnnnnnnnnnnnnnnnnnnnnnnnnnnnnnnnnnnnnnnnnnnnnnnnnnnnnnnnnnnnnnnnnnnnnnnnnnnnnnnnnnnnnnnnnnnnnnnnnnnnnnnnnnnnnnnnnnnnnnnnnnnnnnnnnnnnnnnnnnnnnnnnnnnnnnnnnnnnnnnnnnnnnnnnnnnnnnnnnnnnnnnnnnnnnnnnnnnnnnnnnnnnnnnnnnnnnnnnnnnnnnnnnnnnnnnnnnnnnnnnnnnnnnnnnnnnnnnnnnnnnnnnnnnnnnnnnnnnnnnnnnnnnnnnnnnnnnnnnnnnnnnnnnnnnnnnnnnnnnnnnnnnnnnnnnnnnnnnnnnnnnnnnnnnnnnnnnnnnnnnnnnnnnnnnnnnnnnnnnnnnnnnnnnnnnttacagggactacgtggataaagagaaagaaatgtggcaccgcatgttcgcgcgctgtggcgatggttctacagcaggagaaannnnaggttcttcacctaccagcgaggggagagagctgtggttctgcatcgttgggggagtggaagggagctccccagtgccaccgtggcagccaccttcctggagcagggcttggaatgccccgtggccgcatctctgacagatgcggctgaaatgtgttttcacaggtgctgttttctgttttccgtgttcataacacaggaggggagagcgtagctactgacaagtagaacactggtaattttttaaggcag

SEQ ID NO: 30528 - DNA, 5442 bp, Macaca Mulatta
  misc_feature (1)...(5442): n = A,T,C or G
caggagatacagagtttgctcactaactggaaggggccagacctgaccagctatggggaactggtgcttgagggaaccttccgcatccagcgagccaagaatgagcggacactcttcctcttcgacaagctgctgctcatcacgaagaagagagacgacacgtttacatacaaagctcacatcctnnnnnnnnnnnnnnnnnnnnnnnnnnnnnnnnnnnnnnnnnnnnnnnnnnnnnnnnnnnnnnnnnnnnnnnnnnnnnnnnnnnnnnnnnnnnnnnnnnnnnnnnnnnnnnnnnnnnnnnnnnnnnnnnnnnnnnnnnnnnnnnnnnnnnnnnnnnnnnnnnnnnnnnnnnnnnnnnnnnnnnnnnnnnnnnnnnnnnnnnnnnnnnnnnnnnnnnnnnnnnnnnnnnnnnnnnnnnnnnnnnnnnnnnnnnnnnnnnnnnnnnnnnnnnnnnnnnnnnnnnnnnnnnnnnnnnnnnnnnnnnnnnnnnnnnnnnnnnnnnnnnnnnnnnnnnnnnnnnnnnnnnnnnnnnnnnnnnnnnnnnnnnnnnnnnnnnnnnnnnnnnnnnnnnnnnnnnnnnnnnnnnnnnnnnnnnnnnnnnnnnnnnnnnnnnnnnnnnnnnnnnnnnnnnnnnnnnnnnnnnnnnnnnnnnnnnnnnnnnnnnnnnnnnnnnnnnnnnnnnnnnnnnnnnnnnnnnnnnnnnnnnnnnnnnnnnnnnnnnnnnnnnnnnnnnnnnnnnnnnnnnnnnnnnnnnnnnnnnnnnnnnnnnnnnnnnnnnnnnnnnnnnnnnnnnnnnnnnnnnnnnnnnnnnnnnnnnnnnnnnnnnnnnnnnnnnnnnnnnnnnnnnnnnnnnnnnnnnnnnnnnnnnnnnnnnnnnnnnnnnnnnnnnnnnnnnnnnnnnnnnnnnnnnnnnnnnnnnnnnnnnnnnnnnnnnnnnnnnnnnnnnnnnnnnnnnnnnnnnnnnnnnnnnnnnnnnnnnnnnnnnnnnnnnnnnnnnnnnnnnnnnnnnnnnnnnnnnnnnnnnnnnnnnnnnnnnnnnnnnnnnnnnnnnnnnnnnnnnnnnnnnnnnnnnnnnnnnnnnnnnnnnnnnnnnnnnnnnnnnnnnnnnnnnnnnnnnnnnnnnnnnnnnnnnnnnnnnnnnnnnnnnnnnnnnnnnnnnnnnnnnnnnnnnnnnnnnnnnnnnnnnnnnnnnnnnnnnnnnnnnnnnnnnnnnnnnnnnnnnnnnnnnnnnnnnnnnnnnnnnnnnnnnnnnnnnnnnnnnnnnnnnnnnnnnnnnnnnnnnnnnnnnnnnnnnnnnnnnnnnnnnnnnnnnnnnnnnnnnnnnnnnnnnnnnnnnnnnnnnnnnnnnnnnnnnnnnnnnnnnnnnnnnnnnnnnnnnnnnnnnnnnnnnnnnnnnnnnnnnnnnnnnnnnnnnnnnnnnnnnnnnnnnnnnnnnnnnnnnnnnnnnnnnnnnnnnnnnnnnnnnnnnnnnnnnnnnnnnnnnnnnnnnnnnnnnnnnnnnnnnnnnnnnnnnnnnnnnnnnnnnnnnnnnnnnnnnnnnnnnnnnnnnnnnnnnnnnnnnnnnnnnnnnnnnnnnnnnnnnnnnnnnnnnnnnnnnnnnnnnnnnnnnnnnnnnnnnnnnnnnnnnnnnnnnnnnnnnnnnnnnnnnnnnnnnnnnnnnnnnnnnnnnnnnnnnnnnnnnnnnnnnnnnnnnnnnnnnnnnnnnnnnnnnnnnnacccctgagctgagccgggaggcatgccgctctgagtccgcactatccctgcccgagagccaggctctcctcacgcctgtgaagagcagggccggcagagccagccatgcctactgcccctttgaggaagacctgatttctaaagaaggctcttttatgagccttaagcggctttctctggacagtgaattgcccctcatggacaatccctatgacctggccaacagtgacctgtctcatacagacccagaaaaaccctgacctggggatggaggccacacataatacaaaaagcatgggtgcttatgatggctcggccggacagtccgaagattactaaggcaaatcaacttttgaaagtgaatagtccggaggtggagcagccgccggtcagtcagcatcagaaatccatgctctaagacctggctgccatcttggaagagaagaagccaggtagggcccgccattggtnnnnnnnnnnnnnnnnnnnnnnnnnnnnnnnnnnnnnnnnnnnnnnnnnnnnnnnnnnnnnnnnnnnnnnnnnnnnnnnnnnnnnnnnnnnnnnnnnnnnnnnnnnnnnnnnnnnnnnnnnnnnnnnnnnnnnnnnnnnnnnnnnnnnnnnnnnnnnnnnnnnnnnnnnnnnnnnnnnnnnnnnnnnnnnnnnnnnnnnnnnnnnnnnnnnnnnnnnnnnnnnnnnnnnnnnnnnnnnnnnnnnnnnnnnnnnnnnnnnnnnnnnnnnnnnnnnnnnnnnnnnnnnnnnnnnnnnnnnnnnnnnnnnnnnnnnnnnnnnnnnnnnnnnnnnnnnnnnnnnnnnnnnnnnnnnnnnnnnnnnnnnnnnnnnnnnnnnnnnnnnnnnnnnnnnnnnnnnnnnnnnnnnnnnnnnnnnnnnnnnnnnnnnnnnnnnnnnnnnnnnnnnnnnnnnnnnnnnnnnnnnnnnnnnnnnnnnnnnnnnnnnnnnnnnnnnnnnnnnnnnnnnnnnnnnnnnnnnnnnnnnnnnnnnnnnnnnnnnnnnnnnnnnnnnnnnnnnnnnnnnnnnnnnnnnnnnnnnnnnnnnnnnnnnnnnnnnnnnnnnnnnnnnnnnnnnnnnnnnnnnnnnnnnnnnnnnnnnnnnnnnnnnnnnnnnnnnnnnnnnnnnnnnnnnnnnnnnnnnnnnnnnnnnnnnnnnnnnnnnnnnnnnnnnnnnnnnnnnnnnnnnnnnnnnnnnnnnnnnnnnnnnnnnnnnnnnnnnnnnnnnnnnnnnnnnnnnnnnnnnnnnnnnnnnnnnnnnnnnnnnnnnnnnnnnnnnnnnnnnnnnnnnnnnnnnnnnnnnnnnnnnnnnnnnnnnnnnnnnnnnnnnnnnnnnnnnnnnnnnnnnnnnnnnnnnnnnnnnnnnnnnnnnnnnnnnnnnnnnnnnnnnnnnnnnnnnnnnnnnnnnnnnnnnnnnnnnnnnnnnnnnnnnnnnnnnnnnnnnnnnnnnnnnnnnnnnnnnnnnnnnnnnnnnnnnnnnnnnnnnnnnnnnnnnnnnnnnnnnnnnnnnnnnnnnnnnnnnnnnnnnnnnnnnnnnnnnnnnnnnnnnnnnnnnnnnnnnnnnnnnnnnnnnnnnnnnnnnnnnnnnnnnnnnnnnnnnnnnnnnnnnnnnnnnnnnnnnnnnnnnnnnnnnnnnnnnnnnnnnnnnnnnnnnnnnnnnnnnnnnnnnnnnnnnnnnnnnnnnnnnnnnnnnnnnnnnnnnnnnnnnnnnnnnnnnnnnnnnnnnnnnnnnnnnnnnnnnnnnnnnnnnnnnnnnnnnnnnnnnnnnnnnnnnnnnnnnnnnnnnnnnnnnnnnnnnnnnnnnnnnnnnnnnnnnnnnnnnnnnnnnnnnnnnnnnnnnnnnnnnnnnnnnnnnnnnnnnnnnnnnnnnnnnnnnnnnnnnnnnnnnnnnnnnnnnnnnnnnnnnnnnnnnnnnnnnnnnnnnnnnnnnnnnnnnnnnnnnnnnnnnnnnnnnnnnnnnnnnnnnnnnnnnnnnnnnnnnnnnnnnnnnnnnnnnnnnnnnnnnnnnnnnnnnnnnnnnnnnnnnnnnnnnnnnnnnnnnnnnnnnnnnnnnnnnnnnnnnnnnnnnnnnnnnnnnnnnnnnnnnnnnnnnnnnnnnnnnnnnnnnnnnnnnnnnnnnnnnnnnnnnnnnnnnnnnnnnnnnnnnnnnnnnnnnnnnnnnnnnnnnnnnnnnnnnnnnnnnnnnnnnnnnnnnnnnnnnnnnnnnnnnnnnnnnnnnnnnnnnnnnnnnnnnnnnnnnnnnnnnnnnnnnnnnnnnnnnnnnnnnnnnnnnnnnnnnnnnnnnnnnnnnnnnnnnnnnnnnnnnnnnnnnnnnnnnnnnnnnnnnnnnnnnnnnnnnnnnnnnnnnnnnnnnnnnnnnnnnnnnnnnnnnnnnnnnnnnnnnnnnnnnnnnnnnnnnnnnnnnnnnnnnnnnnnnnnnnnnnnnnnnnnnnnnnnnnnnnnnnnnnnnnnnnnnnnnnnnnnnnnnnnnnnnnnnnnnnnnnnnnnnnnnnnnnnnnnnnnnnnnnnnnnnnnnnnnnnnnnnnnnnnnnnnnnnnnnnnnnnnnnnnnnnnnnnnnnnnnnnnnnnnnnnnnnnnnnnnnnnnnnnnnnnnnnnnnnnnnnnnnnnnnnnnnnnnnnnnnnnnnnnnnnnnnnnnnnnnnnnnnnnnnnnnnnnnnnnnnnnnnnnnnnnnnnnnnnnnnnnnnnnnnnnnnnnnnnnnnnnnnnnnnnnnnnnnnnnnnnnnnnnnnnnnnnnnnnnnnnnnnnnnnnnnnnnnnnnnnnnnnnnnnnnnnnnnnnnnnnnnnnnnnnnnnnnnnnnnnnnnnnnnnnnnnnnnnnnnnnnnnnaacatattcgattttatgaaagattgcagttaatgcagcaagaatgctttctcaagcagtggcctttgtattctcattntaatcaggtgtacattctacagcctctctaccatgctcttagtttctattttaaaagatacaataatatatgtagggaaagaggcctgggctcttcatttaaaggtaagcagtaatattgagtaagtgacataattctttctctttgtaagtcctaatgcctctttttcttaattgtaaaacataaaatatgagcatttttatcttacaaataggtacctaaggcatttgattttctttttaaataacaaaaaataacccaagtttcttgcttctccaaagtattcttcttatagcttataaaggaaagtccacattgaatggcatggtctggaaacattccttctttattgtctttatttgaacatgatatgagttttcaagatgaaacaatcaaaaataagtaccacaagaannnnnnnnnnnnnnnnnnnnnnnnnnnnnnnnnnnnnnnnnnnnnnnnnnnnnnnnnnnnnnnnttgcccaagctggagtgcaatcttggctcactgcaacctccacctccccggttccagcgattctcctgcctcagcctcttgagtagctgggattacaggtgcccaccaccacacctggctaatttttgtgttgttagtagagacggggtttcatcatgttggccaggctggtctcaaactcgtgacctcatgatccatccgcctcggcctcccaaattgctgggattacaggcatgagccactgcacctggccaagaaagtatgttcttagaggtgtgtgtaagtgcatttgtagtacctatgagcaaaatcacctgactctgtcccaggaaag

SEQ ID NO: 30529 - DNA, 627 bp, Macaca Mulatta
tctgactgtgcagttttacttttgcctttttctaggtgtaattatagcctctcacatttgtgtagcacattgagcctttcagaacacttgtgtatgtcccatttgatgagtgcgttttcacacttgccgtcgattttcttttgtagactgatccgtcaatcatgggtggaatgattgtgcgcattggagagaagtatgttgacatgtctgtcaggaccaagattcagaagctgggcagggctatgcgggaggctgtctaagtgttggttttctgccatcagtgaaaattcttaaacttggagcaacaataaaaagcttccagaacaggtcatattatgttcactgtcttttaaagtggagtgtagaaggcttcatttttatgtccttttttggtatcccctgagtataaaggccaaaaagcccttttggcctagagaatttggtttgagtagattacgtttaggaattaatgggttagacacagcatctaacacatggtcactcggcaaagtctatctggtcctgcctgccaaaatcccatgtctttaagggcttgttcagaactcctggtccctgctagatcgttggatctgtgtttgctccatagtcctccagggagacctcttc

SEQ ID NO: 30530 - DNA, 789 bp, Macaca Mulatta
tgaagcagtgtttatcatggtaaacttcatagatcctcccttatttaacatcagaaaaaatttatactggggaaaagttgtatgaatgtggtgaatatgggagacttttagcaatgatgcagacatttttatttatcagagtttatactgtagagaaatcatatgaagtcaataaatgtgggaaagcctttgtcagtattaatcccttaattgacataagtatactcacactaggaaaaaactgtgtacatgtagcaaatgtgggaaagactataggcgataggaatctcgtacaaactcctacaggaaaaaagttgtatgaatgtggaaaatttagaaattgaaggaattcttcagttccaagtgcattccttattctacaggaaataaactggagagaaatctcatcatataagagatgtagcaaagtgttcactaagagtgtttatcttgctagacatcagaagatgaatggtagagcaacctgaaggatttagaaattacatgtaaatctgcagtggtgctatttgtaaacaggattctataggagagcaaataaacataattaagtatgcctttcttagagcagtagcttgcagtttcagttgggttctacttagaaattctttttagctagtgggcatgtgaagatatttagtcacccagaggagccagtaaatattataatgttaaaaattaaagctgcaaaagaaataaaatggtgttaataaaagtttggtatctaataagatcattttgtatatcatgaagtctttctctgtgactgtt

SEQ ID NO: 30531 - DNA, 524 bp, Macaca Mulatta
cccaccctccagcccccaactcttcctgcagacaagctggtgtctaagaactacccggatctgtccttgggagactactctctgctctggaaagcccacaagaagctcacccgctcagccctgctgctgggcatgcgtgactccatggagcccgtggtggagcagctgacccaggagttctgcgaggtaaggctgggctcccgaggccacctcaggtcagcctcacctctcgaagtagctccttttttgcctgctgcacaccggcctgctgaactcgcattccttctccacagcgcatgagagcccaggccggcacccctgtggccattgaggaggaattctctctcctcacctgcagcatcatctgtcacctcaccttcggagacaagatcaaggtggctcacagcccctccggccacccccagcccctccctgagcctctccttgtcctgaactgaaagcacgccctccttttctgggaggaggacaacttagtgcctgcctattacaaatgtatccaggag

SEQ ID NO: 30532 - DNA, 564 bp, Macaca Mulatta
gaacccattccacctgcagctgcactgggccagccccctggagacactgctggatgtgctggtggcggtgctgcaggcgcacgcctgggaagacgtcggcctggccctgtgccgcacccgggaccccagcgacctggtggccctctggacaagccgggctggccgggccccacagctggtcctggacctaagccggcgggacacgggagatgcaggactgcgggcactcctggccccgatgggggcaccagtggggggtgaagcaccagtacccgcggcggtcctcctcggctgcgacgttgcccgtgcccgtcgggtgctggaggccgtacctcccggcccccactggctgttggggacgccattgccacccaaggccctgcccaccgcagggctgccgccagggctgctggcgctgggcgaggtggcacgacccccgctggaggctgccatccatgacaccgtgcagctggtggcccgggcgctgggcagtgcagccaaggtgcagccagagcgtgccctcctccccaccgcagtcaactgcggggacctgcagccggccgg

SEQ ID NO: 30533 - DNA, 276 bp, Macaca Mulatta
ggtctggagcccgcaactcccttgacagtgtacgctggagcaggttccagggtggagctgccctgccgcctgcctcctgctgtggggacccagtctttccttactgccaagtgggctcctcctgggggaggccctgacctcctggtggctggagacaatggcgactttacccttcgactagaggatgtaagccaggcccaggctgggacctacatctgccatatccgtctacagggacagcagctcaatgccactgtcacattggcaatcatcaca

SEQ ID NO: 30534 - DNA, 1025 bp, Macaca Mulatta
  misc_feature (1)...(1025): n = A,T,C or G
gttagttgacaattatatcaaatgnnnnnnnnnnnnnnnnnnntacaacgttcacggtgttgtcacaatttttggtgggaaaaacatgtgtgtatctctatgtctatatgtttactagaaaacctccaagagatataaaattaaataatagccagttcttaaaagttaacttgaaaatcctcgttgataattcagcagcatgcttccattcatcctatatagtttctgtcctggtgaggagcatggttaccaacaggcaagatcctctggccttgaagtttcacttgagttaaaagagctcatctcagataagtaacaggccaagaatgatgggcactgtgaccaccaaccaacttgcagatccattctactccaaaggaccgggccgcggtacagggtggactgaagcagaacgtgccattcttgctgctcacggaattgctgacttggcaagtataacacctggagtgtttgtgtgccttaagggtggtttcaagaacactgttctggatctccttcgggagttccccataccaggtgtagtttacagactcgccaggtatgacacatgacagtttcagataacagttgtcatccacatcttctctcttctcaattttgatgacaggcttgggtacagggtcaagcacctgcagcttgatcttccattcttgctcatacccatcctttttcaacaccctcatgacgtaggtgctgttgtcctctttctggaccttagagatgtacagtgcaccactttgaggatcaagtctgaccctgcctttaaatttggattcaaagtacttagattttctggaatcccattctacaatcttctggtcgaaagtataaaaccaggttagttgtttgtagttctcaggcaggctctcagagatgttcagagtaacattgctgccggagaccacggtcatatgtaccaagtgaccttgaatgctgatcgccaggagtgacagagacagcagtagcaattccagagccagacccgattccaacctctggagccc

SEQ ID NO: 30535 - DNA, 108 bp, Macaca Mulatta
gtggctttaccggcgtgagactacatttcccgccggccctcgcggcgcgcgccggctggcgccccctttctgcgtccagcctcataggccaggtgcatggacccctta

SEQ ID NO: 30536 - DNA, 672 bp, Macaca Mulatta
  misc_feature (1)...(672): n = A,T,C or G
tctgcaaccaccactccatcagggtctcctcggacctctcaacaaaacgtttataatccttcacaaggttctacgtggaatcccttcaatgacgataatttctccaaactcacagctgaagaactgctaaacannnnnnnnnnnnnnnnnnnnnnnnnnnnnnnnnnnnnnnnnnnnnnnnnnnnnnnnnnnnnnnnnnnnnnnnnnnnnnnnnnnnnnnnnnnnnnnnnnnnnnnnnnnnnnnnnnnnnnnnnnnnnnnnnnnnnnnnnnnnnnnnnnnnnnnnnnnnnnnnnnnnnnnnnnnnnnnnnnnnnnnnnnnnnnnnnnnnnnnnnnnnnnnnnnnnnnnnnnnnnnnnnnnnnnnnnnnnnnnnnnnnnnnnnnnnnnnnnnnnnnnnnnnnnnnnnnnnnnnnnnnnnnnnnnnnnnnnnnnnnnnnnnnnnnnnnnnnnnnnnnnnnnnnnnnnnnnnnnnnnnnnnnnnnnnnnnnnnnnnnnnnnnnnnnnnnnnnnnnnnnnnnnnnnnnnnnnnnnnnnnnnnnnnnnnnnnnnnnnnnnnnnncagattctctcaccggggaagattccctgcttgattgttctctgctctctaaccctactactgaccttctggaagagtttgcccccacagcaatctctgctccagtccataaa

SEQ ID NO: 30537 - DNA, 709 bp, Macaca Mulatta
gcatcccaaatatctgctaacagctctactgatttctctttccatctgactcctagctgctctgaactagattttacactgcatccagaattagcagattccccagggacaaaacacaactacaaagctacctgccttctgagattcttacctctccagagacatacccacagtagttctctttgattctctcgtgcattcaaagaatgactttcatcaggctattctagttgttttagctaaaaccactaatctactgccagctgtcccaccctacctggaaacaggtgctttccatgtactactttaagtgattcaataaatgtcacaaattcaaggccaaagtcactttttcacttatttaccatttttgttaaaggctatcaagacattctttatgcacaaaacaccattgatcataataaaaacatgcatataatcaattcattcctcaagaaatatcctatttcactgaatctaatggggtgataattgtaaaacaatttatgtgctacgaaaaaagaaactagactgaaataaggcagtctaagaactcccaaataaagctggaacaccaaaagataattggcaactataagacacattatgtaatttcaactaagaaaaaaagactgattaggtgtctaaggaagaccttcaaataaagcttagacaccaacctgttctcacagttaaagtgagaaataag

SEQ ID NO: 30538 - DNA, 263 bp, Macaca Mulatta
  misc_feature (1)...(263): n = A,T,C or G
cagatataatttccacagtagaatttaatcattctggagaattactagcaacaggagataaaggtggtagagtcgtcatctttcannnnnnnnnnngaacaaaatccagtctcatagcagaggagaatataatgtttacagcaccttccagagccatgaaccagagtttgactacttgaaaagtttagaaatagaagaaaagatcaacaaaattaggtggttaccccagaaaaatgctgctcagtttttattgtctaccaatg

SEQ ID NO: 30539 - DNA, 690 bp, Macaca Mulatta
gttgcttactgttgccgctttgatgtgcaagtccactcccatctggtctacttcgtggcctgcactttggcctatgccgtgggcctgctggtcacgttcatggccatggtactcatgcagatgggccaacctgccttgctctacctagtgtccagcaccctgctcaccagcctggctgtggccacctgccgccaagagctcagcctcttctggaccggccagggcagagctaagatgcttgggctctgctgtgccccttcagctggctctaggcagaagcaggaggttttatcagatgcccacacagccagcacacttgatagaggcaccaaccgaggagcaggggacttagacagcaactctggagaagacaccactgagattgtcaccatgtctgagaatgaagccaccaatccagaggaccgtagtgatagctccgagggctggagtgatgcccacctggatcctaatgagctgcccttcatcccccctggggcctcggaggagctgatgccactgatgccaatggccatgctgatcccactcatgcccctgatgcccccgccctcagagctgggccacgtccatgcccaggcccaggcccatgacactggcctgccctgggcaggactccacaagaggaagggtttgaaagtaagaaagagcatgtcgacccaggctcccttgtga

SEQ ID NO: 30540 - DNA, 966 bp, Macaca Mulatta
ggcagcaagaaaggggcgagggagacctggcaggcacagttgtgacgaggacggctgggagagcgacagctgcacgaaccggctgaggaggctagtggaggccgctcatttctggagaccactcagaggagagaccaggggttcctgcaagtgagggcaggtcagggctctgcaggaccccggtgaggagcaggcacggctggccagagccgctcacccaccgggtgcgctgccgcccacggccaggcctggtggaagggctggctgcttgctcaggcagtaccgctgcaggatctctgaggaggccagagttgctctctggaaggtgtctcaagaaactctttctttttcaggaccacatttaaggagtttgcggagaaatacggccgggatcagaggttccgacttgttcaaaaaagaaaggaccaggagcattttttcaaccaattcatacttattcttaagaaacgggacaaggaaaacagactaaggctgcggaaaatgagatgagtttgtgaaaaatgcaataagcccgggggttggccctgggcgtgccgggggcgaggaggtcacggtggagacagacacgggcgtggggcggccggcacctgcacgacccagcgggcaccggcactgcggggtcttcgttctcagaggattactgtttcatattgaagctctctcttttgtacgttcagagtttgatgcatttctaattgtcatgatacgtcgatctcttgattgttttaattatgcaaattacttgtaatatacacaaattatcaatccactgcaggactgtggggaagcgggaacaggagcctccgtaaccatctcaaggcatttgtgtcatcacctgagacgattagcgaaaattttctgaaaaacttttgtgaattacttcgctcctccaggattcccgcggcgttgaggaattccttcctctgtccctaggtctcagtctcg

SEQ ID NO: 30541 - DNA, 673 bp, Macaca Mulatta
gcagcaatcagactctcagtcctcagatgtggaaataaaaacaaaacacctgtatggctgccattctcttcagccctcgctctccccctttccacagcctccacccctgacccccatcctcttttcctacctctctgtttggtttagaaattgctcaataagtcatttggggtttggcatcctgcccagccacttcccaaacatgaagacctctctgttgctttatgttgtacatgccccgtagccatcccaacgtcctccccagtcctctcctggcaccagcaccttagaagttgttggcagaaggcacttaaactgtgggagaaacgtgcacacctttgagtaccttccctcaaggttaaagctcctgtcagactctcagaagggtctgtaggtgttgtgtattaggcaaacgggaaagcttagaggtccttctatatatgttaataagctgtttctaagtgtttaaatttgaaggggaagcatcatgttctcatgatttatgggaatgaagcaagtactgaaatcaaactaaatactccctgggccctgggtcagtttgaccctagccccggggtgaggcaagccccctcctatgaggatgagcaaaaattctactctcttcaccctgagttgctttccggatctggggcttcaggacttgctgcttcag

SEQ ID NO: 30542 - DNA, 2039 bp, Macaca Mulatta
  misc_feature (1)...(2039): n = A,T,C or G
tgcaggtcattgggatcccacccagcatccagcagctggtcctgcagctggtggcggggatcttgcacctagggaacatcagtttctgtgaagacgggaattacgcccgagtggagagtgtggaccntcctggcctttcccgcctacctgctgggcattgacagtgggcgactgcaggagaagctgaccagccgcaagatggacagccgctggggcgggcgcagtgagtccatcgatgtgaccctcaacgtggagcaggcagcctacacccgcgacgccctggccaaggggctctatgcccgcctcttcgacttcctcgtggaggcgagnnnnnnnnnnnnnnnnnnnnnnnnnnnnnnnnnnnnnnnnnnnnnnnnnnnnnnnnnnnnnnnnnnnnnnnnnnnnnnnnnnnnnnnnnnnnnnnnnnnnnnnnnnnnnnnnnnnnnnnnnnnnnnnnnnnnnnnnnnnnnnnnnnnnnnnnnnnnnnnnnnnnnnnnnnnnnnnnnnnnnnnnnnnnnnnnnnnnnnnnnnnnnnnnnnnnnnnnnnnnnnnnnnnnnnnnnnnnnnnnnnnnnnnnnnnnnnnnnnnnnnnnnnnnnnnnnnnnnnnnnnnnnnnnnnnnnnnnnnnnnnnnnnnnnnnnnnnnnnnnnnnnnnnnnnnnnnnnnnnnnnnnnnnnnnnnnnnnnnnnnnnnnnnnnnnnnnnnnnnnnnnnnnnnnnnnnnnnnnnnnnnnnnnnnnnnnnnnnnnnnnnnnnnnnnnnnnnnnnnnnnnnnnnnnnnnnnnnnnnnnnnnnnnnnnnnnnnnnnnnnnnnnnnnnnnnnnnnnnnnnnnnnnnnnnnnnnnnnnnnnnnnnnnnnnnnnnnnnnnnnnnnnnnnnnnnnnnnnnnnnnnnnnnnnnnnnnnnnnnnnnnnnnnnnnnnnnnnnnnnnnnnnnnnnnnnnnnnnnnnnnnnnnnnnnnnnnnnnnnnnnnnnnnnnnnnnnnnnnnnnnnnnnnnnnnnnnnnnnnnnnnnnnnnnnnnnnnnnnnnnnnnnnnnnnnnnnnnnnnnnnnnnnnnnnnnnnnnnnnnnnnnnnnnnnnnnnnnnnnnnnnnnnnnnnnnnnnnnnnnnnnnnnnnnnnnnnnnnnnnnnnnnnnnnnnnnnnnnnnnnnnnnnnnnnnnnnnnnnnnnnnnnnnnnnnnnnnnnnnnnnnnnnnnnnnnnnnnnnnnnnnnnnnnnnnnnnnnnnnnnnnnnnnnnnnnnnnnnnnnnnnnnnnnnnnnnnnnnnnnnnnnnnnnnnnnnnnnnnnnnnnnnnnnnnnnnnnnnnnnnnnnnnnnnnnnnnnnnnnnnnnnnnnnnnnnnnnnnnnnnnnnnnnnnnnnnnnnnnnnnnnnnnnnnnnnnnnnnnnnnnnnnnnnnnnnnnnnnnnnnnnnnnnnnnnnnnnnnnnnnnnnnnnnnnnnnnnnnnnnnnnnnnnnnnnnnnnnnnnnnnnnnnnnnnnnnnnnnnnnnnnnnnnnnnnnnnnnnnnnnnnnnnnnnnnnnnnnnnnnnnnnnnnnnnnnnnnnnnnnnnnnnnnnnnnnnnnnnnnnnnnnnnnnnnnnnnnnnnnnnnnnnnnnnnnnnnnnnnnnnnnnnnnnnnnnnnnnnnnnnnnnnnnnnnnnnnnnnnnnnnnnnnnnnnnnnnnnnnnnnnnnnnnnnnnnnnnnnnnnnnnnnnnnagcacgcgacaggacgacttcttcatcctccaagaggacgccgtcgacagcttcctggagagcgtcttcaagaccgagttcgtcagccttctgtgcaagcgcttcgaggaggcaactcggaggcccctgcccctcaccttcagcgacacnnnnnnnnnnnnnnnnnnnnnnnnnnnnnnnnnnnnnnnnnnnnnnnnnnnnnnnnnnnnnnnnnnnnnnnnnnnnnnnnnnnnnnnnnnnnnnnnnnnnnnnnnnnnnnnnnnnnnnnnnnnnnnnnnnnnnnnnnnnnnnnnnnnnnagcctacgcggaagggaatggccaagggaagacctcgaaggtcg

SEQ ID NO: 30543 - DNA, 147 bp, Macaca Mulatta
aggagaatatttctccaccttgcttacccatctcccagtttttttggaattttctctagctgttactccagaggattatgtttctttcaaagccttctgtgtacatctcttttttcacctgtgtcctccaactcagccacagctggt

SEQ ID NO: 30544 - DNA, 810 bp, Macaca Mulatta
  misc_feature (1)...(810): n = A,T,C or G
ggtatcattaacccaatcgaagccaagcagagaaagggaaaaggtgctgtgggggcttatggatccgagcgcaccacgcagtcaatgcaagacttccctgtggttgactcagaggaagaagctgaagaggnnnnnnnnnnnnnnnnnnnnnnnnnnnnnnnnnnnnnnnnnnnnnnnnnnnnnnnnnnnnnnnnnnnnnnnnnnnnnnnnnnnnnnnnnnnnnnnnnnnnnnnnnnnnnnnnnnnnnnnnnnnnnnnnnnnnnnnnnnnnnnnnnnnnnnnnnnnnnnnnnnnnnnnnnnnnnnnnnnnnnnnnnnnnnnnnnnnnnnnnnnnnnnnnnnnnnnnnnnnnnnnnnnnnnnnnnnnnnnnnnnnnnnnnnnnnnnnnnnnnnnnnnnnnnnnnnnnnnnnnnnnnnnnnnnnnnnnnnnnnnnnnnnnnnnnnnnnnnnnnnnnnnnnnnnnnnnnnnnnnnnnnnnnnnnnnnnnnnnnnnnnnnnnnnnnnnnnnnnnnnnnnnnnnnnnnnnnnnnnnnnnnnnnnnnnnnnnnnnnnnnnnnnnnnnnnngtcctggaccatgaggagcgggtcatctccaacctcagcaaggtcctggagatggtggaggagtgcgagcggcggatgcagcccgactgcagcaaccccctcaccctggacgagtgtgcccgcatcttcgaaaccctgcaggacaagtactatgaggagtacaggatgtccgaccgtgtggacctcgccgtggccatcgtctatccactcatgaaggagtacttcaaggagtgggatcccctcaaag

SEQ ID NO: 30545 - DNA, 610 bp, Macaca Mulatta
  misc_feature (1)...(610): n = A,T,C or G
gggtacttatcagtatcttatatgttagcttgacctatgcagatcttattccagttccgcttacttatatgatcatttcaagagatgtaatgttgattgctgctgttttttatgtcagataccgaactcttccaacaccacgaacacttgccaagtatttcaatccttgctatgccacagctaggttaaaaccaacattcatcagcaaggtaaatacagcagtccaattaatcttggtggcagcttctttggcagctccagttttcaactatgctgacagcatttatcttcagatactgtggtgttttacagctttcaccacagctgcatcagcttacagttactatcattatggtcggaagactgttcaggtgataaaagactgatgaaagccatctatcaccgttagtatggaagcagtatacatcaatgggaacagggcccgtggaaatctaccggagtttccctattctggtgttcatcttgaaacaagaattgtcagaaccaccatgccatcaaaattaagtaatgtgcatcgaacaaaaggttgatcatgggaatatgcagaatttccactgtattctttaaaactaataaaaatataaaaaan

SEQ ID NO: 30546 - DNA, 809 bp, Macaca Mulatta
  misc_feature (1)...(809): n = A,T,C or G
gggggccccttctgcgaatggaccactggaggggttcaaaggttcgcgtcccaatacgggaatgagcctctttgatctcttccggggctttttcggctttcctggacctcggagccacagagatcccttttttggagggatgactcgagatgaagannnnnnnnnnnnnnnnnnnnnnnnnnggggttcatggggccgtgggaacccaaggttccatagtcctcagcacccccctgaggaatttggcttcggcttcagcttcagcccaggaggagggatacgtttccacgataacttcggctttgatgacctagtacgagatttcaatagcatcttcagcgatatgggggcctggaccttgccttcccatcctcctgaactcccaggtcctgagtcagagacacctggtgagagactgcgggagggacagacacttcgggactcaatgcttaagtatccagatagtcaccagcccaggatctttgggggggtcttggagagtgatggaagaagtgaatcccccaaaccagcaccagactggggctcccagagaccatttcatagtttttgatgacatatnggcctgtgagacccccatcctagaacctagagaggacaatgatctttgattcccaggttttcccaggaagggtctttggacccggtttctacagncccccggcgccaaatccctatgtccaaagaggcatcctctgttaacctaggatcgccttaaaacccagaatggggataattggtaaggaacccccccccggaactgttggatgagaacagttttagggggcccc

SEQ ID NO: 30547 - DNA, 1225 bp, Macaca Mulatta
  misc_feature (1)...(1225): n = A,T,C or G
atacatggaggaccacagctacaatgtggagcagatatggagggatattgaggacgtcatcatcaagaccctcatctcggcgcaccccatcgtcaggcataactaccacacctgcttccccagccacacactcagcagcgcctgctttgaggtcctgggcttcgacattttgttggaccgcagactcaaaccctggctgctggaggtnnnnnnnnnnnnnnnnnnnnnnnnnnnnnnnnnnnnnnnnnnnnnnnnnnnnnnnnnnnnnnnnnnnnnnnnnnnnnnnnnnnnnnnnnnnnnnnnnnnnnnnnnnnnnnnnnnnnnnnnnnnnnnnnnnnnnnnnnnnnnnnnnnnnnnnnnnnnnnnnnnnnnnnnnnnnnnnnnnnnnnnnnnnnnnnnnnnnnnnnnnnnnnnnnnnnnnnnnnnnnnnnnnnnnnnnnnnnnnnnnnnnnnnnnnnnnnnnnnnnnnnnnnnnnnnnnnnnnnnnnnnnnnnnnnnnnnnnnnnnnnnnnnnnnnnnnnnnnnnnnnnnnnnnnnnnnnnnnnnnnnnnnnnnnnnnnnnnnnnnnnggcagctgatccaggagctgagactaaaacgggaaaaaaagcccttccaaatgaagaagaaggtagagatgcagggggaatcggcaggcgagcaagtgagaaagaagggcgtgaggggctggcaacagaaacagcagcagaaagacaaggctgccacccaagcctccaaacagncagtacatccagccattgacattagtgtcctacgcacctgacttgctctcgagtgtcagagatgaaaggaaaaatgaaacagacagcagcttcaatgagaaagcccccatgaaggaggccggccctgtttccgccaagccgacgtctgcgaggccctccagttctgtaccagacctgaggaatatcagtctcagcagctccgagttggagcccagtaaacccaacttcagcgtaaaggaggccaagtctgcctctgcagtgaacgttttcgctggcactgtgnnnnnnnnnnnnnnnnnnnnnnnnnnnnnnnnnnnnnnnnnnnnnnnnnnnnnnnnnnnnnnnnnnnnnnnnnnnnnnnnnnnnnccagctctgagtacagtggcccagagatggataaggtggtatccttaaaagcaagaagcagcagccccctccacagttaatccagaaggaaatgttaaaacctcttctgcccaca

SEQ ID NO: 30548 - DNA, 541 bp, Macaca Mulatta
gtcttttgaagaggactagggacctctgggctctggaatcactcctcaggggccatctcaggagtggcagtgtgttcccatgtgacagtgacattttccctggtaatagagggtgctgcccacggccacagagagaaagctgacagcatagaatccagcccgaaggaggaggactgtaccagcccctagctgaggatattctttctccaccaccagccgagtcccattccctgtcccgacacccaggcccagcacctccaccctgcacacgtagatgccggcgtcatggcctcgcacgtcccagatatgcagctcagcctccttccctggagccacctcatctcggaaccatgtgacggagccaatggccagtctcccttggctggcattgaaggagcagggcaggaaggcagaggatccttctagggtacgaatctcagggggctgggacacccagagagcacaggatcctggatagaccatgatcaagatgagcaacagcatccaggccatgtcggaagatgtcccagttggcgaaggg

SEQ ID NO: 30549 - DNA, 573 bp, Macaca Mulatta
ggggagtctcccagttgcgagggcaagcaaacccatcatgagcatctcccttccccatctctgctcaccatgtggacgctgaaatggttcctggtcctgcttctgtgcctcacctgcagctatgcctctatgttctcttctcggagagagaaaagggagcgaaccccaggggaaggtggggggcggagggcactttgggattcgggagagtctaccggagtatgcccaaggctggcttgggagcaaatggctctggtttttgtttgttgttgtgctgtttgtgatactgaagtatcaaagagacagtgagaacaataaggagcagagtcctcctggccttcgatgcttcccatttcgcactccactaaagaaaaatcaaaatgcttcttttttccaagactgtacattctataccttacacgaactcgaggtggaacttgtgagatttgtgtccaatgtgctgattactaaatgtgctttgtccatcggctatgtttttacccctaactttaatggtcaaagtactttcatcatcaatctctgtcttatttttcatatctgggactatctacg

SEQ ID NO: 30550 - DNA, 109 bp, Macaca Mulatta
aaggtaccctcacctgagtcccaagtacaaggagtcttttgatgtgggctgtaacctctttgccaagttttctgcatacattaagaatacacaaaaggaggcaaataag

SEQ ID NO: 30551 - DNA, 892 bp, Macaca Mulatta
  misc_feature (1)...(892): n = A,T,C or G
gggatggaggctgcgccggagtgaagaggttctctccaccagctgtgtttggacgcgttcctgcccacccccttgctgtcatcccctccccccaaccttggccacctgagtttgtcctccaagggtaggtgtctgatttgttctggccccttggatttaaaaataaaattaatttcctgnnnnnnnnnnnnnnnnnnnnnnnnnnnnnnnnnnnnnnnnnnnnnnnnnnnnnnnnnnnnnnnnnnnnnnnnnnnnnnnnnataatgagggagccttaatcgcccctcgaaaaagatacataggcgtttccgttctggccccctggacaggttttgtaaattaatctttttggaacctgggtcccctggggtaccggccaagggatatagtttttctctatgaatttttgacctcactgggggcttcgaccccgccagacaaaacacacctggtgtccaaagggcctggggaatgaacccaaagggagtcccgggggtcttactgtaccttacacccgaccttgaagccctcccaaaatgaaattataaccccgaaatggcctttgtcgcacatgggtgttgttcgtcataggaaaaattttccccccaaatgggaaaagcacccctcccggccctggttgacccttgattgcccgggtttacaaacaaaatttgtttggggtgtaaaacaaaatttttgccccttgtggcaaaatggggggcccaaaaaaaaagttgaaaaatttgggacaacgggttttaatttctaaaagcggggaaaaactccaccccttgtgtccctgtttnnnnnnnnnnnnnnnnnntaattgttaaaaacgaaccctctttctggaaaatggggaaaatattttttccacctttaaaccaccccg

SEQ ID NO: 30552 - DNA, 2675 bp, Macaca Mulatta
  misc_feature (1)...(2675): n = A,T,C or G
aggttatgaagccctggagggcccgaaggaaatcagtaggttcgaaggggacactgtgtccctgcggtgcacctatagggaagagctgagggaccaccggaagtactggtgcaggaagggtgggctcctcttccctcgctgctctggcaccatctatgcgggaaaagaaggccaggagacgacagagggcagggtgtccatccatgacaaccgccaggagctctcgctaattgtgacactgtggaacctcaccctacaagacgctgggaagtactggtgtggggtcgaaaaacggggccccgatgagtctttactgatatctctgttcgtctttccaggnnnnnnnnnnnnnnnnnnnnnnnnnnnnnnnnnnnnnnnnnnnnnnnnnnnnnnnnnnnnnnnnnnnnnnnnnnnnnnnnnnnnnnnnnnnnnnnnnnnnnnnnnnnnnnnnnnnnnnnnnnnnnnnnnnnnnnnnnnnnnnnnnnnnnnnnnnnnnnnnnnnnnnnnnnnnnnnnnnnnnnnnnnnnnnnnnnnnnnnnnnnnnnnnnnnnnnnnnnnnnnnnnnnnnnnnnnnnnnnnnnnnnnnnnnnnnnnnnnnnnnnnnnnnnnnnnnnnnnnnnnnnnnnnnnnnnnnnnnnnnnnnnnnnnnnnnnnnnnnnnnnnnnnnnnnnnnnnnnnnnnnnnnnnnnnnnnnnnnnnnnnnnnnnnnnnnnnnnnnnnnnnnnnnnnnnnnnnnnnnnnnnnnnnnnnnnnnnnnnnnnnnnnnnnnnnnnnnnnnnnnnnnnnnnnnnnnnnnnnnnnnnnnnnnnnnnnnnnnnnnnnnnnnnnnnnnnnnnnnnnnnnnnnnnnnnnnnnnnnnnnnnnnnnnnnnnnnnnnnnnnnnnnnnnnnnnnnnnnnnnnnnnnnnnnnnnnnnnnnnnnnnnnnnnnnnnnnnnnnnnnnnnnnnnnnnnnnnnnnnnnnnnnnnnnnnnnnnnnnnnnnnnnnnnnnnnnnnnnnnnnnnnnnnnnnnnnnnnnnnnnnnnnnnnnnnnnnnnnnnnnnnnnnnnnnnnnnnnnnnnnnnnnnnnnnnnnnnnnnnnnnnnnnnnnnnnnnnnnnnnnnnnnnnnnnnnnnnnnnnnnnnnnnnnnnnnnnnnnnnnnnnnnnnnnnnnnnnnnnnnnnnnnnnnnnnnnnnnnnnnnnnnnnnnnnnnnnnnnnnnnnnnnnnnnnnnnnnnnnnnnnnnnnnnnnnnnnnnnnnnnnnnnnnnnnnnnnnnnnnnnnnnnnnnnnnnnnnnnnnnnnnnnnnnnnnnnnnnnnnnnnnnnnnnnnnnnnnnnnnnnnnnnnnnnnnnnnnnnnnnnnnnnnnnnnnnnnnnnnnnnnnnnnnnnnnnnnnnnnnnnnnnnnnnnnnnnnnnnnnnnnnnnnnnnnnnnnnnnnnnnnnnnnnnnnnnnnnnnnnnnnnnnnnnnnnnnnnnnnnnnnnnnnnnnnnnnnnnnnnnnnnnnnnnnnnnnnnnnnnnnnnnnnnnnnnnnnnnnnnnnnnnnnnnnnnnnnnnnnnnnnnnnnnnnnnnnnnnnnnnnnnnnnnnnnnnnnnnnnnnnnnnnnnnnnnnnnnnnnnnnnnnnnnnnnnnnnnnnnnnnnnnnnnnnnnnnnnnnnnnnnnnnnnnnnnnnnnnnnnnnnnnnnnnnnnnnnnnnnnnnnnnnnnnnnnnnnnnnnnnnnnnnnnnnnnnnnnnnnnnnnnnnnnnnnnnnnnnnnnnnnnnnnnnnnnnnnnnnnnnnnnnnnnnnnnnnnnnnnnnnnnnnnnnnnnnnnnnnnnnnnnnnnnnnnnnnnnnnnnnnnnnnnnnnnnnnnnnnnnnnnnnnnnnnnnnnnnnnnnnnnnnnnnnnnnnnnnnnnnnnnnnnnnnnnnnnnnnnnnnnnnnnnnnnnnnnnnnnnnnnnnnnnnnnnnnnnnnnnnnnnnnnnnnnnnnnnnnnnnnnnnnnnnnnnnnnnnnnnnnnnnnnnnnnnnnnnnnnnnnnnnnnnnnnnnnnnnnnnnnnnnnnnnnnnnnnnnnnnnnnnnnnnnnnnnnnnnnnnnnnnnnnnnnnnnnnnnnattattattgttttttaagacagaatctcgctctgccacccaggctggagggcagtggcacgatttgcaacttccgcctcccacgttcaagcgattctcctgcctcagcctcccgagtagctgggattacaggcacgcaccaccacacctgggctaatttttgtatttttagtagagacagggtttcaccatgttggccaggctggtctcgaactcctgacctcatatgatcctcctgcttcagtctcccaaattactgggattacagggcgtgagccaccgcgcctggccttatttctttaaaaaagtgaaattaagagttgttcggtatgcaaaacttgcaaagatggagnnnnnnnnnnnnnnnnnnnnnnnnntgtcacccattgtctcaccagagactatcattatttcattttgttgtatttccttccactcttttcttctccacataatttgccggtgttctttttacagagcaattatcttgtatatacaactttgtatcctgccttttccactttattgttccatcactttattccagcacttctctgtgttttacagaactttttataaataaaatgttcatcagctgc

SEQ ID NO: 30553 - DNA, 1368 bp, Macaca Mulatta
  misc_feature (1)...(1368): n = A,T,C or G
agaggggccccgcgcgcggatctcgcgagagcgttagagggcggaagcgctattcgagcaggatgaggttcgtggtaacgttagtcctcctgagcgtcgcagcggnnnnnnnnnnnnnnnnnnnnnnnnnnnnnnnnnnnnnnnnnnnnnnnnnnnnnnnnnnnnnnnnnnnnnnnnnnnnnnnnnnnnnnnnnnnnnnnnnnnnnnnnnnnnnnnnnnnnnnnnnnnnnnnnnnnnnnnnnnnnnnnnnnnnnnnnnnnnnnnnnnnnnnnnnnnnnnnnnnnnnnnnnnnnnnnnnnnnnnnnnnnnnnnnnnnnnnnnnnnnnnnnnnnnnnnnnnnnnnnnnnnnnnnnnnnnnnnnnnnnnnnnnnnnnnnnnnnnnnnnnnnnnnnnnnnnnnnnnnnnnnnnnnnnnnnnnnnnnnnnnnnnnnnnnnnnnnnnnnnnnnnnnnnnnnnnnnnnnnnnnnnnnnnnnnnnnnnnnnnnnnnnnnnnnnnnnnnnnnnnnnnnnnnnnnnnnnnnnnnnnnnnnnnnnnnnnnnnnnnnnnnnnnnnnnnnnnnnnnnnnnnnnnnnnnnnnnnnnnnnnnnnnnnnnnnnnnnnnnnnnnnnnnnnnnnnnnnnnnnnnnnnnnnnnnnnnnnnnnnnnnnnnnnnnnnnnnnnnnnnnnnnnnnnnnnnnnnnnnnnnnnnnnnnnnnnnnnnnnnnnnnnnnnnnnnnnnnnnnnnnnnnnnnnnnnnnnnnnnnnnnnnnnnnnnnnnnnnnnnnnnnnnnnnnnnnnnnnnnnnnnnnnnnnnnnnnnnnnnnnnnnnnnnnnnnnnnnnnnnnnnnnnnnnnnnnnnnnnnnnnnnnnnnnnnnnnnnnnnnnnnnnnnnnnnnnnnnnnnnnnnnnnnnnnnnnnnnnnnnnnnnnnnnnnnnnnnnnnnnnnnnnnnnnnnnnnnnnnnnnnnnnnnnnnnnnnnnnnnnnnnnnnnnnnnnnnnnnnnnnnnnnnnnnnnnnnnnnnnnnnnnnnnnnnnnnnnnnnnnnnnnnnnnnnnnnnnnnnnnnnnnnnnnnnnnnnnnnnnnnnnnnnnnnnnnnnnnnnnnnnnnnnnnnnnnnnnnnnnnnnnnnnnnnnnnnnnnnnnnnnnnnnnnnnnnnnnnnnnnnnnnnnnnnnnnnnnnnnnnnnnnnnnnnnnnnnnnnnnnnnnnnnnnnnnnnnnnnnnnnnnnnnnnnnnnnnnnnnnnnnnnnnnnnnnnnnnnnnnnnnnnnnnnnnnnnnnnnnnnnnnnnnnnnnnnnnnnnnnagatcattgcttttgtcctggaaggaaaaagatctaaagtcacccggcggccaaaggccagtgactaccaacgtttggaccagaa

SEQ ID NO: 30554 - DNA, 663 bp, Macaca Mulatta
ccctctgtctcagttcccctcccctcatccttagcatgtcttgctggctcattgcagattgaccagatgttcgccgccttcccccctgacgtgactggcaacttgaactacaagaacctggtgcacatcatcacccacggagaagagaaggactaggagggagctggctgctgcgccctgggctcgtctttgcagagtggtccgtgccctcatctctctccccccagtactgcctctgtccccaccttgtctgttagctgtgtggctgccccatttatccacctccatcttctttgcagcctgggtggctacagataacctcatggccgcacatcctagagatggaaatctatccagaggctgtgttacaataaacaggaggttgtgtatttggtcatgacatttctctgacagatagtgcctcaagtaagaaaggcaaaagcagatgagttagtgacagccttgcagtcattattgaatcttggtgactctttatttaaggtagacctttgcagccactcaaaactgtttctattaaggaccatgttttactggaatgttacctggatgaccacagccctctcttccaaagagctcaagcatttagagggccttgcttccacgacatccttcccttaggatgccataggaatgcctctcctg

SEQ ID NO: 30555 - DNA, 641 bp, Macaca Mulatta
ccagaagatgtatgctgtgcgtctgtgggggaatcggggtggacagtgacaccgtctggaatgagatgcattcctccagtgctgtgcgcatggcggtgggctgcctgctggagctggccttcaaggtggctgcaggagagctcaagaatggatttgccatcatccggccgccaggacaccatgccgaggaatccacagccatgggattctgcttcttcaactctgtagccatcactgcaaaactcctacagcagaagttgaacgtgggcaaggtcctcatcgtggactgggacattcaccatggcaatggcacccagcaggcgttctacaatgacccctctgtgctctacatctcactgcatcgctatgacaacgggaacttctttccaggctctggggctcctgaagaggttggtggagggccaggtgtggggtacaatgtgaacgtggcatggacaggaggcgtggacccccccattggagacgtggagtaccttacagccttcaggacagtggtgatgcccattgcccacgagttctcacctgacgtggtcctagtctctgctgggtttgatgctgttgaaggacatctgtctcctctgggtggctactctgtcaccgccagatgttttggccacttg

SEQ ID NO: 30556 - DNA, 122 bp, Macaca Mulatta
agggtgactcccacaagcttgactttcggaacgacctcctgccctgccttccggggccctatggggccctgccccctgggcaggagctctcccacccggcctccctcttcactgcgactggt

SEQ ID NO: 30557 - DNA, 633 bp, Macaca Mulatta
  misc_feature (1)...(633): n = A,T,C or G
cagggagacactccatcacagtcactactgttgcctcagctgggaacattggggaggatggaatcctgagctgcacttttgaacctgacatcaaactttctgatatcgtgatacaatggctgaaggaaggtgttataggcttggtccatgagttcaaagaaggcaaagatgagctgtcggagcaggatgaaatgttcagaggccggacagcagtgtttgctgatcaagtgatagttggcaatgcctctctgcggctgaaaaatgtacaacttacagacgctggcacctacaaatgttacatcatcacttctaaaggcaaggggaatgctaaccttgagtataaaactggagnagccttcagcatgccagaggtgaatgtggactataacgccagctcagagaccttgcggtgtgaggctccccgatggttcccccagcccacagtggtctgggcatcccaagttgaccagggagccaacttctcggaagtctccaataccagctttgagctgaactctgagaatgtgaccatgaaggttgtgtctgtgctatacaatgttacgatcaacaacacatactcctgtatgattgaaaatgacattgccaaagcaacaggggatatcaaagtgacag

SEQ ID NO: 30558 - DNA, 660 bp, Macaca Mulatta
  misc_feature (1)...(660): n = A,T,C or G
ggggttaaggaagacagaaaatgttttctttgtgctcattgagtagttccagacagaagaataatacactctttaaaatatatttacctgttagttggaagtacccagaattatcagaaacaagagcaaaaaaaaaaagcttacacagcttcttagnnnnnnnnnnnnnnnnnnnnnnncataacaataaattgcctgtagcagcagtttaaaatcctattgtgaacaagctatattttcaccaatttacaatggaaagttgtgacaagtacaggttatcaagtttgcacttaactatgccaaaaaaagtttgaagcgctctattctcagacatgctgtattacttctcattcaagattgaaaaatatgaaggtatccaaactgctgtcttaatgtaaatgtaactatttttccttcaagtgttgactagggagtcggtttctctcttnaagacactcactgtaccactgagagcagctgtcatatttctggcnaaatgtgttacgtatctgacagctgtactttgtgtatgactgactaaaatggaaaaccgtagtgtctgtagggtgtgggttccgccaaggaacaacgatgttttatttctaactaaacccggtgttaaaagctaccgaagacgaagtcagcaaacttataatcctg

SEQ ID NO: 30559 - DNA, 648 bp, Macaca Mulatta
cagggatattttgcaccatttccctctgtacttatgccgccagtatctcttatgatttgaaccggctcccgaagctaatttatagcctgcctgccgatgtggaacatggttacagctggtccatcttttgcgcctggtgcagtttaggctttattgtggcagctggaggtctctgcatcgcttatccgtttattagccggaccaagattgcacagctaaagtctggcagagactccacggtatgactgtacgcactgggcctgtccacagtgcgagcgactccctgaggggaacggcgcggagttcaggattccaagcacaaagcggtcttttacattccaacctgttgcctgccagccctttctggattactgatagaaaatcatgcaaaacctcccaacctttctaaggacaagactactgtggattcaagtgctttaatgactatttatgctttgactgtgagaatagggagcagtgccatgggacatttctaggtgtagagaaagaagaaactgcagtggaaaaatttgtatgatttccatttatttcagaaagtttgtatataacaattacctgagagtcatttctatttgcaaaaggattcgtaacaaagcgagtataattttcttgtcattgtatcatgct

SEQ ID NO: 30560 - DNA, 221 bp, Macaca Mulatta
agagttgcgggtgctgatcgtggtgcttgagcagagccgtggttggtgacagcatgacgagcgaggtgatagaagacgagaagcaattctattccaaggccaagacctactggaaacaaatcccacccacggtggacggcatgcttggggggtatggccacatctccagcatcgacatcaacagctcccggaagtttctgcagaggtttttgagggtaggc

SEQ ID NO: 30561 - DNA, 2011 bp, Macaca Mulatta
  misc_feature (1)...(2011): n = A,T,C or G
ccatgactctctacaatgataattcaaatgtgtcatctaaagctctggaactggtattcagaccagctgactgaactcactgaccagcataggcatggttatttcaacagtaatagcatgtcaactggactcctatttgtaaatattatcaatctaagcaatcccgcttatcagtctactagtttgcttctttccaagagatgtcaaatcctcaagaatttgatggcttcttctgcagctataaccaaaaagaacctacacattataactcaggcccactgctggctcatgaagtgtgtaaagtagagccctccttccccagaaataagacaggacaataaaaggtggcatttttataatttacctggattccattggctggttttaccactcctatcagattctagtgtaattgtgtgatacccaaaccattagttttcccagtgatgatttaataaaattatgaaaaatcaggagagggagataattagttgctnnnnnnnnnnnnnnnnnnnnnnnnnnnnnnnnnnnnnnnnnnnnnnnnnnnnnnnnnnnnnttgtcgctcaagtttggagtgcagtggcatgatcatcagtgagtgtgagatcactgtaacctcaaattctaggctcaagtaatctttctgcctcagtctcctgagtattcaggactacagccacgcaccacaatatttttaaattattttgtagatatgggggtcttgctacgttttctagtctggtcttgaattgctggcctcaagcaatccattctccccttggcctcccaaaatgctggggattacaggcatgaaccatcatacctgnnnnnnnnnnnnnnnnnnnnnnnnnnnnnnnnnnnnnnnnnnnnnnnnnnnnnnnnnnnnnnnnnnnnnnnnnnnnnnnnnnnnnnnnnnnnnnnnnnnnnnnnnnnnnnnnnnnnnnnnnnnnnnnnnnnnnnnnnnnnnnnnnnnnnnnnnnnnnnnnnnnnnnnnnnnnnnnnnnnnnnnnnnnnnnnnnnnnnnnnnnnnnnnnnnnnnnnnnnnnnnnnnnnnnnnnnnnnnnnnnnnnnnnnnnnnnnnnnnnnnnnnnnnnnnnnnnnnnnnnnnnnnnnnnnnnnnnnnnnnnnnnnnnnnnnnngcaacatcacacctcccttattcctctaactgggacccttgtgccgtggagctctggtgaatggtaagagggagatggtctcacaggaagagtggctcttttctggtaggctgtggttcccagtacacccacaaagattagcagcattaggcagagtcccacggacagccttagatgggtcatggagggattatggtccgaagtaagcagcaacctaggaacatataaggtaatatttggcttggaataatgcctaggcttagtagataaaggggcattaccttnnnnnnnnnnnnnnnnnnnnnnnnnnnnnnnnnnnnnnnnnnnnnnnnnnnnnnnnnnnnnnnnnnnnnnnnnnnnnnnnnnnnnnnnnnnnggagacaatttcttggtctgttgcccaggctggagtgcagtggtgtgatcttggctcaccgtaacctcccaggctcaagcgattctcctacctcaaccttccaagtagctgggactacaggcgcatgccgggccaccacatctggctaaggggctttgcccttaaagatagagctcatgaaacctcacctcatccaagcattaggctaaacaggaaatcattaagagggactacagaacatgaaagtcgaaataaggtcaagatctaagtcttctagcatcttaaattattggaagaagagctaacttggcggcgagggaagtggcttaggggaagagtcagtctatggtctttaggtagctaggcacaatccctaacagtgcttaagaaaggaagggggccaggagtggtggcagtggctcccagcactttgggaggcagaggcggatgggttgctttagctacaggagttcgagacaagcctgggcaacatgg

SEQ ID NO: 30562 - DNA, 331 bp, Macaca Mulatta
  misc_feature (1)...(331): n = A,T,C or G
agatgtttcacaaagcagaagaattcttttctaaaacaacaaacaatgaagtggatgacatggacacatcagatacccagtggggctggttttacttggcagaatgtgggaagtggcacatgtttcagnagccggataccaacagtcagtgttcagttagcagtgaagatatcgaaaaaagcttcaaaacaaacccttgtggctccatttcttttactacttccaaattcagctacaagatagactttgcanncagaaatgaagcaaatgaatctcaccactggaaagcagcgcttaataaaaagagcccccttttctatcagtgctttca

SEQ ID NO: 30563 - DNA, 1246 bp, Macaca Mulatta
  misc_feature (1)...(1246): n = A,T,C or G
tggacagccccacgtccctcaccccaccccctattctgagtgccgatgacctcctgggctcacctaccctgcccgatggcaccaataacccttttgccttctccagccaggagctggcaagcctctttgcccctagcatggggctgcccgggggtggctccccaaccaccttcctattccggcccatgtccgagtcccctcacatgtttgactctccccccagccctcaggattctctctcggaccaggagggctacctgagcagctccagcagcagccacagtggctcagactccccgaccttggacaactcaagacgcctgcccatcttcagcagactttccatctcagatgactaagccagggtagggagggacctcctgcctactccagccccttccctgcacccacatcccataccctcttctccctacccatccaattccccacaggccctacattcacaaggttaagctcaannnnnnnnnnnnnnnnnnnnnnnnnnnnnnnnnnnnnnnnnnnnnnnnnnnnnnnnnnnnnnnnnnnnnnnnnnnnnnnnnnnnnnnnnnnnnnnnnnnnnnnnnnnnnnnnnnnnnnnnnnnnnnnnnnnnnnnnnnnnnnnnnnnnnnnnnnnnnnnnnnnnnnnnnnnnnnnnnnnnnnnnnnnnnnnnnnnnnnnnnnnnnnnnnnnnnnnnnnnnnnnnnnnnnnnnnnnnnnnnnnnnnnnnnnnnnnnnnnnnnnnnnnnnnnnnnnnnnnnnnnnnnnnnnnnnnnnnnnnnnnnnnnnnnnnnnnnnnnnnnnnnnnnnnnnnnnnnnnnnnnnnnnnnnnnnnnnnnnnnnnnnnnnnccactggcgacacaactgcaccttccctcatttcagtctcccgcannnnnnnnnnnnnnnnnnnnnnnnnnnnnnnnnnnnnnnnnnnnnnnnnnnnnnnnnnnnnnnnnnnnnnnnnnnnnnnnnagagttgttgccagactagggttttgggggaaatctgtcttgacattcaaaacctttttcttcccgatctgaatccctgttgactaatcttgcctgggtttgtgtaggtctgcaggaaggaaggctgaaaaagcggatgaagattttgacttaagtgggactttgtgatttaannnnnnnnnnnnnnnagtggggaggaaggggaagctagatggactaggagagacttgattttggtgctaaagttccccagttcatatgtgacatcttttt

SEQ ID NO: 30564 - DNA, 269 bp, Macaca Mulatta
tctatgggttggcagggatgccaggggtgatgggggtagttgactgtatccatgtggccatcaaggcaccaaatgctgaagacctctcctatgtgaaccgaaaaggcctgcattctttaaactgcctgatggtgtgtgacattagaggggcactaatgaccgtggagacaaactggccaggcagcctacaggactgtgccgtgctgcagcagtcttccctcggtagtcagtttgaagccggtatgcacaaagatagctggcttctgggt

SEQ ID NO: 30565 - DNA, 229 bp, Macaca Mulatta
  misc_feature (1)...(229): n = A,T,C or G
aggacttgtttttaattccaggaggtgcacttgcccagcttctggaaggtatcattgcttccacattagaaatgtctngtaaagcccttatgagatttataatggctacatctgtgatatcacttatactgctcatgtttattactntggtacgctgtaatccactgcagtttgctgggatcaatgaagattatgatgnnngggcagttgggaaacctcacggctcctt

SEQ ID NO: 30566 - DNA, 115 bp, Macaca Mulatta
ggcgggactgtccatctacgggaaccctcgccatggcctgttgctgttcatgatggctggcatgacagtgaccatgtacctcttccgggtaacagtgaccagtgactcccccaag

SEQ ID NO: 30567 - DNA, 752 bp, Macaca Mulatta
gcagcatcgctccttccccactctctgcccttcctttctacctctgctcctcttgctgtctctgcccgctctcgcctgcccccagactactgtgacttaaaaagagggaagaggagccagcgcccgagggggccacgggcggctggaggtccccattcagttgcactacaaacactgaccaaatatgcaaggaaggagttgtgtttgtttgttgttgtcccagacagtgttgtgagggacctgaggccctgccccatgtccaaccaggtggcaaggtggaaggaagcacaggcacacagaccgtgggtgggttccctcaccacggctgtgggcagtgcgaacatgtaatgcctttgggctaaaagtgactcgttgaccaagttggaaacggaatgctttcttactcgaaatggcttttgtaactattgatttctgaagctggttttatgagctgtgacagtgttaccgggttgggggtatgtgtttatttcctacaaagtacttatgggactaatgggcaaaacagagatttttaagtcttccgtatgctgtttgacttttatatttttaagttatattttcatactattgtatttaaaaactctttttaatccccaaagaaatgggtttatttgcctttcatggagtgtgggctggcaggaggaaaaagtcgggagtatagtatttggaatattgttagatgatgccctatgataagaagaggcaaatgattggggagggaaggaggatgg

SEQ ID NO: 30568 - DNA, 1156 bp, Macaca Mulatta
  misc_feature (1)...(1156): n = A,T,C or G
agcatcacttttaatcttctggaacccacccaccactgctcaagtcacaattgaagcccagccagccaaagtttctgaggggaaggatgttcttctacttgtccagaatatgccccagaatctnnnnnnnnnnnnnnnnnnnnnnnnnnnnnnnnnnnnnnnnnnnnnnnnnnnnnnnnnnnnnnnnnnnnnnnnnnnnnnnnnnnnnnnnnnnnnnnnnnnnnnnnnnnnnnnnnnnnnnnnnnnnnnnnnnnnnnnnnnnnnnnnnnnnnnnnnnnnnnnnnnnnnnnnnnnnnnnnnnnnnnnnnnnnnnnnnnnnnnnnnnnnnnnnnnnnnnnnnnnnnnnnnnnnnnnnnnnnnnnnnnnnnnnnnnnnnnnnnnggagactcccaagccctacatctccagcagcaacttaaaccccagggaggccgcggagactgtcatcttatcctgtgatccggagattcaggacccaagctactggtggtggataaatggacagagcctccgtaacagtcgcacgttgcagctgtccaaaaacaacaggatcctcattctatttggtgtcacaaaggatactgcaggaccctatgaatgtgaaatgaagaacccagtgagttccagccgcagtgacccagtcaccctgaatctcctcnnnnnnnnnnnnnnnnnnnnnnnnnnnnnnnnnnnnnnnnnnnnnnnnnnnnnnnnnnnnnnnnnnnnnnnnnnnnnnnnnnnnnnnnnnnnnnnnnnnnnnnnnnnnnnnnnnnnnnnnnnnnnnnnnnnnnnnnnnnnnnnnnnnnnnnnnnnnnnnnnnnnnnnnnnnnnnnnnnnnnnnnnnnnnnnnnnnnnnnnnnnnnnnnnnnnnnnnnnnnnnnnnnnnnnnnnnnnnnnnnnnnnnnnnnnnnnnnnnnnnnnnnnnnnnnnnnnnnnnnnnnnnnnnnnnnnnnnnnnnnnnnnnnnnnnnnnnnnnnnntaccgtttaggacaaaacctctacttgtactgcctcacggactctaatccaccggcagagtatacttggacaataaatgggaggtttctgcaatcaggaccaaggatctatatcccccaaattactacaaagcatagcgggctctatcgttgctctgttcgtaactcagccactggc

SEQ ID NO: 30569 - DNA, 829 bp, Macaca Mulatta
  misc_feature (1)...(829): n = A,T,C or G
ggaaactgtggagatataaatttagtacgactgggtccagaaaagtctattaataatgaggttctgaagttcagtttggacagccaagtaaaccacagaatganaaaaagatttaccttctcatgttcaggcgatgcataaaagaaaggaatttctagattatcagttggatgnnnnnnnnnnnnnnnnnnnnnnnnnnnnnnnnnnnnnnnnnnnnnnnnnnnnnnnnnnnnnnnnnnnnnnnnnnnnnnnnnnnnnnnnnnnnnnnnnnnnnnnnnnnnnnnnnnnnnaggttcaaggacgcccacagaaaacacagagtatcatcatcttagagtcccatgtcatctgctgcacattgagcacaagtggtggcttactacttgaatctgctttccgggggcaagggggtgtccccttcagctgtgtcattgttgatgagnnnnnnnnnnnnnnnnnnnnnnnnnnnnnnnnnnnnnnnnnnnnnnnnnnnnnnnnnnnnnnnnnnnnnnnnnnnnnnnnnnnnnnnnnnnnnnnnnnnnnnnnnnnnnnnnnnnnnnnnnnnnnnnnnnnnnnnnnnnnnnnnnnnnnnnnnnnnnnnnnnnnnnnnnnnnnnnnnnnnnnnnnnnnnnnnnnnnnnnnnnnnnnnnnnnnnnnnnnnnnnnnnnnnnnnnnnnnnnnnnnnnnnnnnnnnnnnnnnnnnnnnnnnnnnnnnnnnnnnnnnnnnnnnnnnnnagacagacagaaaccattcgatgttcatcagactggccatttcaaccataccttgtgtttgatgtcggagatggttcagaaagacgggataatg

SEQ ID NO: 30570 - DNA, 273 bp, Macaca Mulatta
aggaagaagagatctctagacatggagcagccgtcttgtggatatgagggaagagccaaatagactccaaatcggttaacacagagaactaaaactatggagctactgaatgaaccagctatggaattgcctgtgtgtggacattcagatggacataccagataaaattctggactggtaagagtgtggggaaattgtcagtcttaagcagtgctgattgaggtgtgaattggtaaaacaatttgaaaagtaaattgctagattttataaaat

SEQ ID NO: 30571 - DNA, 151 bp, Macaca Mulatta
  misc_feature (1)...(151): n = A,T,C or G
ctgctcattctgaaattaagcattttcttttaaaagaaaagtgtaatagacatctaaaattccactcctcatagagcttttaaaatggtttcattggatataggccttaagaaatnnctataaaatgcaaataaagttactcaaatctgtg

SEQ ID NO: 30572 - DNA, 870 bp, Macaca Mulatta
gggcttcctgcgctgctgggctctttcgctcaggccggtggcgccgacaggatgggcaagtgtcgtggacttcgtactgctaggaagctccgcagtcaccgacgagaccagaagtggcatgataaacagtacaagaaagcccatttgggcacagccctgaaggccaacccttttggaggtgcttctcatgcaaaaggaatcgtcctggaaaaagtaggagttgaagccaaacagccaaattctgccattaggaagtgtgtcagggtccagctgatcaagaatggcaagaaaatcacagcctttgtacccaacgacggttgcttgaactttattgaggaaaacgatgaagttctggttgctggatttggtcgcaaaggtcatgctgttggtgatattcctggagtccgctttaaggttgtcaaagtagccaatgtgtctcttctggccctatacaaaggcaagaaggaaagaccaagatcataaattttaatggtgaaaacactgtagtaataaattttcttatggccccatacaattataactacattgtacataatattttcttgttccggccgcccctccgcccctcgaataaacttttctaaaacaattcttttttggcgccgcggggccccatttgggttaggttaaacaatggtcctatacctgtttcccaaggaaaaaccccgggtcccagaaacaggtggcctggattttctccccccataaaaaaaacccccggtggggcaaacagtatatgttttttaaaaaaatcccacaatgggagattctggagggtccaattaaaggagaccataccaacccgggtgttccaacgcagacccttcattttaaaattatccccccccg

SEQ ID NO: 30573 - DNA, 2360 bp, Macaca Mulatta
  misc_feature (1)...(2360): n = A,T,C or G
acaactgacatggtttacccagaaaggactggccctgaaccaccccagctcacggcgctcaggaacgttgaacttgaggagtccagtacagatgaggacttcttccaaagcagtacagaccccaaagactctagcttaccgggggacttacacgtgaccagtggccccgagagccctttcaacaatatatttaatgatctggacaaatcggaagatttgcccagtcaccagaaaatattcgacttgatggaactaaacggagttcaagccgactttaaacctgccactttaagttccagtttggataaccccaaagagtcagtcataatgggccactttgagaaagaaaagccccgtaaactttttgacagtgagcctctctgcctatcagataatcttatacaccaagataattttgatccattgaatgttcaagaattgtcagaaaactttttatttcttcaagagaaaaacttactaaaaggctcattgtccagcaaagaacacataaatgatcttcagacagaacttaagaatgctggttttaccgaagctatgttagaaacgtcacgtagaaactctttagatactgagcttcagtttgtggaaaataagccaggcttgtctttgttgcaggaaagcataagcacgaagggtgacgacacagatgtcacgttcacaggtgacactttgagcacctcattgcagtcttccccggaagtgcaggtacctcctacctccnnnnnnnnnnnnnnnnnnnnnnnnnnnnnnnnnnnnnnnnnnnnnnnnnnnnnnnnnnnnnnnnnnnnnnnnnnnnnnnnnnnnnnnnnnnnnnnnnnnnnnnnnnnnnnnnnnnnnnnnnnnnnnnnnnnnnnnnnnnnnnnnnnnnnnnnnnnnnnnnnnnnnnnnnnnnnnnnnnnnnnnnnnnnnnnnnnnnnnnnnnnnnnnnnnnnnnnnnnnnnnnnnnnnnnnnnnnnnnnnnnnnnnnnnnnnnnnnnnnnnnnnnnnnnnnnnnnnnnnnnnnnnnnnnnnnnnnnnnnnnnnnnnnnnnnnnnnnnnnnnnnnnnnnnnnnnnnnnnnnnnnnnnnnnnnnnnnnnnnnnnnnnnnnnnnnnnnnnnnnnnnnnnnnnnnnnnnnnnnnnnnnnnnnnnnnnnnnnnnnnnnnnnnnnnnnnnnnnnnnnnnnnnnnnnnnnnnnnnnnnnnnnnnnnnnnnnnnnnnnnnnnnnnnnnnnnnnnnnnnnnnnnnnnnnnnnnnnnnnnnnnnnnnnnnnnnnnnnnnnnnnnnnnnnnnnnnnnnnnnnnnnnnnnnnnnnnnnnnnnnnnnnnnnnnnnnnnnnnnnnnnnnnnnnnnnnnnnnnnnnnnnnnnnnnnnnnnnnnnnnnnnnnnnnnnnnnnnnnnnnnnnnnnnnnnnnnnnnnnnnnnnnnnnnnnnnnnnnnnnnnnnnnnnnnnnnnnnnnnnnnnnnnnnnnnnnnnnnnnnnnnnnnnnnnnnnnnnnnnnnnnnnnnnnnnnnnnnnnnnnnnnnnnnnnnnnnnnnnnnnnnnnnnnnnnnnnnnnnnnnnnnnnnnnnnnagggttcataccgagactctgcatacttctcagacaatgactctgagcccgagaaaaggtctgaggaggtcccgggaacctccccatccgccttggtgttggtacaggagcagcccctgcccgagcctgtcctcccagagcaaagtcctggtgcccaggatagctgcctggaagccagaaagagccagccagatgaaagttgtctgtctgctctgcacaactccggtgatctggaattaagagccacaccggagccagcacagactgatgttccccagcaggtccatcccatggaagacgaggccagcagtccctggagtgtgctgaactcagaacttagcagtggcaatgacttcgagacacaggaagatcgcccctgcacccttgcttccacggggaccaacacgaacgaactccttgcctacaccagttctgcggtggacaagtccctgtccagccactccgagggccccaagttgaaggagccggacatcgaaggaaagtacctggggaaacttggggtgtcggggatgctcgacttctcggaggacgggatggatgcggacgaggaggacgaaaacagcgacgactcggacgaggacctgcgggcctttaacctgcacagcctcagctctgagtcggaggacgagaccgagcaccccgtgcccgtcatcctcagcaacgaggacgggaggcacctgcggagtatgttgaagcccacggcggccggagcccccgacccgctgcctgaggactggaagaaagaaaagaaggcagtcacgttttt

SEQ ID NO: 30574 - DNA, 387 bp, Macaca Mulatta
gttaaaaacctttaaagaaacctttagaaggacttagacctcacgtattaatgttgagaaggtctgcttaattttaaaatggtttctataaaggttttattgtatgaaatagaacttatatttttgcatatgtatagatagtaattatatttaatgtataactatagcattaaggtgagtggaatttgacattgtccaaatctttttcatttttgagtgattaaaaatgaaatgtcctatctttttatatgtttgtttgcttttctttaatttttcagataaatattgaatttagcacaggttttgtggtattgtacattatcttgcctcatccattcctttatgtgggtggttcccaaaactgtcagattattcttgctgcatttt

SEQ ID NO: 30575 - DNA, 512 bp, Macaca Mulatta
ctgtgtcaatcattattaacatcagccagtcctccacacaagtcagatctccatccctacgttactccaggaaagaaaacaggtttgtttcctgtgatctaggggaaacggcctcatactccctctttttgcccaccagtaatcctgatggtgatatcaatatctccattccagacaccgtagaagcacacaggcagaatagtaaaaggcagcatcaagagagggatggctatcaggaggaaatccagttgttaaataaagcttacagaaaaagagaggaagaaagcaagggtagttaatgggtatttggtctaacagcagcaagaatggatctgcaacgtcagctgtgaaactaacacctttgttatgagactgatttccttttatttgttggtttacataagttttactgatttaatagttaattttttgtgggaacaactagaactagtgtaaacaattaagtgcatttgatgtgttagctagagatcacacactgtggtaattaaaat

SEQ ID NO: 30576 - DNA, 485 bp, Macaca Mulatta
agagcaacctggtgcccgctgaccctgagtgaaggccgcctgctggggactcagacactcagggaacaaaacggtcggccagagctggggaaacctagaactggcttcaaaggcagctcctggacaggtggtgggaggggactcttcccaagagaaaccaataaaccttctgtgcagaatttgagggactttgctgtgcttcccggagggcttcctggaggagacagcccccagaggtctcacaccttctccccaagcacccgcaggtggtagatgaccacacggccaaaaaagtcagtggcatcctcaaatgtcaccttcagccggtccacttcagcagctggcatggggaaagtgtgatcgtgggcagtcaagggaaacaggtgatttctggtttcccacccgcaggcccccacctctttcagacccagctcagactccactgatgtgggcaacctggggaagctgcaggcccctctaagcct

SEQ ID NO: 30577 - DNA, 1007 bp, Macaca Mulatta
  misc_feature (1)...(1007): n = A,T,C or G
gtttccctgtgagtttaatgagctggatcactcacttggatttttgtgttgacattttttctgagggttgatgttacactatttaaagcgtcatcaatgcaaacagtcacattaggtttgtcgtcatctttagttagtaaaaaccttgtaatgaagagtagtaaataagagaacgttagactttttggttaaataattgaggtttaatttttnnnngatattcttactcatttgcttggttgtaaatttgatttcaccattaagaaaagctaaattgcatataaatgaatgctctcaaaccttttgatgaagaggttttactatctcttattgtgggaaaatttgatgaaatatttgaactgtcacacgtattaagaatactttgtgatttaaaccaatattctagaaatatcaaatgtcagtattttgaaatcatctgcctctaactttgtggtataagaattatatatcaataagctattatttttataaaggaaaactttgccattatagtaaattacattagttgatctcgataatttgaagataaaagatgacaattggatttttaattgatttagtatttcctcctactctttgggggctgggtgggagggcttatatgctcttagagtgaggcacatctcactgttttgcagctgaatttgaattttgcaacttctgtgtaaagtaaggatttctttaaatagcatttttgcaccactaaaaatagataactgagaactcagtcttgataactgaaatgacttatttcacttagaatacatttctcccttctctgccatctccacaaatgccattgggaggttttgaaaaaccagttcgtttaatagctcaaaattgtccctgattttattttattttagggaaaattgtttcataaatgtgacactgataaagcctttgtcagaaagtattctcaaaattatgagatggattataataaaatacttaaatttgtgttatttttgaaccacagatgagta

SEQ ID NO: 30578 - DNA, 443 bp, Macaca Mulatta
  misc_feature (1)...(443): n = A,T,C or G
gttatatggctatgcaacaaccgcagatggctatgcaccagaatacccactccccttgatcatcaaaattgaagatgataatgataacgccccatattttgaacacaaaatgactatctttactgtgcctgaaaattgccgatccggnnnnnnnnnnnnnnnnnnnnnnnnnnnnnnnnnnnnnnnnnnnnnnnnnnnnnnnnnnnnnnnnnnnnnnnnnnnnnnnnnnnnnnnnnnnnnnnnnnnnnnnnnnnnnnnnnnnnnnnnnnnnnnnnnnnnnnnnnnnnnnnnnnnnnnnnnnnnnnnnnnnnnnaaatgtgatacttaccagttaataatggaagtgcgagacatgggtggtcagcctttcggtttatttaatacaggaacaattactatttcacttgaggatgaaaatgacaatccaccatctttcacagaaa

SEQ ID NO: 30579 - DNA, 3720 bp, Macaca Mulatta
  misc_feature (1)...(3720): n = A,T,C or G
aggttgttttaaaagttttggatcccagttttgaaattgaaaacccttatagcccctacatccaagnnnnnnnnnnnnnnnnnnnnnnnnnnnnnnnnnnnnnnnnnnnnnnnnnnnnnnnnnnnnnnnnnnnnnnnnnnnnnnnnnnnnnnnnnnnnnnnnnnnnnnnnnnnnnnnnnnnnnnnnnnnnnnnnnnnnnnnnnnnnnnnnnnnnnnnnnnnnnnnnnnnnnnnnnnnnnnnnnnnnnnnnnnnnnnnnnnnnnnnnnnnnnnnnnnnnnnnnnnnnnnnnnnnnnnnnnnnnnnnnnnnnnnnnnnnnnnnnnnnnnnnnnnnnnnnnnnnnnnnnnnnnnnnnnnnnnnnnnnnnnnnnnnnnnnnnnnnnnnnnnnnnnnnnnnnnnnnnnnnnnnnnnnnnnnnnnnnnnnnnnnnnnnnnnnnnnnnnnnnnnnnnnnnnnnnnnnnnnnnnnnnnnnnnnnnnnnnnnnnnnnnnnnnnnnnnnnnnnnnnnnnnnggggcagcactgcgaccgctgcaggcccctcttctacagggaccccctcaagaccatctcggatccctacgcgtgcattcnnnnnnnnnnnnnnnnnnnnnnnnnnnnnnnnnnnnnnnnnnnnnnnnnnnnnnnnnnnnnnnnnnnnnnnnnnnnnnnnnnnnnnnnnnnnnnnnnnnnnnnnnnnnnnnnnnnnnnnnnnnnnnnnnnnnnnnnnnnnnnnnnnnnnnnnnnnnnnnnnnnnnnnnnnnnnnnnnnnnnnnnnnnnnnnnnnnnnnnnnnnnnnnnnnnnnnnnnnnnnnnnnnnnnnnnnnnnnnnnnnnnnnnnnnnnnnnnnnnnnnnnnnnnnnnnnnnnnnnnnnnnnnnnnnnnnnnnnnnnnnnnnnnnnnnnnnnnnnnnnnnnnnnnnnnnnnnnnnnnnnnnnnnnnnnnnnnnnnnnnnnnnnnnnnnnnnnnnnnnnnnnnnnnnnnnnnnnnnnnnnnnnnnnnnnnnnnnnnnnnnnnnnnnnnnnnnnnnnnnnnnnnnnnnnnnnnnnnnnnnnnnnnnnnnnnnnnnnnnnnnnnnnnnnnnnnnnnnnnnnnnnnnnnnnnnnnnnnnnngggctcggaaacttttggccagagtcctgctgttcacattgttttaggagagccagttcctgggaaccctgttacatggactggccctggatttgccagggttctccctggggctggcttgagatttgctgtcaacaacattccctttcctgtggacttcaccattgccattcgctatgaaacccagnnnnnnnnnnnnnnnnnnnnnnnnnnnnnnnnnnnnnnnnnnnnnnnnnnnnnnnnnnnnnnnnnnnnnnnnnnnnnnnnnnnnnnnnnnnnnnnnnnnnnnnnnnnnnnnnnnnnnnnnnnnnnnnnnnnnnnnnnnnnnnnnnnnnnnnnnnnnnnnnnnnnnnnnnnnnnnnnnnnnnnnnnnnnnnnnnnnnnnnnnnnnnnnnnnnnnnnnnnnnnnnnnnnnnnnnnnnnnnnnnnnnnnnnnnnnnnnnnnnnnnnnnnnnnnnnnnnnnnnnnnnnnnnnnnnnnnnnnnnnnnnnnnnnnnnnnnnnnnnnnnnnnnnnnnnnnnnnnnnnnnnnnnnnnnnnnnnnnnnnnnnnnnnnnnnnnnnnnnnnnnnnnnnnnnnnnnnnnnnnnnnnnnnnnnnnnnnnnnnnnnnnnnnnnnnnnnnnnnnnnnnnnnnnnnnnnnnnnnnnnnnnnnnnnnnnnnnnnnnnnnnnnnnnnnnnnnnnnnnnnnnnnnnnnnnnnnnnnnnnnnnnnnnnnnnnnnnnnnnnnnnnnnnnnnnnnnnnnnnnnnnnnnnnnnnnnnnnnnnnnnnnnnnnnnnnnnnnnnnnnnnnnnnnnnnnnnnnnnnnnnnnnnnnnnnnnnnnnnnnnnnnnnnnnnnnnnnnnnnnnnnnnnnnnnnnnnnnnnnnnnnnnnnnnnnnnnnnnnnnnnnnnnnnnnnnnnnnnnnnnnnnnnnnnnnnnnnnnnnnnnnnnnnnnnnnnnnnnnnnnnnnnnnnnnnnnnnnnnnnnnnnnnnnnnnnnnnnnnnnnnnnnnnnnnnnnnnnnnnnnnnnnnnnnnnnnnnnnnnnnnnnnnnnnnnnnnnnnnnnnnnnnnnnnnnnnnnnnnnnnnnnnnnnnnnnnnnnnnnnnnnnnnnnnnnnnnnnnnnnnnnnnnnnnnnnnnnnnnnnnnnnnnnnnnnnnnnnnnnnnnnnnnnnnnnnnnnnnnnnnnnnnnnnnnnnnnnnnnnnnnnnnnnnnnnnnnnnnnnnnnnnnnnnnnnnnnnnnnnnnnnnnnnnnnnnnnnnnnnnnnnnnnnnnnnnnnnnnnnnnnnnnnnnnnnnnnnnnnnnnnnnnnnnnnnnnnnnnnnnnnnnnnnnnnnnnnnnnnnnnnnnnnnnnnnnnnnnnnnnnnnnnnnnnnnnnnnnnnnnnnnnnnnnnnnnnnnnnnnnnnnnnnnnnnnnnnnnnnnnnnnnnnnnnnnnnnnnnnnnnnnnnnnnnnnnnnnnnnnnnnnnnnnnnnnnnnnnnnnnnnnnnnnnnnnnnnnnnnnnnnnnnnnnnnnnnnnnnnnnnnnnnnnnnnnnnnnnnnnnnnnnnnnnnnnnnnnnnnnnnnnnnnnnnnnnnnnnnnnnnnnnnnnnnnnnnnnnnnnnnnnnnnnnnnnnnnnnnnnnnnnnnnnnnnnnnnnnnnnnnnnnnnnnnnnnnnnnnnnnnnnnnnnnnnnnnnnnnnnnnnnnnnnnnnnnnnnnnnnnnnnnnnnnnnnnnnnnnnnnnnnnnnnnnnnnnnnnnnnnnnnnnnnnnnnnnnnnnnnnnnnnnnnnnnnnnnnnnnnnnnnnnnnnnnnnnnnnnnnnnnnnnnnnnnnnnnnnnnnnnnnnnnnnnnnnnnnnnnnnnnnnnnnnnnnnnnnnnnnnnnnnnnnnnnnnnnnnnnnnnnnnnnnnnnnnnnnnnnnnnnnnnnnnnnnnnnnnnnnnnnnnnnnnnnnnnnnnnnnnnnnnnnnnnnnnnnnnnnnnnnnnnnnnnnnnnnnnnnnnnnnnnnnnnnnnnnnnnnnnnnnnnnnnnnnnnnnnnnnnnnnnnnnnnnnnnnnnnnnnnnnnnnnnnnnnnnnnnnnnnnnnnnnnnnnnnnnnnngactcctcagaaaacatcaagaaatattatcacatatcatcatctgctgaaaagaaaattaatgaaactagttctaccattaatacctctgcaaataccaggaatgactttcttaccatcttaaatacattaacctccaaaggaaacttgtcattggaaaaattaaagcagattaagataccagatatccaaatatnnnnnnnnaaggtgtgtggagatccaggaaatgtgccatgtgttgtgcccttgccctgtggtggtgctgtctgcatgggccaggaagggcacaggaagtgtgggggtgccggctgtcatggctccctgaccctctcaacgaatgccctccaaaaagcccaggaagcaaaatctgttattcgtaatttagacaaacaggttcgtgggttgaagaatcagncagatcaaaaatataagtaaactggcagaagtctccaaaaacaatgccttacagctaagggaaaaactgggaaatacaagaaaccaaagtgactctgaagaagaaaaactcaatctttcatcaaaaaag

SEQ ID NO: 30580 - DNA, 323 bp, Macaca Mulatta
  misc_feature (1)...(323): n = A,T,C or G
ttatcatcagcatgactctaagtctattgtaaatcacagcttttagtttaaaaaatacttttcatttatgcaaaaattntagtaatcttgtaaattgttgcatttctgttgtgttgtttcaaaaacattactcttccctcaaatgaaccaatattttacctaggtgatgttttctctcttgaatttttctttcaaaattgatatttatagaccatcgggtgttattctaaaggattcaactcctattacatgaaagaataatagaaaaaaggttggttgacttgtgattgcttttttaaaaaataataaatggctttggtatg

SEQ ID NO: 30581 - DNA, 1352 bp, Macaca Mulatta
  misc_feature (1)...(1352): n = A,T,C or G
gaagcctgcagccggccccaccaatcctagcagcgccaagaagaatgagaaaagagttcaaggtgnnnnnnnnnnnnnnnnnnnnnnnnnnnnnnnnnnnnnnnnnnnnnnnnnnnnnnnnnnnnnnnnnnnnnnnnnnnnnnnnnnnnnnnnnnnnnnnnnnnnnnnnnnnnnnnnnnnnnnnnnnnnnnnnnnnnnnnnnnnnnnnnnnnnnnnnnnnnnnnnnnnnnnnnnnnnnnnnnnnnnnnnnnnnnnnnnnnnnnnnnnnnnnnnnnnnnnnnnnnnnnnnnnnnnnnnnnnnnnnnnnnnnnnnnnnnnnnnnnnnnnnnnnnnnnnnnnnnnnnnnnnnnnnnnnnnnnnnnnnnnnnnnnnnnnnnnnnnnnnnnnnnnnnnnnnnnnnnnnnnnnnnnnnnnnnnnnnnnnnnnnnnnnnnnnnnnnnnnnnnnnnnnnnnnnnnnnnnnnnnnnnnnnnnnnnnnnnnnnnnnnnnnnnnnnnnnnnnnnnnnnnnnnnnnnnnnnnnnnnnnnnnnnnnnnnnnnnnnnnnnnnnnnnnnnnnnnnnnnnnnnnnnnnnnnnnnnnnnnnnnnnnnnnnnnnnnnnnnnnnnnnnnnnnnnnnnnnnnnnnnnnnnnnnnnnnnnnnnnnnnnnnnnnnnnnnnnnnnnnnnnnnnnnnnnnnnnnnnnnnnnnnnnnnnnnnnnnnnnnnnnnnnnnnnnnnnnnnnnnnnnnnnnnnnnnnnnnnnnnnnnnnnnnnnnnnnnnnnnnnnnnnnnnnnnnnnnnnnnnnnnnnnnnnnnnnnnnnnnnnnnnnnnnnnnnnnnnnnnnnnnnnnnnnnnnnnnnnnnnnnnnnnnnnnnnnnnnnnnnnnnnnnnnnnnnnnnnnnnnnnnnnnnnnnnnnnnnnnnnnnnnnnnnnnnnnnnnnnnnnnnnnnnnnnnnnnnnnnnnnnnnnnnnnnnnnnnnnnnnnnnnnnnnnnnnnnnnnnnnnnnnnnnnnnnnnnnnnnnnnnnnnnnnnnnnnnnnnnnnnnnnnnnnnnnnnnnnnnnnnnnnnnnnnnnnnnnnnnnnnnnnnnnnnnnnnnnnnnnnnnnnnnnnnnnnnnnnnnnnnnnnnnnnnnnnnnnnnnnnnnnnnnnnnagacttttcttgaagcagccagggagaagtcccgccctctgtctctctttcagggagggacttgtggtgactcgtggttacattcaggacacttgagcactttatacactaccgtagccctgtagctatttttatgtgataatcttgtttgatacttaaacagtaaacctgttttgcagttgaagcctccgtgttctatgaagggggccagttggaaga

SEQ ID NO: 30582 - DNA, 637 bp, Macaca Mulatta
  misc_feature (1)...(637): n = A,T,C or G
tactggaagggtagagcactctgacatcaggctagttcaaattctgcatagccactttctaaccatgaggttttagacaagtctaacttctctgaggctgggttccccatctgagaagcaaggcaatgtttatttcagaaggtttctttcaggactgcagaggcaactacagcacctagcataatacctggacacaagaaaaagcacatcagcagttaaccttagtgataggcaagcaggaaatgtaagcactgttgctcatgtggcattgttcttttttctttctttgttttgagacaaggtctggctctgttacccaggctggatttcagtggtgtnnnnnnnnnnnnnnnnnnnttccacacccaaggctcaagccatcctcccaccttnnnnnnnnnnnnnnnnnnngctaccacgcctggctaattttttcatattttttccaaagacggggttttgccatattgtccaagctagtcttgaactcgtgagctcaagcattcctccagcctcaacctcacaaggtatgagccactgcaccccatgtgacatctttgaaggtgctcccaccatctcttctgaagaggggtgctaggacaagtcgcagataccattcatactgtatgcttctgat

SEQ ID NO: 30583 - DNA, 1051 bp, Macaca Mulatta
ggcccctgggcaccttccacctccttccaggccatcactggcatgagaaggggcagacgcgtgtgagctgtggaaggaggcctctttctggagggacgtgacccccagtaagcttcaggtggggcaatccctgagggtgggtttctgaaatgttggggtatctcaggtcctctgggctgtggggtgggcgctgaaaggcaggtgtctgggcggtgggtcctgactaggagatgccgggaagggtctctgggtcgttgctcgtggtgtacccggggaatgggagggccagggcacggggctgcggtctcagactgggctgaagcagtgtccttgtcccaggggctgctgctgtggctgctgctgagcatgggcggggcacgggcatccagggagccgctgcggccactgtgccgccccatcaatgccaccctggctgccgagaaggaggcctgccccgtgtgcatcaccgtcaacaccaccatctgtgccggctactgccccaccatggtgagctgcccgggtccaggggcaggtgctgccacctcagggccgggtcacagaggcagcgggggaggaagggcggtctgcctgtctggtcgggggctggggaatggggtgtgggagggcgggaacagagggcttcctggactcctgagtctgggacctttgggggcagcttgggaggtcagcggaggcgctggccccaggcacatgctcactcccctatccacacatcctccagatgcgggtgctgcaggcggtcctgccgccagtgccccaggtggtgtgcaactaccgcgaggtgcgcttcgagtccatccggctccctggctgcccgcctggcgtggaccccgtggtctccgttcccgtggctctcagctgtcgttgtgcactctgccgccgcagcacctctgactgtgggggtcccaaggaccaccctttgacctgtgatgacccccacctccaggcctcctcttcctctaaggaccctccccccagccctccaagtccatcccgactcctggagccagcagacaccccgttcctcccg

SEQ ID NO: 30584 - DNA, 938 bp, Macaca Mulatta
  misc_feature (1)...(938): n = A,T,C or G
agtataaagatgcatttatgaaagcaaatcctggctacaaatggtgtcctaccacaaacaagcctgtgaaatccccaacacccactgtcaatccacgaaagaaactttgggccttcccatctgactcttcaagagacttgccaagccccaagaaagcaaagactgaagaaatgcctcagcttaactttggaatggctnnnnnnnnnnnnnnnnnnnnnnnnnnnnnnnnnnnnnnnnnnnnnnnnnnnnnnnnnnnnnnnnnnnnnnnnnnnnnnnnnnnnnnnnnnnnnnnnnnnnnnnnnnnnnnnnnnnnnnnnnnnnnnnnnnnnnnnnnnnnnnnnnnnnnnnnnnnnnnnnnnnnnnnnnnnnnnnnnnnnnnnnnnnnnnnnnnnnnnnnnnnnnnnnnnnnnnnnnnnnnnnnnnnnnnnnnnnnnnnnnnnnnnnnnnnnnnnnnnnnnnnnnnnnnnnnnnnnnnnnnnnnnnnnnnnnnnnnnnnnnnnnnnnnnnnnnnnnnnnnnnnnnnnnnnnnnnnnnnnnnnnnnnnnnnnnnnnnnnnnnnnnnnnnnnnnnnnnnnnnnnnnnnnnnnnnnnnnnnnnnnnnnnnnnnnnnnnnnnnnnnnnnnngagaaaacagatgaaaccaggttacagaaggaagcagaatttgaaaaatcagctaaggaaaatgtaagagattctaaggaattgagaaattttgaggctttgcaaatagatgacataatggctataaaaatggaagatcccaaataaattagaaaggaagagttagaagaagatcaaaaatgtagtcattttcctgatttttcttattctgccagtagcaagataataattagtgatgttcccagtagaaaggatcacatgtgccatcctcatggaattatgatcattgaggatcctgcagcattaaacaagcc

SEQ ID NO: 30585 - DNA, 645 bp, Macaca Mulatta
agaatccctacctgtgcagcaacgagtgtgacgcctccaacccggacctggcccacccgcctaggctcatgttcgacaaggaggaggagggcctggccacctactggcagagcatcacgtggagccgctaccccagcccgctggaagccaacatcaccctttcgtggaacaagaccgtggagctgaccgatgacgtggtgatgaccttcgagtacggccggcccacggtcatggtcctggagaagtccctggacaacgggcgcacgtggcagccctaccagttctacgccgaggactgcatggaggccttcggcatgtctgcccgccgggcccgggacatgtcgtcctccagcgcccaccgcgtgctctgcaccgaggagtactcgcgctgggcgggctccaagaaggagaagcacgtgcgcttcgaggtgcgggaccgcttcgccatctttgccggccccgacctgcgcaacatggacaacctctacacgcgtctggagagcgccaagggcctcaaggagttcttcaccctcactgacctgcgcatgcggttgctgcgcccggcgctgggcggcacctacgtgcagcgggagaacctctacaagtatttctacgccatctccaacatcgaggtcattggcaggt

SEQ ID NO: 30586 - DNA, 875 bp, Macaca Mulatta
gggattccagcggcggacagcacccgggccgagatgtctccctcagtggccttagccgtgctggcgctactctctctttctggcctggaggctatccagcgtactccaaagattcaggtttactcacgccatccaccagagaatggaaagccaaatttcctgaattgctatgtgtctggatttcatccatctgatattgaagttgacttactgaagaatggagagaaaatgggaaaagtggagcattcagacttgtctttcaacaaagactggtctttctatctcttgtactacactgaattcacccccaatgaaaaagatgagtatgccctaccgtgtgaaccatgtgactttgtcagggcccaggacagttaagtgggatcgagacatgtaagcagcatcatggaagtttgaagatgccgcatttggattggatgaattccaaattccgcttccttgcctttttaacgttgatatggctcatacagtttatgccaaaaaattgccgagttattattaatgttcacccaggacatgaatcttctttattaaattctacttttaagcgcctatctccctcgtttgtaaggaattctggggcagcctaaccacttaggaaagggctgggctaaccttttaagattggggaaaccaacagaaattctctcaatttcccaaaataaatgctcactggggtcaagaaatctgaagcctccttcaaatattccttttaccccttctaaatcctctggattaaaaaatagattcacgaccgttaaattggagacctaaaacttgtccaaatttatcacttaacctgtgcgctttatgcaaattttgtcgacaggcacaaaaattttgtttgaaagtttttc

SEQ ID NO: 30587 - DNA, 3413 bp, Macaca Mulatta
  misc_feature (1)...(3413): n = A,T,C or G
tcccagatgttgtggaattgtccctggatctatagctcttcaccgtctctacctttttccttctaagggattctgaaacctctgtcatggaaaagtaccacgtgttggagatgattggagaaggctcttttgggagggtgtacaagggtcgaagaaaatacagaactcaggnnnnnnnnnnnnnnnnnnnnnnnnnnnnnnnnnnnnnnnnnnnnnnnnnnnnnnnnnnnnnnnnnnnnnnnnnnnnnnnnnnnnnnnnnnnnnnnnnnnnnnnnnnnnnnnnnnnnnnnnnnnnnnnnnnnnnnnnnnnnnnnnnnnnnnnnnnnnnnnnnnnnnnnnnnnnnnnnnnnnnnnnnnnnnnnnnnnnnnnnnnnnnnnnnnnnnnnnnnnnnnnnnnnnnnnnnnnnnnnnnnnnnnnnnnnnnnnnnnnnnnnnnnnnnnnnnnnnnnnnnnnnnnnnnnnnnnnnnnnnnnnnnnnnnnnnnnnnnnnnnnnnnnnnnnnnnnnnnnnnnnnnnnngatttgcccgggctatgagcaccaacacaatggtgctgacgtccatcaaaggcacaccactctatatgtctccagagctggtggaagaacgaccatacgaccacacagctgacctctggtnnnnnnnnnnnnnnnnnnnnnnnnnnnnnnnnnnnnnnnnnnnnnnnnnnnnnnnnnnnnnnnnnnnnnnnnnnnnnnnnnnnnnnnnnnnnnnnnnnnnnnnnnnnnnnnnnnnnnnnnnnnnnnnnnagaacttcctgcagggactgctcaccaaagacccccggcagcgactgtcctggccagacctcttacatcacccctttattgctggtcgtgtcaccnnnnnnnnnnnnnnnnnnnnnnnnnnnnnnnnnnnnnnnnnnnnnnnnnnnnnnnnnnnnnnnnnnnnnnnnnnnnnnnnnnnnnnnnnnnnnnnnnnnnnnnnnnnnnnnnnnnnnnnnnnnnnnnnnnnnnnnnnnnnnnnnnnnnnnnnnnnnnnnnnnnnnnnnnnnnnnnnnnnnnnnnnnnnnnnnnnnnnnnnnnnnnnnnnnnnnnnnnnnnnnnnnnnnnnnnnnnnnnnnnnnnnnnnnnnnnnnnnnnnnnnnnnnnnnnnnnnnnnnnnnnnnnnnnnnnnnnnnnnnnnnnnnnnnnnnnnnnnnnnnnnnnnnnnnnnnnnnnnnnnnnnnnnnnnnnnnnnnnnnnnnnnnnnnnnnnnnnnnnnnnnnnnnnnnnnnnnnnnnnnnnnnnnnnnnnnnnnnnnnnnnnnnnnnnnnnnnnnnnnnnnnnnnnnnnnnnnnnnnnnnnnnnnnnnnnnnnnnnnnnnnnnnnnnnnnnnnnnnnnnnnnnnnnnnnnnnnnnnnnnnnnnnnnnnnnnnnnnnnnnnnnnnnnnnnnnnnnnnnnnnnnnnnnnnnnnnnnnnnnnnnnnnnnnnnnnnnnnnncagatcctgaaaggcatcctggagggtgcttcccacatcctgcctgcattccgggtcctaagcagtcttctctccagctgcagtgactctgttgccttgtattccttctgccgggaggcagggcttcctgggctgccgctcagtctactcaggcacagtcaggagagcaacagcctccagcannnnnnnnnnnnnnnnnnnnnnnnnnnnnnnnnnnnnnnnnnnnnnnnnnnnnnnnnnnnnnnnnnnnnnnnnnnnnnnnnnnnnnnnnnnnnnnnnnnnnnnnnnnnnnnnnnnnnnnnnnnnnnnnnnnnnnnnnnnnnnnnnnnnnnnnnnnnnnnnnnnnnnnnnnnnnnnnnnnnnnnnnnnnnnnnnnnnnnnnnnntgctttactgtcctgtgtgaagccatggatgggaacagccgggccatctccaaagcctttnnnnnnnnnnnnnnnnnnnnnnnnnnnnnnnnnnnnnnnnnnnnnnnnnnnnnnnnnnnnnnnnnnnnnnnnnnnnnnnnnnnnnnnnnggagccccacaagtgagccagccactgcgagagcagagtgaggatctacctggagccatttcctctgccctcgcagccatatgcactgctcctgtgggactgcccgactgctgggatgccaaggaacaggtcnnnnnnnnnnnnnnnnnnnnnnnnnnnnnnnnnnnnnnnnnnnnnnnnnnnnnnnnnnnnnnnnnnnnnnnnnnnnnnnnnnnnnnnnnnnnnnnnnnnnnnnnnnnnnnnnnnnnnnnnnnnnnnnnnnnnnnnnnnnnnnnnnnnnnnnnnnnnnnnnnnnnnnnnnnnnnnnnnnnnnnnnnnnnnnnnnnnnnnnnnnnnnnnnnnnnnnnnnnnnnnnnnnnnnnnnnnnnnnnnnnnnnnnnnnnnnnnnnnnnnnnnnnnnnnnnnnnnnnnnnnnnnnnnnnnnnnnnnnnnnnnnnnnnnnnnnnnnnnnnnnnnnnnnnnnnnnnnnnnnnnnnnnnnnnnnnngagtgcagcagcctgtctattgggacagcttggtcagcaaggggtgacctttgacctccagcccatggaatggatggctgcagccacacatgccttgtctgcccctgcagaggnnnnnnnnnnnnnnnnnnnnnnnnnnnnnnnnnnnnnnnnnnnnnnnnnnnnnnnnnnnnnnnnnnnnnnnnnnnnnnnnnnnnnnnnnnnnnnnnnnnnnnnnnnnnnnnnnnnnnnnnnnnnnnnnnnnnnnnnnnnnnnnnnnnnnnnnnnnnnnnnnnnnnnnnnnnnnnnnnnnnnnnnnnnnnnnnnnnnnnnnnnnnnnnnnnnnnnnnnnnnnnnnnnnnnnnnnnnnnnnnnnnnnnnggcatggcagccctgctgagcctggccatggccacctttacccaggagccccagttatgcctgagctgcctgtcccagcatggaagtatcctcatgtccatcctgaagcatctgctttgccccagcttcctgaatcaactgcgccnnnngcctcatgggtctgagtttctccctgtcgtggtgctctctgtctgccagctcctttgcttcccctttgcgctggacgtggatgctgacctccttatagatatcttggccgacctcagagagtcagaagttgcagcccatctgctgcaggnnnnaggtctgctgctaccatcttccattgacgcaagtggagctgcccatcagcctcctcacacgcctggcgctcacggatcccacctctctcaatcagtttgtgaacacagtggctgcctcccctagaaccattgtctcgtttctctcagttgccctcctgagtaaccagccactgctgacctctgaccttctctccctgctggcccatactgccagggtcctgtctcccagctacctgtcctttatccaagagcttctggctggctctgatg

SEQ ID NO: 30588 - DNA, 1140 bp, Macaca Mulatta
agccatcatgcctcgtggtcagaaaagtaagctccgtgcccgtgagaaacgccgcaaggcccgagacgagacccagggtctcaatgttcctcaggtcactgaagcagaggaagaagaggccccctgctgttcctcttctgtttctgggggtgctgcttcaagctctcctgctgctggcattccccagaagcctcagagagccccaaccactgccgctgctgctgctgcaggtgtttcatccacaaaatctaaaaaagggtggccaagagccaagggtgagaaaaacgcaagttcctcccaggcctcaacatctactgagagctcaagcgaagatcctctaaccaggaaggcagggatgttggtgcagttcctgttgtacaagtataaaataaaagagtccgttacaaagggagaaatgctgaagattgttggcaaaaggttcagggagcacttccctgagatcctcaagaaagcctctgagcgcctgagtcttgtctttggccttgagctgaataaagtcaaacccaacggccacacttacaccttcaacagcaaggtagacctcaccgatgaagaatgcctgctcagtacctgggactttcccaggagcgggcttctgatgcctctcctgggtgtgatcttcttaaatggcaactctgccactgaggaagagatctgggaattcctgaatatgttgggagtctatgatggagaggagcacttagtcttcggggaaccccggaagctcatcacccaagatctggtggaggaaaaatatctggagtacaagcaggtgcccaacagtgatcccccacgctatcaattcctgtggggtccagagagccctatgccgaaaccaagacaagatgacaagtcctggagtttttggccaaggtgaatggtaccaccccctgtgccttcccagcccattatgaagaggctttgagagatgaagggaaagccggagtctgagccagagttgtacccaggccttgcactactgccatggccaatcaatctcccaaagcccagtttacctgctgttctcaccccccagtgaggtcttaggcagattcttcactttgtaatttaaaagacctgttaacttttgttcttgttatgcatgattaacttgttgac

SEQ ID NO: 30589 - DNA, 1208 bp, Macaca Mulatta
  misc_feature (1)...(1208): n = A,T,C or G
attgctacacatgtcctgaagccagggggctgctttgtggccaagnagatattccgaggccgggatgtgacgctcctctacagccagctgcgagtcttcttctccagcgtgctgtgtgccaagcccaggagcagccggaactccagcatcgngaggccttcgctgtctgtcagggctatgaccctcccgagggcttcatcccggacctgagcaaacccctgctggaccattcttacgnnnnnnnnnnnnnnnnnnnnnnnnnnnnnnnnnnnnnnnnnnnnnnnnnnnnnnnnnnnnnnnnnnnnnnnnnnnnnnnnnnnnnnnnnnnnnnnnnnnnnnnnnnnnnnnnnnnnnnnnnnnnnnnnnnnnnnnnnnnnnnnnnnnnnnnnnnnnnnnnnnnnnnnnnnnnnnnnnnnnnnnnnnnnnnnnnnnnnnnnnnnnnnnnnnnnnnnnnnnnnnnnnnnnnnnnnnnnnnnnnnnnnnnnnnnnnnnnnnnnnnnnnnnnnnnnnnnnnnnnnnnnnnnnnnnnnnnnnnnnnnnnnnnnnnnnnnnnnnnnnnnnnnnnnnnnnnnnnnnnnnngctggcaagctgatacaactcagaaactgctcagtgtcaggaaaaccagaacttgttgatgaacttgttttcaaaatatcatctcatcaacgaggcctggacaaacaagccctgaggagggatctgcaacaaccctgaagacaacaaggaaagaaagcatagaagtctctccgcactgcagtgggaattcttgagtgaggtcttacctcttctttaaacctcttcaggagtgtcctgattatatccagaaatttccctaaaggcagggattcttaacctggatagaagccaggggtaaccataaacttgatggaagaaaatgttacatcgatattttcagcaataaaacaacgttagccttactcccaagttataaatgctggcaacaaatcacaatagtaaaagcagtacctgggattttcccaccaatgcaaaccagttacaacaactgtaatgtagcataaaaagggcatcttgaagtattgttcatatttgtcacctcttggaatgacagcagatcctataagttgatgtattaattaaaaagcccatatatgactgcagctcaattttgtttcaatttaatatatagtaataattgtaattcaatgtaattggctcccattgt

SEQ ID NO: 30590 - DNA, 172 bp, Macaca Mulatta
attctacaagggggttgctcctctctggatgagacaaataccatacaccatgatgaagttcgcctgctttgaacgtactgttgaagcactgtacaagtttgtggttcctaagccccgcagtgaatgttcaaagccagagcagctggttgtaacatttatagcaggttacata

SEQ ID NO: 30591 - DNA, 996 bp, Macaca Mulatta
  misc_feature (1)...(996): n = A,T,C or G
gatgcttataacatttgaatttttgccccatgagtacaactaatttttataagtaaatattgggtttataatgtgaaaaatagggtgtcagtgttttcacatgcccagcaggtaaaaatgtgggaagttggcagggtcattgatagcaagtaagtacttcctgaaggctttccagtttaaaagattacaagccattccttggcctgccaaacaaattatattctgaagatgcctattttgtaacccttgatgtgaattttttagtgtctgaaatttacagaagaatgaaattgtaaaacactaaatgctttgggtttattttgaagtaacctgttactttaaaatgaaaatgtcagcattaggaagtaataaaccaacatattatgaaacccagtattataaatgttatctacatctaaagagtattctaaaataacttattggcagnnnnnnnnnnnnnnnnnnttataacatttagaatcttttgttatatgtctgtttttcaattttgttgtatttttaatttaagtggccaatgtggttatgaacacaatttgtatgatcagcttctgttctttcctaaaacttcagataaatgtcattttagctataacctaaaaaagtatttaaataaaatgaccgatgttaatttaaaagcagcatatgctaatttacttcctcatatgatgatggcctaatggaagttacataagcttcttttgtcctaactcgaaaagtatatgtcgaagtccggaatatgtcttgaccagaattatccttactagttacactgcttaagcaaagatggcgtcccgtgacctcgttgtcctagttgcgccactgatatgtagttcccccacaaacggggcgcccccttttatgccagagaatcccccacccggntttttttcctcaaacctccccatttttcttctacacagtcccacaaaccacccctaactacacccaacgccatcacctctcactcataaacca

SEQ ID NO: 30592 - DNA, 714 bp, Macaca Mulatta
  misc_feature (1)...(714): n = A,T,C or G
agttctgaatgacatcatctccaccatgttcaatagaaagtttatggaggaattattcaagcctcaagagctctattccaagaaggccctgaggactgtctatgagcgcctggctcatgcctccattatgaaactgaaccaggccagcatggataagnnnnnnnnnnnnnnnnnnnnnnnnnnnnnnnnnnnnnnnnnnnnnnnnnnnnnnnnnnnnnnnnnnnnnnnnnnnnnnnnnnnnnnnnnnnnnnnnnnnnnnnnnnnnnnnnnnnnnnnnnnnnnnnnnnnnnnnnnnnnnnnnnnnnnnnnnnnnnnnnnnnnnnnnnnnnnnnnnnnnnnnnnnnnnnnnnnnnnnnnnnnnnnnnnnnnnnnnnnnnnnnnnnnnnnnnnnnnnnnnnnnnnnnnnnnnnnnnnnnnnnnnnnnnnnnnnnnnnnnnnnnnnnnnnnnnnnnnnnnnnnnnnnnnnnnnnnnnnnnnnnnnnnnnnnnnnnnnnnnnnnnnnnnnnnnnnnnnnnnnnnnnnnnnnnnnnnnnnnnnnnnnnnnnnnnnnnnnnnnnnnnnnnnnnnnnnnnnnnnnnnnnnnnnngaaggttcttttgaacttatgggagaccgagtcctgaaactgggaactaacatgtangtacagcgtgaatcggcctgtggaaacccatatgtctggatcatcaaagaacttagcctcacggacccagg

SEQ ID NO: 30593 - DNA, 103 bp, Macaca Mulatta
agcatccttcccaccgctttcatgggcacagcaatgatcttcacctgcttcaccctcagtgcactctatgccaggcgccgtagctacctctttctgggaggta

SEQ ID NO: 30594 - DNA, 1468 bp, Macaca Mulatta
  misc_feature (1)...(1468): n = A,T,C or G
cagaaatccgatggagcggatgtatcaacgcacattctactaccactttgaaaataaacccatcctctatggtcggagctacacctggctgtgctacgaagtgaaaataaggaagcacccctcaaagctcccttgggacacaggggtctttcgaggccaggtnnnnncaggtgtatttccagcctcagtaccaaaaagaaatgtgcttcctctcttggttctgtggcaaccagctgcctgcttacaagcgcttccagatcacctggtttgtatcctggaacccctgcccggactgtgtggcaaaggtgaccgaattccnnnnnnnnnnnnnnnnnnnnnnnnnnnnnnnnnnnnnnnnnnnnnnnnnnnnnnnnnnnnnnnnnnnnnnnnnnnnnnnnnnnnnnnnnnnnnnnnnnnnnnnnnnnnnnnnnnnnnnnnnnnnnnnnnnnnnnnnnnnnnnnnnnnnnnnnnnnnnnnnnnnnnnnnnnnnnnnnnnnnnnnnnnnnnnnnnnnnnnnnnnnnnnnnnnnnnnnnnnnnnnnnnnnnnnnnnnnnnnnnnnnnnnnnnnnnnnnnnnnnnnnnnnnnnnnnnnnnnnnnnnnnnnnnnnnnnnnnnnnnnnnnnnnnnnnnnnnnnnnnnnnnnnnnnnnnnnnnnnnnnnnnnnnnnnnnnnnnnnnnnnnnnnnnnnnnnnnnnnnnnnnnnnnnnnnnnnnnnnnggctaagaatgttccctgtggtgattacggctgccacgtggagctgcgcttcctgtgtgaggttccttcttggcagttggacccggcccagacatacagggtcacttggttcatctcctggagcccctgcttcaggaggggctgtgccgggcaagtgcgtgtgttccttcaggagaacaaacacgtgagactgcgcatcttcgctgcccgcatctatgattacgaccccctgtatcaggaggcactgcgaacgctgcgggatgcaggggcccaagtctccatcatgacctacgannnnnnnnnnnnnnnnnnnnnnnnnnnnnnnnnnnnnnnnnnnnnnnnntccagccctgggatggactagatgagcacagccaagccctgagtgggaggcttcgggccattctccagntccagaatcagggaaactgaaggatgggcctcagtctctaaggaaggcagagacctgggttgagcctcagaataaaagatcttcttccaagaaatgcaaacaggccgttcaccaccatctccagcagctcacagacaccagcgaagcaaggcgctcctgaccaagtagattttttaaaaatcagagtgaattaattttaatggaaaatttctcttatgttctaagtatataatagtaagattgtgctcaatattctcagaattgtttttaatttattaatgaaatgattaactggcttcatatctagactaataaaacattaagaatcttccataattg

SEQ ID NO: 30595 - DNA, 388 bp, Macaca Mulatta
aatccagaatggcaaagcccccagagatcctgtgactgaaaactgtgttcagggagaggagaaagagagctccaatgactccacctcagtcagtgctgttgcctctaatatgagagatgacgaaataactcaggatgaaaacacagtttccacttccctgggccattccaaagatgagaactctaagcaaacatgcatcaaaattggcaccaagactcccaaaagtgactcatgtaccccaactaataccaccgtggaggtagtggggtcttcaggtcagaatggagatgaaaagcagaacattgtagcccgcaagattgtgaagatgactaagcagcctgcaaaaaagaagcctcctccttcccgagaaaagaaagtcaccaggaca

SEQ ID NO: 30596 - DNA, 2312 bp, Macaca Mulatta
  misc_feature (1)...(2312): n = A,T,C or G
atgcacggagccgccagagctccagccaccagcgtgagtgccgactgctgcatcccggccggcttgcgcctcggaccggtgcctggtaccttcaagctgggcaagtacctgtcagaccgcagggagcccgggcccaggaaaaaggtattgaccattcagacctccgcccactgctgttcgcctctcaacgaccactgcttgtgttgcaggtgcgcatggtgagaggggagctggtggacgagtcggggggctcccctctggagtggatagggttaatccgggcagccagaaactcccaggaacagactctggaagctattgcagacttacccggaggacannnnnnnnnnnnnnnnnnnnnnnnnnnnnnnnnnnnnnnnnnnnnnnnnnnnnnnnnnnnnnnnnnnnnnnnnnnnnnnnnnnnnnnnnnnnnnnnnnnnnnnnnnnnnnnnnnnnnnnnnnnnnnnnnnnnnnnnnnnnnnnnnnnnnnnnnnnnnnnnnnnnnnnnnnnnnnnnnnnnnnnnnnnnnnnnnnnnnnnnnnnnnnnnnnnnnnnnnnnnnnnnnnnnnnnnnnnnnnnnnnnnnnnnnnnnnnnnnnnnnnnnnnnnnnnnnnnnnnnnnnnnnnnnnnnnnnnnnnnnnnnnnnnnnnnnnnnnnnnnnnnnnnnnnnnnnnnnnnnnnnnnnnnnnnnnnnnnnnnnnnnnnnnnnnnnnnnnnnnnnnnnnnnnnnnnnnnnnnnnnnnnnnnnnnnnnnnnnnnnnnnnnnnnnnnnnnnnnnnnnnnnnnnnnnnnnnnnnnnnnnnnnnnnnnnnnnnnnnnnnnnnnnnnnnnnnnnnnnnnnnnnnnnnnnnnnnnnnnnnnnnnnnnnnnnnnnnnnnnnnnnnnnnnnnnnnnnnnnnnnnnnnnnnnnnnnnnnnnnnnnnnnnnnnnnnnnnnnnnnnnnnnnnnnnnnnnnnnnnnnnnnnnnnnnnnnnnnnnnnnnnnnnnnnnnnnnnnnnnnnnnnnnnnnnnnnnnnnnnnnnnnnnnnnnnnnnnnnnnnnnnnnnnnnnnnnnnnnnnnnnnnnnnnnnnnnnnnnnnnnnnnnnnnnnnnnnnnnnnnnnnnnnnnnnnnnnnnnnnnnnnnnnnnnnnnnnnnnnnnnnnnnnnnnnnnnnnnnnnnnnnnnnnnnnnnnnnnnnnnnnnnnnnnnnnnnnnnntggcctgccgtgctctggggccctgcgcggcttccctctgctctcggttcccccggaagaggcgtccgccttcaagcacgtggagcgcgccccgcccgcctccgccgcgctgccaggagcgcgttacccgcagctcccccccgcgcccgggctgcccctcgagcgctgcgcgctgccgcccctcgacacgggcggtctcaaagcctatccaggtggcgaatgtagtcacctgcctgccgtcatgccggcctttacagtctacaacggggagctgctctacggctcaccggccactaccgcttattacccgctcaaattgcacttcggcgggctgctgaagtatccggagtccatctcctacttcagcgggccagcagcggccgccctaagccccgctgagctgggctcgctggccagcatcgaccgagagattgccacgcacaatcagcagctgtccgagnnnnnnnnnnnnnnnnnnnnnnnnnnnnnnnnnnnnnnnnnnnnnnnnnnnnnnnnnnnnnnnnnnnnnnnnnnnnnnnnnnnnnnnnnnnnnnnnnnnnnnaggtaagcccaagaccggccacctgtgcctctactgcggcaagctgtactcgcgcaagtatgggctcaagatccacatgcggacgcacacgggctacaagccactcaagtgcaaagtctgtctgcggcccttcggcgaccccagcaatctcaacaagcacatccggctgcacgccgagggcaacacgccctaccgctgcgagttctgcggcaaggtacttgtgcgccgccgggacctggagcgacatgtcaagtcccgccaccctggccagagtctgctcgccaaagcgggcgacggcccgggtgccgagcccggctatcccccggaacctggggatcccaagagcgacgacagtgacgtggacgtctgcttcacagacgaccagagcgaccccgaggctgcgggcggcggcgagcgcgacttgtaataagtcttcccgggaaggggcggggcgaggacagaggaatcgagggtctattctcgcagaagaggaactcctggtggtgggaagagggacccaatggacaaaaccgtttttgtttttgagagggcg

SEQ ID NO: 30597 - DNA, 3711 bp, Macaca Mulatta
  misc_feature (1)...(3711): n = A,T,C or G
gtctagaggagtcccaggagcagccaggacaggcggaagtggtggctgccatggaggaggacaaactcttatctgcagtgcctgaggaaggcgatgccacccatgaccccagcccggagcctgaggaggagccgggggtccggaatggaatggccagtgagggcctgaacagcagcctctgcagcccatggcacgagcgaagggnnnnnnnnnnnnnnnnnnnnnnnnnnnnnnnnnnnnnnnnnnnnnnnnnnnnnnnnnnnnnnnnnnnnnnnnnnnnnnnnnnnnnnnnnnnnnnnnnnnnnnnnnnnnnnnnnnnnnnnnnnnnnnnnnnnnnnnnnnnnnnnnnnnnnnnnnnnnnnnnnnnnnnnnnnnnnnnnnnnnnnnnnnnnnnnnnnnnnnnnnnnnnnnnnnnnnnnnnnnnnnnnnnnnnnnnnnnnnnnnnnnnnnnnnnnnnnnnnnnnnnnnnnnnnnnnnnnnnnnnnnnnnnnnnnnnnnnnnnnnnnnnnnnnnnnnnnnnnnnnnnnnnnnnnnnnnnnnnnnnnnnnnnnnnnnnnnnnnnnnnnnnnnnnnnnnnnnnnnnnnnnnnnnnnnnnnnnnnnnnnnnnnnnnnnnnnnnnnnnnnnnnnnnnnnnnnnnnnnnnnnnnnnnnnnnnnnnnnnnnnnnnnnnnnnnnnnnnnnnnnnnnnnnnnnnnnnnnnnnnnnnnnnnnnnnnnnnnnnnnnnnnnnnnnnnnnnnnnnnnnnnnnnnnnnnnnnnnnnnnnnnnnnnnnnnnnnnnnnnnnnnnnnnnnnnnnnnnnnnnnnnnnnnnnnnnnnnnnnnnnnnnnnnnnnnnnnnnnnnnnnnnnnnnnnnnnnnnnnnnnnnnnnnnnnnnnnnnnnnnnnnnnnnnnnnnnnnnnnnnnnnnnnnnnnnnnnnnnnnnnnnnnnnnnnnnnnnnnnnnnnnnnnnnnnnnnnnnnnnnnnnnnnnnnnnnnnnnnnnnnnnnnnnnnnnnnnnnnnnnnnnnnnnnnnnnnnnnnnnnnnnnnnnnnnnnnnnnnnnnnnnnnnnnnnnnnnnnnnnnnnnnnnnnnnnnnnnnnnnnnnnnnnnnnnnnnnnnnnnnnnnnnnnnnnnnnnnnnnnnnnnnnnnnnnnnnnnnnnnnnnnnnnnnnnnnnnnnnnnnnnnnnnnnnnnnnnnnnnnnnnnnnnnnnnnnnnnnnnnnnnnnnnnnnnnnnnnnnnnnnnnnnnnnnnnnnnnnnnnnnnnnnnnnnnnnnnnnnnnnnnnnnnnnnnnnnnnnnnnnnnnnnnnnnnnnnnnnnnnnnnnnnnnnnnnnnnnnnnnnnnnnnnnnnnnnnnnnnnnnnnnnnnnnnnnnnnnnnnnnnnnnnnnnnnnnnnnnnnnnnnnnnnnnnnnnnnnnnnnnnnnnnnnnnnnnnnnnnnnnnnnnnnnnnnnnnnnnnnnnnnnnnnnnnnnnnnnnnnnnnnnnnnnnnnnnnnnnnnnnnnnnnnnnnnnnnnnnnnnnnnnnnnnnnnnnnnnnnnnnnnnnnnnnnnnnnnnnnnnnnnnnnnnnnnnnnnnnnnnnnnnnnnnnnnnnnnnnnnnnnnnnnnnnnnnnnnnnnnnnnnnnnnnnnnnnnnnnnnnnnnnnnnnnnnnnnnnnnnnnnnnnnnnnnnnnnnnnnnnnnnnnnnnnnnnnnnnnnnnnnnnnnnnnnnnnnnnnnnnnnnnnnnnnnnnnnnnnnnnnnnnnnnnnnnnnnnnnnnnnnnnnnnnnnnnnnnnnnnnnnnnnnnnnnnnnnnnnnnnnnnnnnnnnnnnnnnnnnnnnnnnnnnnnnnnnnnnnnnnnnnnnnnnnnnnnnnnnnnnnnnnnnnnnnnnnnnnnnnnnnnnnnnnnnnnnnnnnnnnnnnnnnnnnnnnnnnnnnnnnnnnnnnnnnnnnnnnnnnnnnnnnnnnnnnnnnnnnnnnnnnnnnnnnnnnnnnnnnnnnnnnnnnnnnnnnnnnnnnnnnnnnnnnnnnnnnnnnnnnnnnnnnnnnnnnnnnnnnnnnnnnnnnnnnnnnnnnnnnnnnnnnnnnnnnnnnnnnnnnnnnnnnnnnnnnnnnnnnnnnnnnnnnnnnnnnnnnnnnnnnnnnnnnnnnnnnnnnnnnnnnnnnnnnnnnnnnnnnnnnnnnnnnnnnnnnnnnnnnnnnnnnnnnnnnnnnnnnnnnnnnnnnnnnnnnnnnnnnnnnnnnnnnnnnnnnnnnnnnnnnnnnnnnnnnnnnnnnnnnnnnnnnnnnnnnnnnnnnnnnnnnnnnnnnnnnnnnnnnnnnnnnnnnnnnnnnnnnnnnnnnnnnnnnnnnnnnnnnnnnnnnnnnnnnnnnnnnnnnnnnnnnnnnnnnnnnnnnnnnnnnnnnnnnnnnnnnnnnnnnnnnnnnnnnnnnnnnnnnnnnnnnnnnnnnnnnnnnnnnnnnnnnnnnnnnnnnnnnnnnnnnnnnnnnnnnnnnnnnnnnnnnnnnnnnnnnnnnnnnnnnnnnnnnnnnnnnnnnnnnnnnnnnnnnnnnnnnnnnnnnnnnnnnnnnnnnnnnnnnnnnnnnnnnnnnnnnnnnnnnnnnnnnnnnnnnnnnnnnnnnnnnnnnnnnnnnnnnnnnnnnnnnnnnnnnnnnnnnnnnnnnnnnnnnnnnnnnnnnnnnnnnnnnnnnnnnnnnnnnnnnnnnnnnnnnnnnnnnnnccacagccctgtttatatttgggtctttatgttggtgctgccaggtctctgagctccagaggtggcctcttggacagatctactgctataggaataaaagacactctgcctcacaaatggccacttgtcaacaagcccaaagatgcttgtcggaggacggttatggaagccattaattcttggtcgtgggaaaaggtggaatgacaagttactgattgtttttctgtcgctatttctttcatttgtctagtgaatcagaaaggctcagccaaggccgcatctgggaagagtggagaaatttgccacttgacgatcacggattagctagcacctttaagccctgcatttttccaactgacaagtgggtgggggtgatggcacattcagtgaggctatgaagagcgaatcctctctattatttaaatagattactgtagtttggccagcaatttggcgtcagtggtaacatacttagttaataaaataagccaggcttgcaactaagtatctaactttacaggcccactcacatttgaggcaagggacttttgattatgtggagagatgtagtgatttaaattctgattatttaagttggatcagatgaagtgtgttttagaaccaaaccatctggccccttcttatggtcagaggaagtcaatgttcacttaaatgaaattgaaaacgcaatgtggcactacaaaagagctctctgtactttctccacgctgcctcagaagtcctgtgattttcggggtcagtgtcccacccttcacttcctgagggtgggtgagtggatagcagagccgggagctctggcagctgtggacagatgtgcttcctgagcacgggttgtgcctcccatcagtaaaaaaatgtttagttcacttccttaattgtataattatttatttgtaaattatatacatgtactactgtactaaaatatcatgtacattataaaacatacacaaaaatagaaattttaaaaagatgagatgaaaataaatctaagtcaaagttctaat

SEQ ID NO: 30598 - DNA, 1111 bp, Macaca Mulatta
  misc_feature (1)...(1111): n = A,T,C or G
ctttctggggaacctggntaggggctctcagctactccagcccccaagagctgcccagagaggcactactgggctcagggaaaactgtgctgccagagtgtgtgagccaggaacattccttgtgaaggactgtgaccagcacagaaaggctgctcagtgtcatccttgcataccaggggtctccttctctccagaccaccacacccggcctcactgtgagagctgtcggcactgtaactctggtcttctcattcgcaactgcaccatcactgccaacgctgtgtgtgcctgtcgcaatggctggcagtgcagggacaaggagtgtactgagtgtgatcctacctccaaacccttcgctgaccacttggccatctcaggccctgggcccacaccctcaggccacccacttaccttatgtcaatgagatgctggaggccagaacagcagggcacatgcagactctggctgacttcaggcacctgcctgcccggactctctctacccactgggcaccccaaagatccctgtgcagctcagattttattcgtatccttgtgatcttctccggaatgtttcttgttttcaccctggccggaaccctgttcctccatcaacaaaggaaatatagatcaaacaaaggagaaagtccatggagcctgcagaaccttgtccttacagctgccccagggaggaggaaggcagcaccatccccatccaagaggattaccgaaaaccggagcctgcctcctccccgtgagccagcacctgcgggagctgcactacagccctggcctccaccccaccccgccggccatcctagggagaatgagacctggcagccaccactgcagtcccatcctcttgtcagggccctttcctgtgtacacgtgacagagtgccttttcgagactgccagggaccaggacaaacacggatgaggtggagagtgggaagcaggagcccagccagctgcgcctgcgctgcaggagggcggggctctggttgtaaaacacacttcctgctgcgaaagacccatatgctacaagacagaccaaataaagtgccagacgannnnnnnnnnnnnnnnnnnnnnnnnnnnnnnnnnnnnnnt

SEQ ID NO: 30599 - DNA, 605 bp, Macaca Mulatta
ccccacacatgagtgcagatggcgcctacatgcctccgggtttctaccctcctccaggcccccacccacccatgggctactaccccccagggccctacacaccagggccctaccctggccctgggggccacacagccacagtcctggtcccttcaggagctgccaccacggtgacagtgctgcaaggagagatctttgagggagcgcctgtgcagacggtgtgtccccactgccaacaggccatcaccaccaagatctcctacgagattggcttgatgaatttcgtgctgggtttcttctgttgcttcatgggatgtgatctgggctgctgcctgatcccctgcctcatcaatgacttcaaggatgtgacgcacacatgccccagctgcaaagcctacatctacacgtacaagcgcctgtgctaacggagctgggactcgggactcccccgcctgtcagtctggccccctgtgctttgctccctgcgctcagtggtcactttcccgctcccacttggggatgggagctgtgccaccatcccctggaagtcctgtcctcttcaccctgccctaccctgaacagctgactcttctggcaaaaattct

SEQ ID NO: 30600 - DNA, 748 bp, Macaca Mulatta
  misc_feature (1)...(748): n = A,T,C or G
ggattctctcaccagtaggacttaaaactttgagttgtttctccagtggcttagctcttgttcccttgggtgaccactagcacccatttttgagaaaactggttctacatggggggatagctgtggaatagatgattagctgcatgttaattctcgagaactaagcctgtgccagtgctttcctaagcagtatacctttaatcagaactcattcccagagcctggatgctattacacatgacttttaagaaatgtcaatgtatgtcctttaataactctaccactttggagcaagctattccagcattggttttgaatgctgtatgncaccagtcagaataccacgtacgctgcactgtttctagagtggttccatacttaccaccgatctacaggggttgatccctgtttttacatcacctatgtacacactgaaagaaaacccgctagagactatgaactcagatcactgaacgtttcaattgctggagtactgggaacaaaactttagccggatcatgggaacataagctttagaacaaatttaaaaactaggcgttaaattgttaaatggactttcccgtggcccattcgggttggccggggggaaaagtcccttaaatttttaaccaaaccagggttgggaaactggccccatagcctttttcctttaaaaaattccaactttnnnnnnnnnnnnnnnnnnnnnnnncnnnnnnnnnnnnnnnnnnnnnnnnnnnnnnngaca

SEQ ID NO: 30601 - DNA, 756 bp, Macaca Mulatta
ggtaattgattgtataattcaaaatagctggaagagaagaattataattttcccaacataaacaaaatttgtttgaggtgatgggtatttcagttatcttgatttgatcattacacattgtattcagctatcaaaatatcactgtacacccaaaagataatacaactattatatatcaaatgtttaaaaatatacaaagagtgaggtgagttttttctgaccttttttattgtgatccccaaagtaaattcaacttagtaaatatatatgttattacatggtgaccactgctacctttattcagtgaaagcaatgatgttagtggcatctctccaagagtgaagtttaaagttataatactatctttcactttttaaaatgctatttttaactcttataaagggtatttatggctatatgtgaatacattatattgtggattttctgcaacagagacgaattagattcacaagttgaaagcctcatggaatttttgagctacaaggaatcttagggaaaatcagctccaacccctttgtttttcaaataaagaaacccaactcaaaagaagcaaagtaacagactcagtgcatcacttctggtaactctgaattcctgatcctgaatcttcaggaatgcctggatgaatgtgagaatctcagcccacctgaagatcttaaaatatgttttaaaagccttggtgaaaacaagttagtggggaagggttaaacggaaaaggcttctcttccttggctt

SEQ ID NO: 30602 - DNA, 1694 bp, Macaca Mulatta
  misc_feature (1)...(1694): n = A,T,C or G
atttcaaaccactccttttcaaagatctctaagggagacattgcacctggccactgcagcccagagcaggtctggccacggccataagcgtgctgagtcatcatgcccactgtagatgacattctggagcaggttggggagtttggctnnnnnnnnnnnnnnnnnnnnnnnnnnnnnnnnnnnnnnnnnnnnnnnnnnnnnnnnnnnnnnnnnnnnnnnnnnnnnnnnnnnnnnnnnnnnnnnnnnnnnnnnnnnnnnnnnnnnnnnnnnnnnnnnnnnnnnnnnnnnnnnnnnnnnnnnnnnnnnnnnnnnnnnnnnnnnnnnnnnnnnnnnnnnnnnnnnnnnnnnnnnnnnnnnnnnnnnnnnnnnnnnnnnnnnnnnnnnnnnnnnnnnnnnnnnnnnnnnnnnnnnnnnnnnnnnnnnnnnnnnnnnnnnnnnnnnnnnnnnnnnnnnnnnnnnnnnnnnnnnnnnnnnnnnnnnnnnnnnnnnnnnnnnnnnnnnnnnnnnnnnnnnnnnnnnnnnnnnnnnnnnnnnnnnnnnnnnnnnnnnnnnnnnnnnnnnnnnnnnnnnnnnnnnnnnnnnnnnnnnnnnnnnnnnnnnnnnnnnnnnnnnnnnnnnnnnnnnnnnnnnnnnnnnnnnnnnnnnnnnnnnnnnnnnnnnnnnnnnnnnnnnnnnnnnnnnnnnnnnnnnnnnnnnnnnnnnnnnnnnnnnnnnnnnnnnnnnnnnnnnnnnnnnnnnnnnnnnnnnnnnnnnnnnnnnnnnnnnnnnnnncacagaatttgttggctcgggctccagaagaacggtggcgatcatgtaccagatggccttcaccatggggctggtggcgcttaccgggctggcctacgtcctgcctcactggcgctggctgcagctggcagtctccctgcccaccttcctcttcctgctctactactggtgnnnnnnnnnnnnnnnnnnnnnnnnnnnnnnnnnnnnnnnnnnnnnnnnnnnnnnnnnnnnnnnnnnnnnnnnnnnnnnnnnnnnnnnnnnnnnnnnnnnnnnnnnnnnnnnnnnnnnnnnnnnnnnnnnnnnnnnnnnnnnnnnnnnnnnnnnnnnnnnnnnnnnnnnnnnnnnnnnnnnnnnnnnnnnnnnnnnnnnnnnnnnnnnnnnnnnnnnnnnnnnnnnnnnnnnnnnnnnnnnnnnnnnnnnnnnnnnnnnnnnnnnnnnnnnnnnnnnnnnnnnnnnnnnnnnnnnnnnnnnnnnnnnnnnnnnnnnnnnnnnnnnnnnnnnnnnnnnnnnnnnnnnnnnnnnnnnnnnnnnnnnnnnnnnnnnnnnnnnnnnnnnnnnnnnnnnnnnnnnnnnnnnnnnnnnnnnnnnnnnnnnnnnnnnnnnnnnnnnnnnnnnnnnnnnnnnnnnnnnnnnnnnnnnnnnnnnnnnnnnnnnnnnnnnnnnnnnnnnnnnnnnnnnnnnnnnnnnnnnnnnnnnnnnnnnnnnnnnnnnnnnnnnnnnnnnnnnnnnnnnnnnnnnnnnnnnnnnnnnnnnnnnnnnnnnnnnnnnnnnnnnnnnnnnnnnnnnnnnnnnnnnnnnnnnnnnnnnnnnnnnnnnnnnnnnnnnnnnggtgttgggcctgcttgccgcgggagtgacgttacttcttccagagaccaagggggtcgctttgccagagaccatgaaggacgccgagaaccttg

SEQ ID NO: 30603 - DNA, 94 bp, Macaca Mulatta
ggttgacattgcaaacggtatggtcaccaaacaggctacaaagaatgccctttctttatcaaagacaaccaaaagttagaacagttcagagtag

SEQ ID NO: 30604 - DNA, 2965 bp, Macaca Mulatta
  misc_feature (1)...(2965): n = A,T,C or G
gtgcctcaaattcctgcctttcctcaagaagagtccccaggagaaaagccagtattgcttgtgtgcctaacaacctgtctcttnnnnnnnnnnnnnnnnnnnnnnnnnnnnnnnnnnnnnnnnnnnnnnnnnnnnnnnnnnnnnnnnnnnnnnnnnnnnnnnnnnnnnnnnnnnnnnnnnnnnnnnnnnnnnnnnnnnnnnnnnnnnnnnnnnnnnnnnnnnnnnnnnnnnnnnnnnnnnnnnnnnnnnnnnnnnnnnnnnnnnnnnnnnnnnnnnnnnnnnnnnnnnnnnnnnnnnnnnnnnnnnnnnnnnnnnnnnnnnnnnnnnnnnnnnnnnnnnnnnnnnnnnnnnnnnnnnnnnnnnnnnnnnnnnnnnnnnnnnnnnnnnnnnnnnnnnnnnnnnnnnnnnnnnnnnnnnnnnnnnnnnnnnnnnnnnnnnnnnnnnnnnnnnnnnnnnnnnnnnnnnnnnnnnnnnnnnnnnnnnnnnnnnnnnnnnnnnnnnnnnnnnnnnnnnnnnnnnnnnnnnnnnnnnnnnnnnnnnnnnnnnnnnnnnnnnnnnnnnnnnnnnnnnnnnnnnnnnnnnnnnnnnnnnnnnnnnnnnnnnnnnnnnnnnnnnnnnnnnnnnnnnnnnnnnnnnnnnnnnnnnnnnnnnnnnnnnnnnnnnnnnnnnnnnnnnnnnnnnnnnnnnnnnnnnnnnnnnnnnnnnnnnnnnnnnnnnnnnnnnnnnnnnnnnnnnnnnnnnnnnnnnnnnnnnnnnnnnnnnnnnnnnnnnnnnnnnnnnnnnnnnnnnnnnnnnnnnnnnnnnnnnnnnnnnnnnnnnnnnnnnnnnnnnnnnnnnnnnnnnnnnnnnnnnnnnnnnnnnnnnnnnnnnnnnnnnnnnnnnnnnnnnnnnnnnnnnnnnnnnnnnnnnnnnnnnnnnnnnnnnnnnnnnnnnnnnnnnnnnnnnnnnnnnnnnnnnnnnnnnnnnnnnnnnnnnnnnnnnnnnnnnnnnnnnnnnnnnnnnnnnnnnnnnnnnnnnnnnnnnnnnnnnnnnnnnnnnnnnnnnnnnnnnnnnnnnnnnnnnnnnnnnnnnnnnnnnnnnnnnnnnnnnnnnnnnnnnnnnnnnnnnnnnnnnnnnnnnnnnnnnnnnnnnnnnnnnnnnnnnnnnnnnnnnnnnnnnnnnnnnnnnnnnnnnnnnnnnnnnnnnnnnnnnnnnnnnnnnnnnnnnnnnnnnnnnnnnnnnnnnnnnnnnnnnnnnnnnnnnnnnnnnnnnnnnnnnnnnnnnnnnnnnnnnnnnnnnnnnnnnnnnnnnnnnnnnnnnnnnnnnnnnnnnnnnnnnnnnnnnnnnnnnnnnnnnnnnnnnnnnnnnnnnnnnnnnnnnnnnnnnnnnnnnnnnnnnnnnnnnnnnnnnnnnnnnnnnnnnnnnnnnnnnnnnnnnnnnnnnnnnnnnnnnnnnnnnnnnnnnnnnnnnnnnnnnnnnnnnnnnnnnnnnnnnnnnnnnnnnnnnnnnnnnnnnnnnnnnnnnnnnnnnnnnnnnnnnnnnnnnnnnnnnnnnnnnnnnnnnnnnnnnnnnnnnnnnnnnnnnnnnnnnnnnnnnnnnnnnnnnnnnnnnnnnnnnnnnnnnnnnnnnnnnnnnnnnnnnnnnnnnnnnnnnnnnnnnnnnnnnnnnnnnnnnnnnnnnnnnnnnnnnnnnnnnnnnnnnnnnnnnnnnnnnnnnnnnnnnnnnnnnnnnnnnnnnnnnnnnnnnnnnnnnnnnnnnnnnnnnnnnnnnnnnnnnnnnnnnnnnnnnnnnnnnnnnnnnnnnnnnnnnnnnnnnnnnnnnnnnnnnnnnnnnnnnnnnnnnnnnnnnnnnnnnnnnnnnnnnnnnnnnnnnnnnnnnnnnnnnnnnnnnnnnnnnnnnnnnnnnnnnnnnnnnnnnnnnnnnnnnnnnnnnnnnnnnnnnnnnnnnnnnnnnnnnnnnnnnnnnnnnnnnnnnnnnnnnnnnnnnnnnnnnnnnnnnnnnnnnnnnnnnnnnnnnnnnnnnnnnnnnnnnnnnnnnnnnnnnnnnnnnnnnnnnnnnnnnnnnnnnnnnnnnnnnnnnnnnnnnnnnnnnnnnnnnnnnnnnnnnnnnnnnnnnnnnnnnnnnnnnnnnnnnnnnnnnnnnnnnnnnnnnnnnnnnnnnnnnnnnnnnnnnnnnnnnnnnnnnnnnnnnnnnnnnnnnnnnnnnnnnnnnnnnnnnnnnnnnnnnnnnnnnnnnnnnnnnnnnnnnnnnnnnnnnnnnnnnnnnnnnnnnnnnnnnnnnnnnnnnnnnnnnnnnnnnnnnnnnnnnnnnnnnnnnnnnnnnnnnnnnnnnnnnnnnnnnnnnnnnnnnnnnnnnnnnnnnnnnnnnnnnnnnnnnnnnnnnnnnnnnnnnnnnnnnnnnnnnnnnnnnnnnnnnnnnnnnnnnnnnnnnnnnnnnnnnnnnnnnnnnnnnnnnnnnnnnnnnnnnnnnnnnnnnnnnnnnnnnnnnnnnnnnnnaactcctggcctcaagtgatcctcctgcctcagcctctcaaagtgttgagatgataggtgtgagccaccnnnnnnnncggattttaactattctaataggtatgtagtggtaatcattgttttaatctgcagttcaccaataatatatgattttagcatcttttcatgtgtttgccacctgtatagctttggtgaggtatctgttagaggttttgcccatttttaatcggattgctcattttcttattggtgaattttaagtgttccttgtatgttttgtatagcagacctttatcagataggtcttttgcaaatattttcctcccagtctgtggcttattttctcaatccttgattcnnnnnnnnnnnnnnnnnnnnnnnnnnnnnnnnnnaaagaaacggtagcataatatacacagttgtccattttttttaagactaatccatctcacagattgttctgtatcagtaaataaagatctttcccccac

SEQ ID NO: 30605 - DNA, 1488 bp, Macaca Mulatta
  misc_feature (1)...(1488): n = A,T,C or G
agaactgcagattttcctccttcaaaattaaagtcaggttatggagaacatgtatgctatgttcttgattgcttagctgaagaagcattgaaatatattggtttcacctggaaaaggnnnnnnnnnnnnnnnnnnnnnnnnnnnnnnnnnnnnnnnnnnnnnnnnnnnnnnnnnnnnnnnnnnnnnnnnnnnnnnnnnnnnnnnnnnnnnnnnnnnnnnnnnnnnnnnnnnnnnnnnnnnnnnnnnnnnnnnnnnnnnnnnnnnnnnnnnnnnnnnnnnnnnnnnnnnnnnnnnnnnnnnnnnnnnnnnnnnnnnnnnnnnnnnnnnnnnnnnnnnnnnnnnnnnnnnnnnnnnnnnnnnnnnnnnnnnnnnnnnnnnnnnnnnnnnnnnnnnnnnnnnnnnnnnnnnnnnnnnnnnnnnnnnnnnnnnnnnnnnnnnnnnnnnnnnnnnnnnnnnnnnnnnnnnnnnnnnnnnnnnnnnnnnnnnnnnnnnnnnnnnnnnnnnnnnnnnnnnnnnnnnnnnnnnnnnnnnnnnnnnnnnnnnnnnnnnnnnnnnnnnnnnnnnnnnnnnnnnnnnnnnnnnnnnnnnnnnnnnnnnnnnnnnnnnnnnnnnnnnnnnnnnnnnnnnnnnnnnnnnnnnnnnnnnnnnnnnnnnnnnnnnnnnnnnnnnnnggaagaattagaaaaggtaaaacaagaaatggaagaaaagggcagcagcatgactgatggtgngctcctttggtgaagattaaacagagcttaacaaaactgaaacaagaaactgtagagatggacattagaattggcattgtggaacacacactactccaatcaaagctgaaggagaagtccaacatgactaggaacatgcatgccacagttattccagaaccagcaacaggcttttattaaaacgtactggttttcatgtttctgattagttgggttttttatatcagactatatttcatgttgcatagatttcaaaacataattttatgttcaataggtttttttttacatgtacatactcacgtattatatcatggtgattatgatggttaaagcctttacactgaatgtaatgtttaataaagtaattacaaattctcactttctaaggagcttttactaatcattcctatgttaaagctcccacctggtggctcatttttcttagcattccttgtgtaagccaaggtatatgacctatgttttctgtagatgctgctgctgtcacaacagggactgctgacacagtcttttgcatcgctccacctctacagtgatcataagtgctttgtgcccagaggccactaaagatgggtaggcaggattcttttccagaacccaaactacctttgcctcagctttatggctacctaaaannnnnnnnnnnnnnnnnnnnnnnnnnnnnnnnnnatcctctttaacatttgaagtttatttcttatgaatatttctgggcttaaatggttttaaaggg

SEQ ID NO: 30606 - DNA, 685 bp, Macaca Mulatta
tggtccttttaaactcttgtgtaactagcaggacgtaggtggaaagatgaagaaataagcttgtctagactaaagaaaggaaagcaggttataaaagccatagtagccagtccagtttattctgcagatggcctcataccaatcgctgttagtttcccacctccactttcccactgagaactgcagcaatttaaaggatatgagaaagccaagactcaagagatgagaagatcccgttggcaaaatatagtgtactcttcactgccactgccaccaccaaatgggtttttagagctttgaaacacaacctttgtaaattaatgaaaacctccctgtgacccacctgccttctccccatacccaaatttgaccactactggcctaaaggcaagatgggcttcgatatagaaggactgcaggacagtagaaagggctgccacggaggtgacgagctccttcctctccaacatgtgatgctacacatctctgtgggtgatctaagttggacttttgactctaaaacagctataatccaagaaaggtaaaattctaatggaggtaaagaatcctgactgattgttccctttgatgtccaaataagggactgtcgtgagtacttatgctacacttactataagaatgatattgtttgtctttctcctgggctggatagcggactatattt

SEQ ID NO: 30607 - DNA, 250 bp, Macaca Mulatta
acaccctgagcaaagagttcagcctccgccttgattccagatggagccttcctttttcacagatgtactggattggcttcctgctggaaatagtgactctcctgctcaggccaatttgcacctatcaaccgcccttcaaccatcacacagtgacattgtcaaatagcgtgttcaccttctcttacaagaagactcagcaagatctggcgtatgagccgctctactgctgggaggaagcccagcagaaaac

SEQ ID NO: 30608 - DNA, 1922 bp, Macaca Mulatta
  misc_feature (1)...(1922): n = A,T,C or G
atctgtctggctccattgatgacctccccacgggaacggaagcaactttgagctcagcagtcagtgcatccgggtccacgagcagccaaggggatcagagcaaccccgcgcagtcgcctttctccccacatgcgtcgcctcatctctccagcatcccggggggcccatctccctctcctgttggctctcctgtaggaagcaaccagtctcgatctggcccaatctctcctgcaagtatcccaggtannnnnnnnnnnnnnnnnnnnnnnnnnnnnnnnnnnnnnnnnnnnnnnnnnnnnnnnnnnnnnnnnnnnnnnnnnnnnnnnnnnnnnnnnnnnnnnnnnnnnnnnnnnnnnnnnnnnnnnnnnnnnnnnnnnnnnnnnnnnnnnnnnnnnnnnnnnnnnnnnnnnnnnnnnnnnnnnnnnnnnnnnnnnnnnnnnnnnnnnnnnnnnnnnnnnnnnnnnnnnnnnnnnnnnnnnnnnnnnnnnnnnnnnnnnnnnnnnnnnnnnnnnnnnnnnnnnnnnnnnnnnnnnnnnnnnnnnnnnnnnnnnnnnnnnnnnnnnnnnnnnnnnnnnnnnnnnnnnnnnnnnnnnnnnnnnnnnnnnnnnnnnnnnnnnnnnnnnnnnnnnnnnnnnnnnnnnnnnnnnnnnnnnnnnnnnnnnnnnnnnnnnnnnnnnnnnnnnnnnnnnnnnnnnnnnnnnnnnnnnnnnnnnnnnnnnnnnnnnnnnnnnnnnnnnnnnnnnnnnnnnnnnnnnnnnnnnnnnnnnnnnnnnnnnnnnnnnnnnnnnnnnnnnnnnnnnnnnnnnnnnnnnnnnnnnnnnnnnnnnnnnnnnnnnnnnnnnnnnnnnnnnnnnnnnnnnnnnnnnnnnnnnnnnnnnnnnnnnnnnnnnnnnnnnnnnnnnnnnnnnnnnnnnnnnnnnnnnnnnnnnnnnnnnnnnnnnnnnnnnnnnnnnnnnnnnnnnnnnnnnnnnnnnnnnnnnnnnnnnnnnnnnnnnnnnnnnnnnnnnnnnnnnnnnnnnnnnnnnnnnnnnnnnnnnnnnnnnnnnnnnnnnnnnnnnnnnnnnnnnnnnnnnnnnnnnnnnnnnnnnnnnnnnnnnnnnnnnnnnnnnnnnnnnnnnnnnnnnnnnnnnnnnnnnnnnnnnnnnnnnnnnnnnnnnnnnnnnnnnnnnnnnnnnnnnnnnnnnnnnnnnnnnnnnnnnnnnnnnnnnnnnnnnnnnnnnnnnnnnnnnnnnnnnnnnnnnnnnnnnnnnnnnnnnnnnnnnnnnnnnnnnnnnnnnnnnnnnnnnnnnnnnnnnnnnnnnnnnnnnnnnnnnnnnnnnnnnnnnnnnnnnnnnnnnnnnnnnnnnnnnnnnnnnnnnnnnnnnnnnnnnnnnnnnnnnnnnnnnnnnnnnnnnnnnnnnnnnnnnnnnnnnnnnnnnnnnnnnnnnnnnnnnnnnnnnnnnnnnnnnnnnnnnnnnnnnnnnnnnnnnnnnnnnnnnnnnnnnnnnnnnnnnnnnnnnnnnnnnnnnnnnnnnnnnnnnnnnnnnnnnnnnnnnnnnnnnnnnnnnnnnnnnnnnnnnnnnnnnnnnnnnnnnnnnnnnnnnnnnnnnnnnnnnnnnnnnnnnnnnnnnnnnnnnnnnnnnnnnnnnnnnnnnnnnnnnnnnnnnnnnnnnnnnnnngtagtccagagggagccgaggtcctgtgacacaggaggcagtggaaggaaagcctcctggtctcgcccagccccaagagcacgtgcagggagctccaggcacacacaggcgtccggggatctcaggcggaggcaccccggtctttagaagcctctcgattcagtgccacccacacggcaggtggcctctccaattccagtcccatcattagggaaatggtcttggaaacatttttgttgttaaaggaaaataaaattattccca

SEQ ID NO: 30609 - DNA, 787 bp, Macaca Mulatta
  misc_feature (1)...(787): n = A,T,C or G
ggggaagctgagagctgaggggaagggctaaagctgggagactgaaaaaatgcagactaccggggcattactcatttctccagctctgatccgctgtaccaggggtctaatcaggcctgtgtctgcctccttcctgaatagcccagtgaattcatctaaacagccttcctacagcagcttcccactccaggtggccagacgggagttccagaccagtgttgtctcccgggacattgacacagcagccaagtttattggtgctggggcagccacagttggtgtggctggttcaggggctggcattggaacggtgtttggcagtttgatcattggctatgccaggaacccatctctcaagcagcagctcttctcctatgccattctgggctttgccctgtctgaggccatggggctcttctgtttgatggtcgccttcctcatcctcttcgccatgtgaggctccgtgggggtcacctgcctgttgccgctgtgactccacgccattcctggtgctggggtgtactaagctttaccatttaacacaacgtttctctaaannaaaannnnnnnnnnnnnnnnnnnnnnnnntcggccnnnnnnnnnnnnnnnnnnnnnnnnnnnnnnnnnnnnnnntaccatattttttttagacccgggcccatagggggaatgggaccagggagtaaagtgttttttggggggaccccgtgcccctaaaaaaaactttggaaaacaccccccttttggggaacccccccccccgctaaacaaaatgcaaactgtgaac

SEQ ID NO: 30610 - DNA, 1109 bp, Macaca Mulatta
  misc_feature (1)...(1109): n = A,T,C or G
gggatgaccgagcccattgacgagtactgtgtgcagcagctcaaggagtttgatgggaagagcctggtctcagttaccaaggagggtctggagctgcctgaggatgaggaggagaagaagaagatggaagagagcaaggcaaagtttgagaacctttgcaagctcatgaaagaaatcttagataagaaggttgagaaggtgacaatttccaataggcttgtgtcttcaccctgctgcattgtgaccagcacctatggctggacagccaatatggagcggatcatgaaagcccaggcacttcgggacaactccaccatgggctatatgatggccaaaaagcacctggagatcaaccctgaccaccccattgtggagactctgcggcagaaggctgaggccgacaagaatgataaggcagttaaggacctggtggtgctgctgtttgaaaccgccctgctctcttcaggcttttcccttgaggatccccagacccactccaaccgcatctaccgcatgatcaagctaggtctaggtattgatgaagatgaagtggcagcagaagaacccagtgctgcagttcctgatgagattccccctcttgagggcgatgaggatgcgtctcgcatggaagaagtcgattagaagttcatagttggaaaacttgtgcccttgtatagtgtccccgtggctcccactgcagcctcaagtgcccctgtcccacctggctccccctgctgatgtctagtgttgtttttcctctcctgtccttgtgttgaaggcaggaaaccaagggtgtcaagccccattccctctctactctgacagcaggattggatgttgtgtgttgtggtttattttattttcttcattttgttctgaaattaaagtatgcaaaataaagaatatgccgtttttttaccaaaaaaacacgnnnnnnnnnnnnnnnnnnnnngtcggcccgcctcggcccctccaaaagcttttctaaaccattccttttggcgccccgggccccagntaggtaaagtgaacatgggtccaaagcgtgtttcccaaggaaaatccgggttcatgaacaaatggccttggatttccccccaaataaaaaa

SEQ ID NO: 30611 - DNA, 817 bp, Macaca Mulatta
gggtgggtgaggggcgaggctgagggagaagagaaggagaattggggcgcttgaggggattataatttctttaaaaagaggggaggggagaggccatggccgtcccagccaagaagaggaagatgaacttctcggagcgggaggtggagatcatcgtggaggagctggagctgaagaagcacctgctggtgaaccacttcaacgccggggtccccctggccgccaagagcgcggcctggcacggcatcctgagaagggtcaacgctgtggccacctgccgcagggagctgcctgaggtcaagaagaagtggtctgacctcaagactgaggtccgtcgcaaggttgcccaggtccgggccgccgtggagggtggtgaggcgccgggatccactgaggaggacggagctggggggcctgggacaggcggtggcagtggcggcggtggcccagctgtagccccagtgctgctgacccccatgcaacaacgtatctgcaacctgctgggcgaggccaccatcatcagcctgcccagcaccacagagatccaccctgtggccctcggaccctcggccaccgcagccgcagccacggtcaccctgacacagagtgagtgacctctcctgcccaggcggcgtgcataagtgggaagggtcagcaagctctggggtggcctggggaaggttggctgccaagggtcagaggtcagatgggggtcttggaagaccatgaggccttccaagagcagcaccccagacaaaagtgatcttgctctctaagggacttcctcagcacgtgggctggacttctgatgtgctgg

SEQ ID NO: 30612 - DNA, 1925 bp, Macaca Mulatta
  misc_feature (1)...(1925): n = A,T,C or G
tgtttttgtctcacagaattagagcccattgggaacgatgccaccaccatcagacattgtcaaagtggccattgagtggccaggtgctaacgcccagctccttgaaatcgaccagnnnnnnnnnnnnnnnnnnnnnnnnnnnnnnnnnnnnnnnnnnnnnnnnnnnnnnnnnnnnnnnnnnnnnnnnnnnnnnnnnnnnnnnnnnnnnnnnnnnnnnnnnnnnnnnnnnnnnnnnnnnnnnnnnnnnnnnnnnnnnnnnnnnnnnnnnnnnnnnnnnnnnnnnnnnnnnnnnnnnnnnnnnnnnnnnnnnnnnnnnnnnnnnnnnnnnnnnnnnnnnnnnnnnnnnnnnnnnnnnnnnnnnnnnnnnnnnnnnnnnnnnnnnnnnnnnnnnnnnnnnnnnnnnnnnnnnnnnnnnnnnnnnnnnnnnnnnnnnnnnnnnnnnnnnnnnnnnnnnnnnnnnnnnnnnnnnnnnnnnnnnnnnnnnnnnnnnnnnnnnnnnnnnnnnnnnnnnnnnnnnnnnnnnnnnnnnnnnnnnnnnnnnnnnnnnnnnnnnnnnnnnngattgcagggcatgtgagccagcccatggtggannnnnnnnnnnnnnnnnnnnnnnnnnnnnnnnnnnnnnnnnnnnnnnnnnnnnnnnnnnnnnnnnnnnnnnnnnnnnnnnnnnnnnnnnnnnnnnnnnnnnnnnnnnnnnnnnnnnnnnnnnnnnnnnnnnnnnnnnnnnnnnnnnnnnnnnnnnnnnnnnnnnnnnnnnnnnnnnnnnnnnnnnnnnnnnnnnnnnnnnnnnnnnnnnnnnnnnnnnnnnnnnnnnnnnnnnnnnnnnnnnnnnnnnnnatgtgatccgagggttccgccccatcaaaactgagatggcccatcagctgtatgttcttcaagtcctaacctttaaccttctggaagaaaggatgatgaccaagatggaccccaatgaccaggncaggctcaaagagacatcatatttgaactgaggaggattgcatttgacgcagagtctgatcctagcaatgtccctgggagtgggacggaaaaacgcaaagccatgtacaccaaggactacaaaatgctgggatttacnnnnnnnnnnnnnnnnnnnnnnnnnnnnnnnnnnnnnnnnnnnnnnnnnnnnnnnnnnnnnnnnnnnnnnnnnnnnnnnnnnnnnnnnnnnnnnnnnnnnnnnnnnnnnnnnnnnnnnnnnnnnnnnnnnnnnnnnnnnnnnnnnnnnnnnnnnnnnnnnnnnnnnnnnnnnnnnnnnnnnnnnnnnnnnnnnnnnnnnnnnnnnnnnnnnnnnnnnnnnnnnnnnnnnnnnnnnnnnnnnnnnnnnnnnnnnnnnnnnnnnnnnnnnnnnnnnnnnnnnnnnnnnnnnnnnnnnnnnnnnnnnnnnnnnnnnnnnnnnnnnnnnnnnnnnnnnnnnnnnnnnnnnnnnnnaggttatgcaagtcgtccgagagcaaatcactcgagctttgccatccaaacccaactctttggatcagttcaagagcaaactgcgtagcctgagttactctgagattctacgactgcgccagtctgagaggatgagtcaggatgacttccagtccccaccaattgtnnnnnnnnnnnnnnnnnnnnnnnnnnnnnnnnnnnnnnnnnnnnnnnnnnnnnnnnnnnnnnnnnnnnnnnnnnnnnnnnnnnnnnnnnnnnnnnnnnnnnnnnnnnnnnnnnnnnnnnnnnnnnnnnnnnnnnnnnnnnnnnnnnnnnnnnnnnnnnnnnnnnnnnnnnnnnnnnnnnnnnnnnnnnnnnnnnnnnnnnnnnnnnnnnnnnnnnnnnnntcctgttgcagacattaaggccattgtcactgggaaagattgtccccacatgaaagagaaaagtgctctgaaacagaacaaggn

SEQ ID NO: 30613 - DNA, 190 bp, Macaca Mulatta
aacaaagagaagaaatgaaaagataactagtacaagtgaagaaaatctgaaaatcaatggaagcacaaggacattcttagtcattttctcaattatcaaggaaaaataagatgcaaacagcttcaattatgttgggatagtcaagaatttgtgtcttttgctttgctttatttttaaataatacaattat

SEQ ID NO: 30614 - DNA, 493 bp, Macaca Mulatta
tggaatcactgccaaataagtaactagatgtttataggccatacacgtcttaccactgagatggtgcgtgtatgggtcttggggtaagaggggatggtttggtgggatttctaagagctctcaaagaaaggggaggggcagggggctcctggggaaaagaagcactggctgtggagtagcaagagagagggcgtgggggggatggtaggtggcggtgccaagggataaaacaggaaggaaaaccaagcctgggtcccccacagctgaagctaatatcacttccagtggcccttctgagaaatactctcttctagagtgatccttgggtcctgtgatgtctctgaaggagcacttccagaacattccttgaacttctgcccaatacatattcatatgttcttcttttaaaatgaccccctgggaaagattagcccaaccagggcctccagatcccctgactggtgggatgggagtgggagacacccagtcatcc

SEQ ID NO: 30615 - DNA, 315 bp, Macaca Mulatta
  misc_feature (1)...(315): n = A,T,C or G
aggcatgattccaacagaactgcagcagctctggaaagaagtgacaagtgctcatactgcagaagaaaccacaggcaacaatcacagcagtttggatctgaccacgacatgtgtctcctcctctgcaccttccaagacctccttaataatgaacccacatgcctctactaatggacagctctcagtccacactcccaaaagggaaagnagtttgtcccatgaggagcacccccatagccatcctctctatggacatggtgtatgcaagtggccaggctgtgaagcagtgtgcgaagatttccaatcatttctaaa

SEQ ID NO: 30616 - DNA, 130 bp, Macaca Mulatta
tggtcccacttcgacagaaagttcctcagcagggtcctcatgagacggtcggcccagaagtctcgagaccggatcctgaatgtcttccacgagctgaacctgaaggacgccatcagctacgtggctgagg

SEQ ID NO: 30617 - DNA, 316 bp, Macaca Mulatta
gggcaggcacatggtgatatccaggcgagtagcaaatggagtgcccacgcaatgtgcgtcatgtcccatggaagtttcttggggtctccacatcctcttccaattccagatgcgctgggggtccacagcattccttctgtaggctcttaacaaagctgctcgttccagtatcttcctcagcaacctaagtcctgtcccaagtccccataactatgtcattatccgcagtcctttttggtaatagccttgccgtaagcttaactccctcgaaatcgtacatcatttccgcatgaaaattaccctgaaaaggaagctg

SEQ ID NO: 30618 - DNA, 773 bp, Macaca Mulatta
  misc_feature (1)...(773): n = A,T,C or G
cggagccagcgactgcaaggcccaagaagcacatcctgggaaggaaaatgtattggagaaccctgtggggattcttgtggctttggccctatctgttctacatccaagctgtgcccatccaaaaagtccaaagtgacaccaaaaccctcatcaagacaattgtcaccaggatcaatgacatttcacacacgcagtcggtctcctccaaacagagggtcactggtttggacttcattcctgggctccaccccgtcctgaccttatcccagatggaccagacactggcaatctaccaacagatcctcatcaatctgccttccagaaacgtgatccaaatatccaacgacttggagaatctccgggaccttcttcacctgctggccttctctaagagctgccatttgcccttggccagtggcctggagaccttggagagcctgggggatgtcctggaagcttcactctactccacggaggtggtggccctgagcaggctgcaggggtctctgcaggacatgctgtggcagctggacctcagccctgggtgctgaggccttgaaggtcactcttcctgcaaggactacattgagggaaggaactctggcttctaggtgtctccaggagaccatgagagctgggtgcggtggctcacaaatgtaatctgagcactttgggagggcaaggtgggtgaatcacctgatgnnnnnnnnnnnnnnnnnnnnnnnnnnnatggcgaaaccccgtctctaataaaaatataaaaatcaaaaaaa

SEQ ID NO: 30619 - DNA, 835 bp, Macaca Mulatta
  misc_feature (1)...(835): n = A,T,C or G
agaaaccctatgaatgcagtgaatgtcgcaaaaccttcagtgagaagtcaagtctcattcatcatcagagaactcatactggagaaaagccctttgaatgtagtgaatgtaggaaagcttttgcctggaagccacagcttcttaggcatcagagaattcatacaggggagaaaccctatgaatgcaatgaatgtgggaaagcatttgttcagaaagtgcagctcattaagcatcaaagaaatcacacgggagagaaaacctatggatgcagtgattgtgcaaaagctttctttgagaaggcacagctcattatacatcagagaattcatacaggagagagaccatataaatgtggtgaatgtgggaagtctttcacgagaaagtcacaccttatgaggcatcagaggattcatacaggagataaatactatggatgcaatgagtgtgggaccaccttcaacaggaagtcgcagcttatgatacatcagagaaatcatataatataaaaatcataagtttggtgaattcagaaaggttgctatcaaatgtcatactttctaacacttttgaggatgaataagggagagaaaccctattgaggcagtgactgttgaaaaagcttgaatcgaggagtcaagagtcactatgcagaatttagaaaggagagtttttaaaaagtaaacaatgtaaaaaaagtcatctcccagaagacactactcattacatattggatgactcattgagatgaanaccttttatagtgtgtgatagtacagaagcttttagtcaaagtcagcttattaaatgtttagaatacctaaacaggaagaaaata

SEQ ID NO: 30620 - DNA, 825 bp, Macaca Mulatta
  misc_feature (1)...(825): n = A,T,C or G
ggaacaggagggttcggaagcactgatccggcaggaaaggctgcatattgggcaaatctggtctctgagagcagacctgtgtataaggccattattcaaggaaaacagtttgaagggttggtagacactggagcagatatctctgtcattgctttaaatcaatggccaaaaaattggcctaaacaaaaggctgttacaagacttgtcggcgtaggcacagcttcagaagtgtacgaaagtacaatgattttacattgcttaggaccagataatcaagaaagtactgttcagccaatgattacttcaattcctgttaatctatggggtcgagatttattacagcaatggggtgcggaaatcattatgcccgctccattatacagccccacaagtcaaaaaatcatgactaagatgggatatataccaggaaaggggttaggaaaaaatgaaaatggcattaaagtcccaattgagactaaganaaatcaagaaagaaaaggaatagggtatcctttttaggggcggccactgtagcgcctcctaaaccattccattaacttggaaaacagaanaaccggtatgggtaaatcagtggccgctaccgaaagcaaaactggaggctttacattcattagcaaaggaaacattaaaaaaaaggacacattgagccttcatttctcaccctggaatttctcctgtatttgtaatacagaanaaatcaggcaaaatgccgtatggttaatggactttaagagcccgtaaatgcctgtaattcaaccccatgggggcttccttcanccccgggaaatgccttctccgggccat

SEQ ID NO: 30621 - DNA, 490 bp, Macaca Mulatta
  misc_feature (1)...(490): n = A,T,C or G
agggctgcaaagttgttgcagcagcagggtctgataaaaaggttgcctaccttcaaaagcttggatttgatgttgtctttaactacaagacagtagagtctttggaagaaaccttgaagaaagcctctcctgatggttacgattgttattttgataatgtnnnnnnnnnnnnnnnnnnnnnnnnnnnnnnnnnnnnnnnnnnnnnnnnnnnnnnnnnnnnnnnnnnnnnnnnnnnnnnnnnnnnnnnnnnnnnnnnnnnnnnnnnnnnnnnnnnnnnnnnnnnnnnnnnnnnnnnnnnnnnnnnnnnnnnnnnnnnnnnnnnnnnnnnnnnnnnnnnnnnnnnnnnnnnnnnnnnnnnnnnnnnnnnnnnnnnnnnnnnnnnngggtaaaatccaggacaaggaatatatcatcgaaggatttgaaaacatgccagctgcatttatgggaatgctgaaaggagataatttggggaaaacaatagtgaaag

SEQ ID NO: 30622 - DNA, 114 bp, Macaca Mulatta
cagtgaaaagccagagtgtcggatatcagcgatatgctcccccagggactccatgtaccagtctgtgtgtttgatatcagaggagaggaacgaatgtgtcattgccacggaggt

SEQ ID NO: 30623 - DNA, 220 bp, Macaca Mulatta
gagcaagacagatgttaagcgctgtgtggtaactcagtgtggaaaattttaccatgaggcttgtgtgaaaaaataccctctgactgtatttgagagccgaggtttccgctgcccccttcacagctgtgtgagctgccacgcttccaacccttcaaacccaaggccgtcaaaaggtacaggtgcacctgcgcagccttgctgtggattcagatgcaggccc

SEQ ID NO: 30624 - DNA, 679 bp, Macaca Mulatta
  misc_feature (1)...(679): n = A,T,C or G
gtgcctgtaccataatgcattcatccagattgaagcgagtttggactgtttctagtttgggactgttaccaacattcgtgtatatgtgtccagttacataagtacgagagtttttctggggaataccaggtactatgaaggctcacgtgattttggggtcttatgaannnnnnnnnnnnnnnnnnntgcgtagttgttaaattagtgtccttgcgggatggagccatctattctgccaccttgctccaccttctgtcttttctggggaatagacacaggagtagaattgctgaggcttaggccatgtacctgttcactttctgtagataaaccaaattgtttcccaaagtgcacagatttctttagacgcccaccagcagcgttagagagttcccattcctccacatccttaccaataactgctattgtcagaatttaaaatttttgccagtaatggtaacttgtggttttaatgtgcatttccctgattactgatgaatgaggatgagtgtctttttgtaggttattgaccctttgcatttcttcatgtgtgaaatttatgatcaagtctgtggccatttttctattacattatcttttctttctcctttttggtataagttcttatcccaattaaaaaccctttgccagttatgcgttgtggatatcttctctcatc

SEQ ID NO: 30625 - DNA, 887 bp, Macaca Mulatta
tcacttattcttactattaacgttcctcagaccaatagcaaaatggacaggtgaatgtacatgtgttggagggaggatacgactggtaactcctctccttctatctggcaggtgtactcagtgcctatggggggtatgatggtaaggcagtcctttgccattggaggctctgggagctcctacatctatggctatgtggatgctacctaccgggaaggcatgaccaaggaggagtgtctgcaattcactgccaatggtgagagcttaggctcctgggcctgtgagcttcaaccccaactacctaagccaggccaacattcctcattccttgcagtgatcccagcatctgactctgaacccagctttctccttttatccacagctctcgctttggccatggagcgggatggctccagtggaggagtgatccgcctggcagccattgcagagtcaggggtagagcggcaagtgcttttgggagaccagatacccaaattcgccattgccactttaccgcccccctgaatcctgggattctagtatgcaataagagataccccgtactgatgcaaaatttaataaagtttgtcacagagaatctttatactttggggttcttttttttgacttcaaggttgaatttgtctggcccattcctatttgtataaaccattgtactgaactcagagcgagttggagaggaaatgaaaggaggttatgaatgcttgattccccaataagcttttacatgggtggttttcaaacctcttctctaaaccaccttcccccaaattttctttcccccaccatatccaggtccttgaaccactggattgtggttggtgttgggggtaccagcaacacccgctccctgttcaaccccaagg

SEQ ID NO: 30626 - DNA, 330 bp, Macaca Mulatta
tttatctttgctgtattcatttagggcttgggggagtcccaagataattcagtcactgtcagattaataattttgtcagaacaaagaatatcgttatgattacttaatccttaaaattgtaatctccagagcttgttctcagaatggcccagacccaggcttaattgtaatagtgaacattaatgatacatttacagagaaattataggccaagagaaaatcctggcttttagtagaagttaatattagagaccaaaatctggttctgaaggtgtatatcagccctaaggtgaacgaacttgggaaagattgtctttaaaaatcaatgaa

SEQ ID NO: 30627 - DNA, 709 bp, Macaca Mulatta
cccagcactcgaggatgacatggagtcccagctggacggctccctcatctcacggcggcctattttatgtgtgacctggacacagacagagacagagccgggcccagccctcccgcccccaactgggccacgccttcctagggttccagactggttggacttgttcgtctggacaacactggagtggaacactgcctcccactttcctgggacttggagggaggtggaatggcacactggacttctcccgtctctagggctgcatggggagcccggggagctgagttgtggggatccagagaggaccctcgcccccagagacttggttttgactccagcctgcccctggccccgtgacactcaggagttaataaatgccttggaggaaaacattgggggtgtcttgtaatacatcagaccccctccttgggtggtggggaaagagggggtgggacagggactcctaggtcccagggctgggaagagccgatccacgtccctggggaatgagagcctggaaggggttagactggggaaggctgtggggctcggaccacttggatccttgaaagacgcattggacagccgagaaccgcgaggctcgtggaactaggattcaggtcactggactgtgggctcagagacctggacatttggacttctgagtcccaggacagaagctgcctttctggatggtgtggccagaccg

SEQ ID NO: 30628 - DNA, 1001 bp, Macaca Mulatta
  misc_feature (1)...(1001): n = A,T,C or G
tgaggctgaaattggcattcggttattattaaagactgtggtatcacagataacttagaagatttgaaatgtgattttcagatgtgataaaggtggtaatgacgctttgccgtccttccaggtttttggagtggaatgtatanccgcttgaaaaaagggatgcagccccgacagtcagttacagattacctgatggcagtgaaggaggaaactcagcagctagaggaagaactagaggccctggaagaagtaagacatacttgctttgttaatctatnttctgtgcttatttctagaagagcaaggcttcatgaaagcctcttaagattcagtgcaacacaaccatttctcatgtttagccagtagaacacctgaaacacaaccccatccaggtgaggactcagataaccgaagcccaaacctaggcatttaatgcatttcacacatctggcttgtggctcagttccacaaatttttggttgttccttatttttaggtcaacttttttgattactgttatttgggagtagtaaaattaaatctttctggcaaagtgaaaaagtaaaagaataaaatcaaatatatgtacttataaagatctgtctccacttttaaaaattatgtaactattatattaatctataattggtaataggggagactgactataaagtctatcctttggcttctaataacttccctatacttggacagggaggttataataaaatgcttttcctaattggataactttgtttccagcggtactactgtagtttatgaaaatcttaggattctgttagtctattccagcagtctggctctttaaaactggctcttcattattacaaagtcaaaattccttaggctagcatttgagattttctcttttcaactttattttccatgctaacagttaacggtttctgctgcttatatacaatttagaccttatggcgtttgtgttttttcctctcactgtccctccacctgccaggaat

SEQ ID NO: 30629 - DNA, 613 bp, Macaca Mulatta
  misc_feature (1)...(613): n = A,T,C or G
ggagcgagatcatgccctgggccactgggagccccactggaaggagttccgctttgacctgacccagatcccggatggggaggcggtcacagctgcggagttccggatttacaaggtgcccagcatccacctgctcaacaggaccctccacgtcagcatgttccaggtggtccaggagcaggccaacaggnnnnnnnnnnnnnnnnnnnnnnnnnnnnnnnnnnnnnnnnnnnnnnnnnnnnnnnnnnnnnnnnnnnnnnnnnnnnnnnnnnnnnnnnnnnnnnnnnnnnnnnnnnnnnnnnnnnnnnnnnnnnnnnnnnnnnnnnnnnnnnnnnnnnnnnnnnnnnnnnnnnnnnnnnnnnnnnnnnnnnnnnnnnnnnnnnnnnnnnnnnnnnnnnnnnnnnnnnnnnnnnnnnnnnnnnnnnnnnnnnnnnnnnnnnnnnnnnnnnnnnnnnnnnnnnnnnnnnnnnnnnnnnnnnnnnnnnnnnnnnnnnnnnnnnnnnnnnnnnnnnnnnnnnnnnnnnnnnnnnnngatgacgtccacggctcccacgggcggcaggtctgccgtcggcacgagctctacgtcagcttccaggaccttggctggctg

SEQ ID NO: 30630 - DNA, 151 bp, Macaca Mulatta
cggagattgaagagatagatgaagaaaatggcaccgctgcaatcacctttgctggttatggcaatgctgaagtgactccactgttgaacctcaagcctgtagaagaaggaaggaaagcaaaggaggacagtggcaacaaacccatgtcaaa

SEQ ID NO: 30631 - DNA, 226 bp, Macaca Mulatta
agtatcgttcacaccattcctacttgtttccctatcatattacaggcaattgccctcttggaagaatttcgaggcatagaccgagatgtggaaggatctgccaagcagtggaggaagtgggtagaatccgagtgtccagaaaaagaaaaattacctcaagaatggaagaagaagagtttaatacagaagctgattattctgagagcaatgcgccctgacagaatga

SEQ ID NO: 30632 - DNA, 535 bp, Macaca Mulatta
cttagagactcccctttgacacttgccatgaaagaacacattctccgccaccccattactatcaactttgcttttctccctggacttcctttctgtcctcttctttttcccttctcccatcacagaggcctgtgagctgcccagtaactgacctgtaacttcgtctaagtccccagatggtacaatgggagctgagttgttgaagggagaagctggagacttccaactcccattcaagataataaagatgatttttcaatcctcatctcattctggggtttgtctccagacatcattcccactcctcccatttcaacactccccctggatcctctaccacctaaacccccaggtggacggcgtcaggaagaacagtggcagtaactctcactttgtagtggtatatttaggatttgatgtgacacagttatttattgctgagtgagcaaacccctagtccccaagtggggactacaggcttcagtgcttcccccacactgcctgaactaccagcccttctgcattggccctcctg

SEQ ID NO: 30633 - DNA, 741 bp, Macaca Mulatta
  misc_feature (1)...(741): n = A,T,C or G
aaatatttttttacaannnnnnnnnnnnnnnnnntccagttataaagggtgaaaaactgaaaaatttccccctggggctaggacatgaacaaaagtatggcattccccaaaaaggcacatttctttgtaacagttttttcaaatttacctccctatttaatgaacgcatattaattaaatatgaaaatgtgcatacattgaaaaccaggatttgtttttaatgtgctttagcagcagtggattctaaaactgtcttgtcctctctcattagtttgaataatcacgctccctagagatcagaccattgagtctgaaatgtcaaaatgctagagaaaagagggagtaatttttaactacccagaaagaagatgcacaaatacctcttttcctatgtaggtcacggcatatgttggcttttataatttgggatttctcgtaattgatgacccaccctattgggcagtgaggcatagcaaagtgttcctaggttatcgcaggaaacttcaataaaatcttacatattggtatgggtactcactaatcaaagaggaaaataaagttgacttagaggataagactgattaaacgacactacaatgcatattagactgaattgaaaaagagaatggatttgtcttatttttcaaaatttgttttcactttgcacataagcccttcaaaatgtagataacaaatgaaaaagtggaacccactcagtaaggtgagatttctgtaagtacc

SEQ ID NO: 30634 - DNA, 762 bp, Macaca Mulatta
  misc_feature (1)...(762): n = A,T,C or G
ggtgnnnnnnnnnnnnnnnnnnnnnnnnnnnncctgggagtccaaggtgggcagattatgaggtcaggagattgagaccatcctggccagcatagtgaaaccccatctccaccaaaaatacagaaaactagccaggcatggtgccatgtnnnnnnnnnnnnnnnnnnnnnnnnnnnnnnnacagaagaattgcccgaacccaggaagtnnnnnnnnnnnnnnnnnnnnnnngnnnnnnnnnnnnnnnnnnnnnnnnnnnnnnnnnnnnnnnnnnnnnnnnnnnnnnnnnnnnnnnnnnnnnnnnnnnnnnnnnnnnnnnnnnnnnnnnnnaatataaagcccttaccttaaaactcagaatttatcttattcactttgtacccttacaagtttatgaacttgcaaggcagttgaaaactatggtaagtcttcaagtcccagctttattaaatgtaagagatcagcaaactttaatctaaattttaagaattttaagaaatatttggaaacatttattctgaagtattttttaattatttggaaaactgacttaagtggaatgggtcatttcctgacattagaaaaataaaattatttgatatcaaataacaatagcattctctgtataaaaaaaataactaaagggaaatgtgggggtatgtctgtggccaagcctgagaatgaaaaagatcacacaccggcactgtggcataattatctggcttcacaaaatcctgaatatatcagacagccccgtaatat

SEQ ID NO: 30635 - DNA, 428 bp, Macaca Mulatta
taagtgtaaatcagtaattctaccccctagcaagggggtagcctgctttttccctttttccttctgggaataattgtgggcttcttcgcaaatttctacaacccgtttcctcttctcatgcttgggtttccctgtttgcacatatgcgtgtgcaggactggctgtgtgctcggactctgctccaggtggaagcatgttttcccttgttactgttggagaaactcaaaccttcgagccctacgtgtagccattttgtcaagtcatcaactgtatttttgtactggcattaacaaaaaaagagataaaatattgttccattaaactttaataaaactttaaaaggaaatgtgctgtgatggctttttgttattagaaaaggagggagggatggagatcacttcaggaagaaaactaacctagaggaccta

SEQ ID NO: 30636 - DNA, 141 bp, Macaca Mulatta
aggtgaatcatccatgataatggaaatagaactccagagccaggtgctggatgccatgaactatgtcctttacgaccaactgaagttcaaggggaatcgaatggattactataatgccctaaacttatatatgcatcaggt

SEQ ID NO: 30637 - DNA, 329 bp, Macaca Mulatta
  misc_feature (1)...(329): n = A,T,C or G
accggattttcaagcttgccttctaccctaatcaggatggggacatacttcgcgaccagnnnnnnnnnnnnnnnnnnnnnnnnnnnnnnnnnnnnnnnnnnnnnnnnnnnnnnnnnnnnnnnnnnnnnnaggtttatcttcgagaagcaccatggccatctgcacaatcagaaatcaggacaataagtgcttataaaaccccccgggacaaagtgcagtgcatcctgagaatgtgctctacgattatgaacctcctgagcctggccaatgaggactctgtccctggagcggatgactttgttcctgtgttggtgtttgtgttgataaag

SEQ ID NO: 30638 - DNA, 409 bp, Macaca Mulatta
atattctttttgaatgtgattttccataataaacttcatctgcagcctttctggcatatctttataatttggaatttaaagaaatttatcttcagttgacatgaagacaaactttatttttccttaacaataaaaccgggctataaaagtgtcagccaaaaggaacacaaaaggagagttttataattcactttaaaaggagatctgatggtaaaagtttaaagataaaaatattttgttcatcaattacagagcgatgaccccacagcatctacctcacggtggaaaataccaagttcttggagattactgtttggcagtggtcttcccccggcacttttttgatctgttttccgttttataccttatacccagaacacttactaccaacacaactgttaaacattct

SEQ ID NO: 30639 - DNA, 761 bp, Macaca Mulatta
taaaaccactcatcacactactgaaagaccctctgtctctctctatgaacagcacatggtgagccccatggtccttgtctatagaagtccctcctttggtccaaagcatttggaagaggaagaagaggggaatgagaaagaaggaagtgacgcaaaacatctccaaagaagtcttttggaacgggaaaatcattcaccactcacagggtccaatatgaaatacaaaaccacgaaccaatcgacagaatttttatccttccaagatgccagttcactgtatagaaacattttagaaaaagaaagggaacttcagcaactgggaatcacagaatacctaaggaaaaacattgctcagctccagcctgatatggaggcacattatccaggagcccacgaagaactgaaattaatggaaacattaatgtactcacgtccaaggaaggtattagtggaacagacgaaaaatgagtattttgaactcaaagctaatttacatgctgaacctgactatttagaagtcctggagcagcaaacatagatggagagtttgagggctttcacagaaatgctatgattctgtttaaagtccataccttgtaaataagtgccttacatgagtgtgtcatcaatcagaacttaagcacagtagtaaactacgggggaaaaaaaggaagaaaaataaactcagggatcattgggagaagccatggcattatcttcaggcaattcagtctgtcccaaataaaataaatccttgcatg

SEQ ID NO: 30640 - DNA, 667 bp, Macaca Mulatta
ttgttcagagcttcttaaaagaactcactattttactagatgatttgtttcttctgaattcctctttaaggctacaggtgatgctttttactttgagctgatcactttttatgtccccatccttacttcttgtttttcatacccttgtagagttttccccatataggaaacccatgcttgagatttgctcaccagagttacagaactctcagggaggggactcagagttctaaccatcctcttcccctccttttctcccaggatgacaacatcatgaggtctctccagctgtttcaaaatgtcatgtaactggtgacactcagccattcagctctcagagacattgtactaaacaaccaccttaacaccctgatctgccctcgttctgattttacacaccaactcttgggacagaaacacctttcacactttggaagaattctctgctgaagactttctatggaacccagcattatgtggctcagtctctgattgccacctcttcctccttcttcttcttgagagagacaagatgaaatttgagtttgttttggaagcatgctcatcttctcacactactgccctatggaaggtccctctgcttgagcttaaacagtagtgcacaaaatattctgcttacatgcccccagcccactgcctccaagtc

SEQ ID NO: 30641 - DNA, 3194 bp, Macaca Mulatta
  misc_feature (1)...(3194): n = A,T,C or G
tcggatggagatggcgagttctgccggctcctggctctctggctgcctcattcctctcctcttcctccggctgtctgtgcatgtgtcaggncaggccgcgcaggggatgccagcaagttccacgtggccttactagggggcacagccgagctgctctgtcctctctccctctggcctgggacggtgcccaaggaggtgaggtggctgcggtccccattcccgcagcgctcccaggttgttcacatgttccgggatgggaaggaccaggatgaagatgtgatgccggaatataaggggaggacggtgctggtgagagatgcccaagagggaagtgtcactctgcagatccttgacgtgcgccttgaggaccaagggtcttaccgatgtatgatccaggttggaaatctgagtaaagaggacaccgtgatcctgcaggttgcagnnnnnnnnnnnnnnnnnnnnnnnnnnnnnnnnnnnnnnnnnnnnnnnnnnnnnnnnnnnnnnnnnnnnnnnnnnnnnnnnnnnnnnnnnnnnnnnnnnnnnnnnnnnnnnnnnnnnnnnnnnnnnnnnnnnnnnnnnnnnnnnnnnnnnacaatcttctttcagagcatgctaaagaaaaaggnnnnnnnnnnnnnnnnnnnnnnnnnnnnnnnnnnnnnnnnnnnnnnnnnnnnnnnnnnnnnnnnnnnnnnnnnnnnnnnnnnnnnnnnnnnnnnnnnnnnnnnnnnnnnnnnnnnnnnnnnnnnnnnnnnnnnnnnnnnnnnnnnnnnnnnnnnnnnnnnnnnnnnnnnnnnnnnnnnnnnnnnnnnnnnnnnnnnnnnnnnnnnnnnnnnnnnnnnnnnnnnnnnnnnnnnnnnnnnnnnnnnnnnnnnnnnnnnnnnnnnnnnnnnnnnnnnnnnnnnnnnnnnnnnnnnnnnnnnnnnnnnnnnnnnnnnnnnnnnnnnnnnnnnnnnnnnnnnnnnnnnnnnnnnnnnnnnnnnnnnnnnnnnnnnnnnnnnnnnnnnnnnnnnnnnnnnnnnnnnnnnnnnnnnnnnnnnnnnnnnnnnnnnnnnnnnnnnnnnnnnnnnnnnnnnnnnnnnnnnnnnnnnnnnnnnnnnnnnnnnnnnnnnnnnnnnnnnnnnnnnnnnnnnnnnnnnnnnnnnnnnnnnnnnnnnnnnnnnnnnnnnnnnnnnnnnnnnnnnnnnnnnnnnnnnnnnnnnnnnnnnnnnnnnnnnnnnnnnnnnnnnnnnnnnnnnnnnnnnnnnnnnnnnnnnnnnnnnnnnnnnnnnnnnnnnnnnnnnnnnnnnnnnnnnnnnnnnnnnnnnnnnnnnnnnnnnnnnnnnnnnnnnnnnnnnnnnnnnnnnnnnnnnnnnnnnnnnnnnnnnnnnnnnnnnnnnnnnnnnnnnnnnnnnnnnnnnnnnnnnnnnnnnnnnnnnnnnnnnnnnnnnnnnnnnnnnnnnnnnnnnnnnnnnnnnnnnnnnnnnnnnnnnnnnnnnnnnnnnnnnnnnnnnnnnnnnnnnnnnnnnnnnnnnnnnnnnnnnnnnnnnnnnnnnnnnnnnnnnnnnnnnnnnnnnnnnnnnnnnnnnnnnnnnnnnnnnnnnnnnnnnnnnnnnnnnnnnnnnnnnnnnnnnnnnnnnnnnnnnnnnnnnnnnnnnnnnnnnnnnnnnnnnnnnnnnnnnnnnnnnnnnnnnnnnnnnnnnnnnnnnnnnnnnnnnnnnnnnnnnnnnnnnnnnnnnnnnnnnnnnnnnnnnnnnnnnnnnnnnnnnnnnnnnnnnnnnnnnnnnnnnnnnnnnnnnnnnnnnnnnnnnnnnnnnnnnnnnnnnnnnnnnnnnnnnnnnnnnnnnnnnnnnnnnnnnnnnnnnnnnnnnnnnnnnnnnnnnnnnnnnnnnnnnnnnnnnnnnnnnnnnnnnnnnnnnnnnnnnnnnnnnnnnnnnnnnnnnnnnnnnnnnnnnnnnnnnnnnnnnnnnnnnnnnnnnnnnnnnnnnnnnnnnnnnnnnnnnnnnnnnnnnnnnnnnnnnnnnnnnnnnnnnnnnnnnnnnnnnnnnnnnnnnnnnnnnnnnnnnnnnnnnnnnnnnnnnnnnnnnnnnnnnnnnnnnnnnnnnnnnnnnnnnnnnnnnnnnnnnnnnnnnnnnnnnnnnnnnnnnnnnnnnnnnnnnnnnnnnnnnnnnnnnnnnnnnnnnnnnnnnnnnnnnnnnnnnnnnnnnnnnnnnnnnnnnnnnnnnnnnnnnnnnnnnnnnnnnnnnnnnnnnnnnnnnnnnnnnnnnnnnnnnnnnnnnnnnnnnnnnnnnnnnnnnnnnnnnnnnnnnnnnnnnnnnnnnnnnnnnnnnnnnnnnnnnnnnnnnnnnnnnnnnnnnnnnnnnnnnnnnnnnnnnnnnnnnnnnnnnnnnnnnnnnnnnnnnnnnnnnnnnnnnnnnnnnnnnnnnnnnnnnnnnnnnnnnnnnnnnnnnnnnnnnnnnnnnnnnnnnnnnnnnnnnnnnnnnnnnnnnnnnnnnnnnnnnnnnnnnnnnnnnnnnnnnnnnnnnnnnnnnnnnnnnnnnnnnnnnnnnnnnnnnnnnnnnnnnnnnnnnnnnnnnnnnnnnnnnnnnnnnnnnnnnnnnnnnnnnnnnnnnnnnnnnnnnnnnnnnnnnnnnnnnnnnnnnnnnnnnnnnnnnnnnnnnnnnnnnnnnnnnnnnnnnnnnnnnnnnnnnnnnnnnnnnnnnnnnnnnnnnnnnnnnnnnnnnnnnnnnnnnnnnnnnnnnnnnnnnnnnnnnaatcccaagatctgcagggtaagtcagcaagatggagtcccatgagagctgatggtttagttccagtctgatggcagcaggcttgacaccaaggaagagctgatgtttaattcaagtctgaaggcagggaaaaaaagctgatggccctgtccaaaggctattaggcaggaagaattctcttagtcagggcagagttagctcttttgttctattcaggcctttaactgattccatgaggcccacccacatttgggaggacagtctgcattactcagtctactgatttgaatgttaatgtcattgagaaacaccctcacaggaacactcagaataatgtttgaccaaataactgggcatcttgtgacccagttaagttggtacataagattaactatcacagtgactcagtggaattgtttgcttttctacagttttaaaataaaagtttggtatttgtgtttt

SEQ ID NO: 30642 - DNA, 1518 bp, Macaca Mulatta
  misc_feature (1)...(1518): n = A,T,C or G
aggggtgttaaagaccacgcagaagacatggccgtggatattttgagtacattganagagaacaagtatagcagagccaaatctcctcagccaccggttgaagaagaagatgaacacttcgatgacacagtggtttgtcttgatacttataattgtgatctacattttaaaatatcaagagatcgtctcagtgcttcttcccttacaatggaaagttttgcttttctttgggctggaggaagagcatcttatggtgtgtcaaaaggcaaagtgtgttttgagatgaaggttacagagaagatcccagtaaggcatttatatacaaaagatattgacatacatgaagttcgtattggctggtcactaactacaagtggaatgttacttggtgaagaagaattttcttacgggtattctctaaaaggaataaaaacatgcaactgtgagactgaagattatggagaaaagtttgatgaaaatgatgtgattacatgttttgctaactttgaaagtgatgaagtagaactctcctatgctaagaatggacaagatcttggcattgctttcaaaatcagtaaggaagttcttgctggacggccactcttcccgcatgttctctgccacaactgtgcagttgaatttaattttggtcagaaggaaaagccatattttccaatacctgaagagtatacttttatccagaatgtccccttagaggatcgagttagaggaccaaaggggcctgaagagaagaaagattgtgaagttgtgatgatgattggcttgccaggagctggaaaaactacctgggttactaagcatgcagcggaaaatccagggaaatacaacattcttggcacaaatactattatggataaaatgatggtggcaggttttaagaagcaaatggcagatactggaaaactgaacacactgttgcagagagccccacagtgtcttgggaaatttattgagattgctgcccgaaagaagcgaaatttcattctggatcagacaaatgtgtctgctgctgcccagaggagaaaaatgtgcctgttcgcaggcttccagcgaaaagctgttgtagtgtgcccaaaagatgaagactataagcaaagaacacagaagaaagcagaagtagaggggaaagacttaccagaacatgcggtcctcaaaatgaaaggaaactttaccctcccagaggtagctgagtgctttgatgaaataacctatgttgaacttcagaaggaagaagcccaaaaacttttggagcaatataaggaagaaagcaaaaaggctcttccaccagaaaagaaacagaacactggctcaaagaaaagcaataaaaataagagtggcaagaaccagtttaacagaggtggtggccatagaggacgtggaggattcaatatgcgtggtggaaatttcagaggaagagcccctgggaatcgtggcggatataataagagggggcacatgccacanaaaagtgggtggcggcggtggaaaatggtggaa

SEQ ID NO: 30643 - DNA, 816 bp, Macaca Mulatta
aggctaggacactgagggactctgaacccagcccacagggaagcagggggaggtgaagccctccccccgccccgcgccggcccttcccatcccttccctgctctctgggggtctaaggacccaagctccctagacttcttccttttccgctgtctgtacgtttcagattacaccagtgtagacctgtactgctggcggggctgggcccctgaacgccagaaagtgaatcttagcaagctctgccctaaactgagaaccatgtgctgagggaagggctgaaaggtgaatgctcagcctccctcacatgggtcccgggttacattaggtaccgggctgataggcatttggccatgcttctttttaagtctgcctttggtggccttctcaggcccacaacaaggctgttgttacgaagtggaaaagctgaccagtgctccacactcggggcacatacctttccatgagcagctcctgccctgtggcgacagagccagcgtgcaccagacgctggtgccacggcgaagcaggcgttcaagaccacggagaagacaaatcctcatctagaaatgaggacacctcagtgacaaacacccctttttataccgatcagtatcttctgttcattaaaacgggctatccattacagcctagttgtctttcctgggctgagaggagcccatgcttcaatcaccagggactgtctgctagggcccaggcctgttagccatgccggccggcagcaagcggcaggagtgcagagtgggtaggatgcggggtcctagcactaggctcttttgcttaatgcatctctgctcg

SEQ ID NO: 30644 - DNA, 585 bp, Macaca Mulatta
tgttccaaaataccgtgaccagattcctagcccaggacttacggtttttccaaaaccagtgactgcattggaatatacattcagtaggtctgatccaacttcgtatgcagggtacattgaagaccttaagaagtttctaaaaccatatactttagaagaacagaagaacctcacaatctgtcctgatggagcactttccgaacagaagggtctagtttatgttgcatgtcagtttcctatttcgttacttcaagcatgcagtggtatgaatgatcctgattttggctattctcaaggaaacccttgtattcttgtgaaaatgaacagaataattggattaaagcctgaaggagtgccaaggataaagtgtgtttcaaagaacgaaaatataccaaatgtagcattttatcctcataatggaattatagacttaaaatatttcccatattatggtaaaaaacttcatgtggggtatctacagccattggttactgttcaggtcagctttgctcctaacaatactgggaaagaagtaacagttgagggcaagattgatggatgagccaacgtaaaaagtcaggatga

SEQ ID NO: 30645 - DNA, 179 bp, Macaca Mulatta
  misc_feature (1)...(179): n = A,T,C or G
agggtatcagctctgcagacacagtctgatctccaaggtggatcaagaagagctgaagacagatgaaagaggaattctacaaggtgactgtgcanncagactgggaaactcgacttaaatcaaaagatgcaattgctgtgcagaacattcctgggggaaaaacatccaatggcataaac

SEQ ID NO: 30646 - DNA, 611 bp, Macaca Mulatta
  misc_feature (1)...(611): n = A,T,C or G
ggttattttcttttatntgagctgtgttccaaagacccagcattccaaaaccttggaacggttttgttcaattatgccagctaattctggacttgcattgaggtaagaaaaagtaacattcttttggttctctgcctaatggaataggctcttcatataaaattattcttgaaaacttgataaaaatagtctgttgttccattatgtcctcatgaatatatactacttaatttcagagttgttaagccaatgtttagctattcgttcaaaagtcaatgtaaaaattctggtcgcttcagaaaacttcaagttacaagggggcaaataattccattcaagtaaagttcatctgtgttccctaaacacacaccatctgtccttagcatgtgcattataagcagtaagcttgttttccatggcaaggaaatattatttaagaggctttcatattttcacctaggtcagttgctctcaaatattggcaaacattagaatctcctgggatgctcatttaaaatgtagattcctgaccttgagccctcacaccacatttgtgaagcactgattagggatttcatatattcaatcagaacgagatttctcagcctttc

SEQ ID NO: 30647 - DNA, 433 bp, Macaca Mulatta
ttggagttacatacaagaatgggggcattactccttttggaaatgccaagtttatcctatgacaatggtaatgtatgttttctccatgtttaaataaggaagatgtttatataaaagagaaaaatggtttgatcaggtcagaagataaggtggggggcggtcctgtagaagcagtggatttcctagtcagtgggactagacttccccactggggaggggtgtggtggtgtgccaagaacataggtattaggaaactttggatgaactttcaagataaaacaagagtgaaacaaagtttgagcctttgggagatgagtctgcctttattcctgattccctccatgggtacgtgctaaaacttcccaattctacgaaagctgttggtgtacattttgggaagcacactacgtaagagcaagggcttaggtaacag

SEQ ID NO: 30648 - DNA, 408 bp, Macaca Mulatta
ggtgggcgtttcaaccaactcagccaaggaacctatgacagagaaagtcatttcaactcttacctcatcacgttgaataaagacagagaaagcagaaagagacattgttcttctcctgagtcttttgaatggaaattatattatgtattatgttatagccatcataaaaccattttggtagttttgactgaactgagtgttcactttttcctttttgattgaatacaatttaaattctacttgatgacttcagtgggctcctgatgcaagatgccccttcaattttaagtcagtctccttacagaggttaaggtctagtggctaattcctaaggaaacctgattaacacatgcccacaaccatcctggtcattctcgagcatgttctattttttcactaatcacccct

SEQ ID NO: 30649 - DNA, 334 bp, Macaca Mulatta
aagggaagagaagagtaggattatccaggggtagcagatggcccttactagcaggaaggggtgtgctcattcagctgctgcttctatgagacaacctcttgccaccatgtagttcatggagtgttaggtgaaatctaacggtgaaagatgttagatcagtggactaggggaagtctgggatttggaggaataagtctttcttcctccaggcagatacagaggccctgattagaatggacacagggtagagttctgattcccctcccccaagcttaataatcctggcttcaagaagatggaaactctggacagaggcaaaggcttagctcccatc

SEQ ID NO: 30650 - DNA, 1185 bp, Macaca Mulatta
  misc_feature (1)...(1185): n = A,T,C or G
ggaccccaatttactcaggagcaagggcatttnntacctgagaggaaggagtttcctgtagagtctgtaaaagtcactgaggtaccagtagagccagtcttgacagtacatccagagagcaagagcaaaaccaaaactaggagcagaagtagaggtcgagctagaaataaaacaagcaagagtagaagtcgaagcagtagcagtagtagttctagtagcagttcaaccagtagcagcagtggaagtagttctagcagtggaagtagtagcagtcgtagtagttccagtagcagctccagtacaagtggcagcagcagcagagatagtagcagcagcactagtagtagtagtgagagtagaagtcggagtaggggccggggacataatagagatagaaagcacagaaggagcgtggatcgcaagagaagggatacttcaggactagaaagaagtcacaaatcttcaaaaggtggtagtagtagagatacaaaaggatcaaaggataagaattcccggtctgacagaaagaggtctatatcagagagtagtcgatcaggcaaaagatcttcaagaagtgaaagagaccgaaaatcagacaggaaagacaaaaggcgttaatggaagaagccaggctttcttagccattctttgcagcagaagatttcttgatataaaaggattacctgtccttgtaaggaggatgctgccttaagaattgcatgttgtaaaaaatctttttggaaaatacagactgtttgtttaccagacattcttgtactttttgcataattttgtaagagttatttatcaaaattatgtgaggttccaaaatatgtaaaaatgataataataagaaaagattaacatcccttgtcatcttttttaaatatcctatactcttcagtaagaatctgtatattttaataggcaaatctttaagtctgttcccttctaattctgtatcatacattggcttttgtaagaaataagggggggctggtttcgttagtttttgggggatgtcctgggttgacacgttggagtaataaaatatccctcctgtgatcaagttgccagccttgtttaacactaaggaatactgccaccgggagattagagaagggttcttggaggggggccctccccgcgtcgatggtggattggaccccggggaggacaagttgt

SEQ ID NO: 30651 - DNA, 571 bp, Macaca Mulatta
ctcagccactctccgtcacctgggctgccacctccaaccacagggaccaagcgaagctctggggccacagcttcctgaggcagcccagagccctttctgcgggatgggctgagcctgccctgtggcagggggcacccagcgggtgggccttgtgatccgtgcgttccctcacaggctccgccgcttctgtcactacatcgtgaccatgaggtacttcgagatggtgattctcgtggtcatcgccttgagcagcatcgccctggctgctgaggacccagtgcacacggactcgcccaggaacaatgtgagtggcccggacggctgggcccccgccaggctgtggggcgggagctgggtgccttcccaggagcccaaggggctggggtgggactggagtcctgtcttctcacaggacacccctccttcctctctctgtgtgcctgggagtgcgggactgaaggtctgcagacaggaagacggtgcggcagagggggcctattcccagacaggcttgtcggagaccccctcccagaaccgttgtccacaggcttcctggcttcctggctgactc

SEQ ID NO: 30652 - DNA, 536 bp, Macaca Mulatta
  misc_feature (1)...(536): n = A,T,C or G
gtgctcagggagtcttctatttgttctcttctgctacagacgaaaactgcaaggacaagtactacaactgcaacgtggtggtccaggcaagactctgtgtttacaactactacaagaccgcctgctgtgcctcctgcacccgtgtggccaacaggcagacgggcttcctggggagtagataacacccctgcacccccatcagcagggcagcatcaccgccctcccgggggcttcagcagtgcgcctggctggctgctgctccaccacgggccgcctggcccaggcactgccaaccaacttagtcaccacccctgcctccggtgaatgcaccccgtggtacccaggggctttgtacacagaatgtttgaaagccacagttggtcctctaagcatcaccatgtactgatattcccctccttggacctggcacctgttaatggtgccctttganagccaagcagtgggaagtacatggagctctcagccctgctcccatctggcaccttcaagtcagcagatgggccactgactgagcg

SEQ ID NO: 30653 - DNA, 519 bp, Macaca Mulatta
  misc_feature (1)...(519): n = A,T,C or G
tggctgcctctcaggtcctgggggagaagattaacatcctgtcgggagagactgtcaaggctggggacagggaaccgctggggaacgactgtcccgaacaagataggctcccccagcgctcctggaggcagaagtgcgcctcctacgtgttggccctgaggccctggagcttcagtgcctcactcacaccggtggccctgggcagtgcccttgcctacagatcccacggtgtcctggatcccaggctcttggtgggttgtgccgtggctgtcctggctgtgcacggggccggtaatttggtcaacacttactatgacttttccaagggcattgaccacaaaaagagtgatgacaggacacttgtggaccgaatcttggagcctcaggatgtcgtccggttcggagtcttcctctacacgttgggctgcgtctgtgccgcttgcctctactgcctatcncctctgaaactggaacacttggctctcatctactttggaggcctgtctggctcctttctcn

SEQ ID NO: 30654 - DNA, 1141 bp, Macaca Mulatta
tcttcttcatgcatctcctccccaattttgctgagtgctggtgcgatcaagtgattctggacatcctgttgtgcaatggcggtggtatttggctgggcatggtcgtttgccggtttttagagatgaggacttaccactgggcaagcttcaaggacattcataccaccaccgggaagatcaagagagctgtgctgcagttcactcctgctagctggacctatgttcgatggtttgaccccaaatcttcttttcagagagtagccggagtgtaccttttcatgatcatctggcagctgactgagttgaataccttcttcttgaagcatatctttgtgtaccaagccagtcatccattaagtaggggtagaattctctttattggtggcatcacggctcccacagtgagacagtactacgcttacctcaccgacacacagtgcaagcgcgtaggaacacagtgctgggtgtaaggggtcattggtttcctggaggccattgtctgcataaaatttggacaagatctcttctcttagacccaagtactctatgttgtgctttggcttctttgcgtggctttcaccagtttcctctgtctgtacggcatgatttggtatgcagaacactatggtcaccgggaaaagacctactcagagtgtgaagatggcacctacagtccagagatctcctggcatcacaggaaagggacaaaaggttctgaagacagcccacccaagcacgcaagcaacaacgaaagccattcttccaggagaaggaatcggcattccaagtcaaaagtcaccaatggcgttggaaagaaatgaaaaaccctggttaatcaaagatgttccagagtgcctagaactgagagggaaacggaactcatttggatctccctgtgaggaggtcgaggcgcacagggcaagcaggaagaggcgagggcacttgggggtcattatttgagatcgtaagtcttgtttcccacagacctggccgcgtcaggcagctcatcgcctgggggcctttgccaacgtggggtctcttctaacttcagcacttggcatgcggtcaccggtagcagtgccggtgtgtcggagggaaacggtagctattccttaccagttgccaacagcagctcctcgcc

SEQ ID NO: 30655 - DNA, 359 bp, Macaca Mulatta
atttgaataactctttaggaccagctcggtagccaaggtgatttaagcatacaggatagcaggaaaccccagggtgatggggctctggttagttttccatatttaggcctttaataggcagtcagtaacgccacatttcagcttttcttttcagttctttaattgagaagacaacttattcatttttaggtactcggaaatgtggcagaaacccagacagaagcaagtaagtaccctgcaggctgtgcacggtgtgccagaacaacagcagccctgctgtagatgcccattacttgggaagccagattctactcatctgttggttgccttgtacagtaataagaagtaacatcagcaga

SEQ ID NO: 30656 - DNA, 3470 bp, Macaca Mulatta
  misc_feature (1)...(3470): n = A,T,C or G
ggacactttaaccccgaggtggtcaagtaccggcagctatgcttcaagtcacagtacaagcgctacctcaactcccagcagcagtatttccatcggctgctgaagcaaattcttgcttctcggagtnnnnnnnnnnnnnnnnnnnnnnnnnnnnnnnnnnnnnnnnnnnnnnnnnnnnnnnnnnnnnnnnnnnnnnnnnnnnnnnnnnnnnnnnnnnnnnnnnnnnnnnnnnnnnnnnnnnnnnnnnnnnnnnnnnnnnnnnnnnnnnnnnnnnnnnnnnnnnnnnnnnnnnnnnnnnnnnnnnnnnnnnnnnnnnnnnnnnnnnnnnnnnnnnnnnnnnnnnnnnnnnnnnnnnnnnnnnnnnnnnnnnnnnnnnnnnnnnnnnnnnnnnnnnnnnnnnnnnnnnnnnnnnnnnnnnnnnnnnnnnnnnnnnnnnnnnnnnnnnnnnnnnnnnnnnnnnnnnnnnnnnnnnnnnnnnnnnnnnnnnnnnnnnnnnnnnnnnnnnnnnnnnnnnnnnnnnnnnnnnnnnnnnnnnnnnnnnnnnnnnnnnnnnnnnnnnnnnnnnnnnnnnnnnnnnnnnnnnnnnnnnnnnnnnnnnnnnnnnnnnnnnnnnnnnnnnnnnnnnnnnnnnnnnnnnnnnnnnnnnnnnnnnnnnnnnnnnnnnnnnnnnnnnnnnnnnnnnnnnnnnnnnnnnnnnnnnnnnnnnnnnnnnnnnnnnnnnnnnnnnnnnnnnnnnnnnnnnnnnnnnnnnnnnnnnnnnnnnnnnnnnnnnnnnnnnnnnnnnnnnnnnnnnnnnnnnnnnnnnnnnnnnnnnnnnnnnnnnnnnnnnnnnnnnnnnnnnnnnnnnnnnnnnnnnnnnnnnnnnnnnnnnnnnnnnnnnnnnnnnnnnnnnnnnnnnnnnnnnnnnnnnnnnnnnnnnnnnnnnnnnnnnnnnnnnnnnnnnnnnnnnnnnnnnnnnnnnnnnnnnnnnnnnnnnnnnnnnnnnnnnnnnnnnnnnnnnnnnnnnnnnnnnnnnnnnnnnnnnnnnnnnnnnnnnnnnnnnnnnnnnnnnnnnnnnnnnnnnnnnnnnnnnnnnnnnnnnnnnnnnnnnnnnnnnnnnnnnnnnnnnnnnnnnnnnnnnnnnnnnnnnnnnnnnnnnnnnnnnnnnnnnnnnnnnnnnnnnnnnnnnnnnnnnnnnnnnnnnnnnnnnnnnnnnnnnnnnnnnnnnnnnnnnnnnnnnnnnnnnnnnnnnnnnnnnnnnnnnnnnnnnnnnnnnnnnnnnnnnnnnnnnnnnnnnnnnnnnnnnnnnnnnnnnnnnnnnnnnnnnnnnnnnnnnnnnnnnnnnnnnnnnnnnnnnnnnnnnnnnnnnnnnnnnnnnnnnnnnnnnnnnnnnnnnnnnnnnnnnnnnnnnnnnnnnnnnnnnnnnnnnnnnnnnnnnnnnnnnnnnnnnnnnnnnnnnnnnnnnnnnnnnnnnnnnnnnnnnnnnnnnnnnnnnnnnnnnnnnnnnnnnnnnnnnnnnnnnnnnnnnnnnnnnnnnnnnnnnnnnnnnnnnnnnnnnnnnnnnnnnnnnnnnnnnnnnnnnnnnnnnnnnnnnnnnnnnnnnnnnnnnnnnnnnnnnnnnnnnnnnnnnnnnnnnnnnnnnnnnnnnnnnnnnnnnnnnnnnnnnnnnnnnnnnnnnnnnnnnnnnnnnnnnnnnnnnnnnnnnnnnnnnnnnnnnnnnnnnnnnnnnnnnnnnnnnnnnnnnnnnnnnnnnnnnnnnnnnnnnnnnnnnnnnnnnnnnnnnnnnnnnnnnnnnnnnnnnnnnnnnnnnnnnnnnnnnnnnnnnnnnnnnnnnnnnnnnnnnnnnnnnnnnnnnnnnnnnnnnnnnnnnnnnnnnnnnnnnnnnnnnnnnnnnnnnnnnnnnnnnnnnnnnnnnnnnnnnnnnnnnnnnnnnnnnnnnnnnnnnnnnnnnnnnnnnnnnnnnnnnnnnnnnnnnnnnnnnnnnnnnnnnnnnnnnnnnnnnnnnnnnnnnnnnnnnnnnnnnnnnnnnnnnnnnnnnnnnnnnnnnnnnnnnnnnnnnnnnnnnnnnnnnnnnnnnnnnnnnnnnnnnnnnnnnnnnnnnnnnnnnnnnnnnnnnnnnnnnnnnnnnnnnnnnnnnnnnnnnnnnnnnnnnnnnnnnnnnnnnnnnnnnnnnnnnnnnnnnnnnnnnnnnnnnnnnnnnnnnnnnnnnnnnnnnnnnnnnnnnnnnnnnnnnnnnnnnnnnnnnnnnnnnnnnnnnnnnnnnnnnnnnnnnnnnnnnnnnnnnnnnnnnnnnnnnnnnnnnnnnnnnnnnnnnnnnnnnnnnnnnnnnnnnnnnnnnnnnnnnnnnnnnnnnnnnnnnnnnnnnnnnnnnnnnnnnnnnnnnnnnnnnnnnnnnnnnnnnnnnnnnnnnnnnnnnnnnnnnnnnnnnnnnnnnnnnnnnnnnnnnnnnnnnnnnnnnnnnnnnnnnnnnnnnnnnnaggtggcaatcactgggcagcttggtgtgaagccccaaacaggcaacagcattccactcacagccactaacttccgcatccagggtaaggatgtactgcgtctgccaccctcttccatcaccacagatgccaagggccagacggttctgcgaatcactccggacatgatggccacgctggccaagtcccaggttaccacagtcaaattgacccaggacctcttcgggacaggaggcaacactacaggcaaaggcatctctgccaccttacacgtcacttccaatccagtccatgccgctgatagccctgccaaggccagttcagccagtgccccttcgtccactccaacaggtaccactgtggtcaaagtgactcctgacctcaagccaacagaagcctcaagttcagcttttcgtttgatgccagctcttggcgtgagtgtggctgaccagaagggaaaaagcacagtggcctcttcagaagcaaaaccagctgccacgatccgcatcgtgcagggactgggagtgatgcctcccaaagcaggccagaccatcaccgttgcaacccacgccaagcagggggcctcggtggccggtgggtctggaactgtnnnnnnnnnnnnnnnnnnnnnnnnnnnnnnnnnnnnnnnnnnnnnnnnnnnnnnnnnnnnnnnnnnnnnnnnnnnnnnnnnnnnnnnnnnnnnnnnnnnnnnnnnnnnnnnnnnnnnnnnnnnnnnnnnnnnnnnnnnnnnnnnnnnnnnnnnnnnnnnnnnnnnnnnnnnnnnnnnnnnnnnnnnnnnnnnnnnnnnnnnnnnnnnnnnnnnnnnnnnnnnnnnnnnnnnnnnnnnnnnnnnnnnnnnnnnnnnnnnnnnnnnnnnctcagtgggttgggccgcaacatcatcctcacaactatgccagcgggcactaagcttattgctggcaataagcctgttagtttcctcactgctcagcagttgcagcagcttcagcagcaaggtcaggccacacaggt

SEQ ID NO: 30657 - DNA, 906 bp, Macaca Mulatta
  misc_feature (1)...(906): n = A,T,C or G
gggcccttttccccccctctagcgccgctgggcctgcaggtctctgtcgacccgcggacgctggtctctgttccgcaggatggggtttgttaaagttgttaagaataaggcctactttaagagataccaagtgaaatttagaagacgacgagagggtaaaactgattactatgctcggaaacgcttggtgatacaggataaaaataaatacaacacacccaaatacaggatgatagttcgtgtaacaaacagagatatcatttgtcagattgcttatgcccgtatagagggggatatgatagtctgcgcagcatatgcacacgaactgccaaaatacggtgtgaaggttggcctgacaaactatgctgcagcatattgtactggcctgctgctggcccgcaagctttctcataggtttggcatggacaagatcctatgaaagccaagtggaaggtaactgggtgatgaaataccaatgtgggaaaagcattttgatgggtccaggcccagggtggcccttttaccctgtgcctaattttggggaatgaccatgggccccttggtcccacataaaactttaaccccccttgggtnnnnnnnnnnnnnnnnnnnnnnnnnnnnnnnngccgccccctttgagaaaagggaaatccttgttgtgatatggggaagggcctttggattcctatttccccctccacatagggatactcctcaaaacgaatttcccccccgggttttattgtaaatttcttggaaaagccccagggaaaaattttattttggtaccgaaagtttactactcgggaaaagccacaaattccttggggggcccacacaatagtttagccaagaaattaaacatgtgcgcttcaacatttaaatgtgcaccccaaatattgtaag

SEQ ID NO: 30658 - DNA, 825 bp, Macaca Mulatta
  misc_feature (1)...(825): n = A,T,C or G
ggggctttgctttttcaaaccagagaaaggaaagccagaaggaaaagagtaatggtattttctagactgtgaagattcagttcaaatgttatccttgttcctgttacaatatttagcattattagtttgttatgtatgtatgttcatgttaattttaattttgattataagacaatgctgctttggttaatctcagctaaatgaatttagagagattgacttttatagcttgcttgttcctggtactcttttgaagtgcacaaagataagttatagagctttctccttgtctgcaaaaagggtaattttccaggtggcatttgttagctggtacacaaggactttgccatgaatttgctagtagcaaggaattatttcttccagcttccttgaaatgaataattagtaaacttctaagcaaagtcaatgagtaggagtttcacatttttgtgaggtcctaactaattctcttacccgatgcctctgagaggtagtnnnnnnnnnnnnnnnnnnnnnnnnnnnnnnnnnnnnnnnnnnnnnnnnnnnnnnnnnnnnnnnnnnnnnnnnnnnnnnnnnnnnnnnnnnnnnnnnnnnnnnnnnnnnnnnnnnnnnnnnnnnnnnnnnnnnnnnnnnnnnnnnnnnnnnnnnnnnnnnnnnnnnnnnnnnnnnnnnnnnnnnnnnnnnnnnnnnnnnnnnnnnnnnnnnnnnnnnnnnnnnnnnnnnnnnnnnnnnnnnnnnnnnnnnnnnnnnnnnnnnnnnnnnnnnnnnnnnnnnnnnnnnnnnnnnnnnnnnnnnnnnnnnnnnnnnnnnnnnnnnnnctnnnnn

SEQ ID NO: 30659 - DNA, 409 bp, Macaca Mulatta
  misc_feature (1)...(409): n = A,T,C or G
ntaggtaactatgtccagctcttggcgaaaattgataatgaattggtggtcagggcttacacgcctgtctctagtgatgatgacagaggctttgtggacttaattataaannnnnnnnnnnnnnnnnnnnnnnnnnnnnnnnnnnnnnnnnnnnnnnnnnnnnnnnnnnnnnnnnnnnnnnnnnnnnnnnnnnnnnnnnnnnnnnnnnnnnnnnnnnnnnnnnnnnnnnnnnnnnnnnnnnnnnnnnnnnnnnnnnnnnnnnnnnnnnnnnnnnnnnnnnnnnnnnnnnnnnnnnnnnnnnnnnnnnnnnnnnnnnnnnnncaggcatcacacccatgttgcagctcattcgccacatcaccaaggaccccagtgacagcaccaggatgtccctcatctttgccaacca

SEQ ID NO: 30660 - DNA, 115 bp, Macaca Mulatta
agctgctgcacagcggggagatgcctttctcctgtgagtgcggcaagggctttgtgaaacactcgaagctcatcgagcacatcaggacgcacacgggagagaagccttttcagtg

SEQ ID NO: 30661 - DNA, 610 bp, Macaca Mulatta
  misc_feature (1)...(610): n = A,T,C or G
atggccgggctcggccaccccgcagccttcggccgagccacccacgccgtggtgcgggcgctgccggagtcgctcggccagcacgcgctgagaagcgccaagggcgaggaggtggacgtcgcccgcgcggaacggcagcaccagctctacgtgggcgtgctgggcagcaagctggggctgcaggtggtggagctgccggccgacgagagccttccggactgcgtgttcgtggaggacgtggccgtggtgtgcgaggagactgccctcatcacccgacctggggcgccgagccggaggaaggaggnnnggttgacatgatgaaagaagcattagaaaaacttcagctcaatatagtagagatgaaagatgaaaatgcaactttagatggcggagatgttttattcacaggnaggcagagaattttttgtgggcctttccaaaaggacaaatcaacgaggtgctgaaatcttggctgatacttttaaggnaggactatgcagtctccacagtgccggtggcagatggcttgcatttgaagagtttctgcagcatggctgggcctaacctgatcgcaattgggtctagtgaatctgcacagaaggcccttaag

SEQ ID NO: 30662 - DNA, 670 bp, Macaca Mulatta
gggaacgaatataccatctatgtcagtagccctgaagaataatcagaagagcgagcccctgattggaaggaaaaagacagttcaaaagacccctttcatcacccaccctgggtatgacactggaaatggtattcagcttcctggcacttctggtcagcaacccactgttgggcaacaaatgatctttgaggaacatggttttaggcggaccacacctcccacaacagccacccccataaggcataggccaagaccatacccgccgaatgtaggacaagaagctctctctcagacaaccatctcatgggccccattccaggacacttctgagtacatcatttcatgtcatcctgttggcactgacgaagagcccttacagttcagggttcctggaacttctaccagtgccactctgacaggcctcaccagaggtgccacctacaacatcatagtggaggcactgaaagaccagcagaggcataaggttcgggaagaggttgttaccgtgggcaactctgtcaatgaaggcttgaaccaacctacggatgactcatgctttgacccctacacggtttcccattacgccgttggagatgagtgggaacgaatgtctgaatcaggctttaaactgttgtgccactgcttaggcttaggaagtggtcatttcaga

SEQ ID NO: 30663 - DNA, 1622 bp, Macaca Mulatta
  misc_feature (1)...(1622): n = A,T,C or G
tgcccaagggtgccaacagcttcagggtctcccgtagatccggggtggagatcttcatggtctacaaccgcacacacgtgacagagcccataggcaaggcccgttcgccactggacactgatgcagacatggtcgtatctgtgggcacagccagtaaggaattaagggacttcaaggtnnnnnnnnnnnnnnnnnnnnnnnnnnnnnnnnnnnnnnnnnnnnnnnnnnnnnnnnnnnnnnnnnnnnnngatatttcccttgaggtcgacacaggccgcacaggcaaggtgaagagaagccagggggacaannnnnnnnnnnnnnnnnnnnnnnnnnnnnnnnnnnnnnnnnnnnnnnnnnnnnnnnnnnnnnnnnnnnnnnnnnnnnnnnnnnnnnnnnnnnnnnnnnnnnnnnnnnnnnnnnnnnnnnnnnnnnnnnnnnnnnnnnnnnnnnnnnnnnnnnnnnnnnnnnnnnnnnnnnnnnnnnnnnnnnnnnnnnnnnnnnnnnnnnnnnnnnnnnnnnnnnnnnnnnnnnnnnnnnnnnnnnnnnnnnnggtgggaattctctctcggactacaagcaggtgctggggccccagcgtctgtcctacgaagttgagcggcagtcgggggagcaggagatcaggttctatgtggaggggctgaccttccccgatgccgatttcctggggctggtttccctcagtgtcagcctggtggacacgggnnnnnnnnnnnnnnnnnnnnnnnnnnnnnnnnnnnnnnnnnnnnnnnnnnnnnnnnnnnnnnnnnnnnnnnnnnnnnnnnnnnnnnnnnnnnnnnnnnnnnnnnnnnnnnnnnnnnnnnnnnnnnnnnnnnnnnnnnnnnnnnnnnnnnnnnnnnnnnnnnnnnnnnnnnnnnnnnnnnnnnnnnnnnnnnnnnnnnnnnnnnnnnnnnnnnnnnnnnnnnnnnnnnnnnnnnnnnnnnnnnnnnnnnnnnnnnnnnnnnnnnnnnnnnnnnnnnnnnnnnnnnnnnnnnnnnnnnnnnnnnnnnnnnnnnnnnnnnnnnnnnnnnnnnnnnnnnnnnnnnnnnnnnnnnnnnnnnnnnnnnnnnnnnnnnnnnnnnnnnnnnnnnnnnnnnnnnnnnnnnnnnnnnnnnnnnnnnnnnnnnnnnnnnnnnnnnnnnnnnnnnnnnnnnnnnnnnnnnnnnnnnnnnnnnnnnnnnnnnnnnnnnnnnnnnnnnnnnnnnnnnnnnnnnnnnnnnnnnnnnnnnnnnnnnnnnnnnnnnnnnnnnnnnnnnnnnnnnnnnnnnnnnnnnnnnnnnnnnnnnnnnnnnnnnnnnnnnnnnnnnnnnnnnnnnnnnnnnnnnnnnnnnnnnnnagggcttccggctgctcctggctagccctagcgcctgcctcaaactcttccaagagaagaaagaagagggctatggcgaggcagcccagtttgatgnnnnnnnnnnnnnnnnnnnnnnnnnnnnnnnnnnnnnnnnnnnnnnnnnnnnnnnnnnnnnnnnnnnnnnnnnnnncagaaatgcattgactggaaccgtaatgtactgaagcgggaactgggcctaacagagagtgacatcgtggatattcctcagctcttcctcctg

SEQ ID NO: 30664 - DNA, 871 bp, Macaca Mulatta
ggattctgttcagatctgcttggtctttactctgtagacaataaggttgaaagcaggtgggatgattacgtaaaggttggcaaacatcatatgaaaggtatgagggacattatgcccaaagcgatgagcaaggatggagaagaatgctggtatatagaatacgaggataacacagacatgggaaccacaggtgccaaaggccttctgccgggcatctcgggaggggagacaaaagacagcatagaggatgagggtgtaggagacagcaatgaggatcacatccgtcatcactgtcatgataggaatacaaaatccataccagatattgatggagatatcaacacaggcaagctgggcaacacctatgtgctcacactatgtgtgagaaatgatatgtgtcctgcagaagggtaaatgattcacaaggaaaacacatgggacaaaaacacagagactttggaaacatattctcacagcaattttgataatggttttgggagtcagaatagtagtgtatctcaagggtgagcagatggccatatagcagtcaaatgccatggccagcagtataactgagtccaacacaaagctatagtgcagaaagaataattgggtgagacagccagggaaaactgatttttgggaaccaaaccagaagatgctaaatgttttggggacacatacggtggacaatatgaggtcagtaatggccagcatggaaaggaaaaagaacatgggtgcatgaagactgtgctccaccacaatgaggtagagaaggatactgctggccacgacagtcacgagatagataaagcagaacgggatgctggtccagaagtggtactgctcaagtccggggatgcccaaaagg

SEQ ID NO: 30665 - DNA, 437 bp, Macaca Mulatta
atatttgtgcaacgctctggaaattacttggttacaatgtttgatgattattctgctacactgcctctgctaattgtagtcattttggagaatattgctgtatgctttgtttatggcatagataagtaagtatatttgcttttatgtattcacttttatctctcttttgaaaacatcaattatcaacattcatttcattaagaagaggaaagaaatgaatagaagaaacaattcttttaaaaaatcaatttttttgcaggcttttattgattcaacagttttggtaaagtacatttacctattgggcaaatagaattatataggatgtaatagtgtgtagaattttagagctttgatttagtcctggttatcaaaaagtaactttcaggatctagtaagtattggcagtgttccaagaaccttaggttcttttgagt

SEQ ID NO: 30666 - DNA, 366 bp, Macaca Mulatta
ccaggtggtcgtggcaggccgtagcattttcaagatctatgccatcgaggaggaacagttcgtggagaagctgaacctgcgtgtggggcgtaagccttcacttaatctgagctgcgctgatgtggtgtggcaccagatggatgagaacctgctggccacagcagccaccaatggtgtggtggtcacgtggaacctgggccggccgtcccgcaacaagcaggaccagctgttcacagaacacaagcgcacggtgaacaaagtgtgcttccaccccactgaagcccacgtgctgctcagtggctcccaggatggcttcatgaagtgctttgacctccgcagaaaggactctgtcagcaccttctcggg

SEQ ID NO: 30667 - DNA, 815 bp, Macaca Mulatta
tattcgccggtttatataatgaggggtctattctttatttagagacaagcatttatctggatcccacatggaagtgggacttccacgggatgggaacttgtggggccaggatgaatatctccatggattttccaggcaattaattagacgcggggaaaattggttttaggatctggtggagggtataatagcaatgcagtccaattcccaataggatccatttactgggggctcgcaaaaaaattgttactttgccaaatgggaggttttaggcaaaggccgggcattccacatagtcaggttaagaggcacctgactggaccatcaaatgctgttccaacgtagaattcattggccagttacctccaacaggccttcaatagatattgtccatgccaaacatatagagaatcgtgcgggccagcagcaggccagtacaatatgctgcaagaatagtttgtcaggccaaccttcacaccgtattttggcagttcgtgtgcatatgctgcgcagactatcatatccccctctaaacgggcataagcaatctgacaaatgatatctctgtttgatacacgaactatcatcctgtatttgggtgagttgtatttatttttatcctgtatcaccaagcgtttcagagcatagtaatcagttttaccctctcgtcgtcttttaaatttcacttggtatctcttaaagtaggccttattcttaacaactttaacaaaccccatcctgcggaacagacaccagcgtccgcgggtcgacagagacctgcaggcccagcggcgctagagggggggaaaaggccc

SEQ ID NO: 30668 - DNA, 5878 bp, Macaca Mulatta
  misc_feature (1)...(5878): n = A,T,C or G
cgcagcggcctggcctcgggccccatctcccttcaaactatcggcagaggatgcaccagtttctctatgaggaggagacagctcagcagcagctggtggccngccaggctgaccctgcggggcccggtgttcctgaatactgcattgcagacgccagcgctgaacatgctcttcgcgcctccgggagcactgtacgcagaggtccccgtccccccgtccctgatgccagacacagaccaaggcttcctgctgggccgggcnnnnnnnnnnnnnnnnnnnnnnnnnnnnnnnnnnnnnnnnnnnnnnnnnnnnnnnnnnnnnnnnnnnnnnnnnnnnnnnnnnnnnnnnnnnnnnnnnnnnnnnnnnnnnnnnnnnnnnnnnnnnnnnnnnnnnnnnnnnnnnnnnnnnnnnnnnnnnnnnnnnnnnnnnnnnnnnnnnnnnnnnnnnnnnnnnnnnnnnnnnnnnnnnnnnnnnnnnnnnnnnnnnnnnnnnnnnnnnnnnnnnnnnnnnnnnnnnnnnnnnnnnnnnnnnnnnnnnnnnnnnnnnnnnnnnnnnnnnnnnnnnnnnnnnnnnnnnnnnnnnnnnnnnnnnnnnnnnnnnnnnnnnnnnnnnnnnnnnnnnnnnnnnnnnnnnnnnnnnnnnnnnnnnnnnnnnnnnnnnnnnnnnnnnnnnnnnnnnnnnnnnnnnnnnnnnnnnnnnnnnnnnnnnnnnnnnnnnnnnnnnnnnnnnnnnnnnnnnnnnnnnnnnnnnnnngccgacatctacatccgggagtatttccacagccacgtcagcggcggccaccccgaggccactcctctccgtgtgatgtacgcggaccggccaccgagccacacggacccggtcacgctgcaatactgttgcctgaccgacgaccaccaggctttccgcccgcccacgtgggcagagctggcacggcaccgggtggtggtcaccaccacctcccaggcccgcgagctcagggtgccggtcggcttcttctcccacattatcatcgacgaggcggcccagatgctggagtgtgaggccctcaccccgctggcatacgcctcgcgcggcacccgcctcgtgctggcaggcgaccacatgcaggtcacgccccggctcttcagtgttgccagggcccgggcggccgagcacacgctgctgcaccgcctcttcctgtactaccagcaggagacgcacgaggtggcacggcagagccgcctggtcatccatgagaactaccgctgcacggaggccatcgtcagcttcgtctcccggcacttctacgtggccannnnnnnnnnnnnnnnnnnnnnnnnnnnnnnnnnnnnnnnnnnnnnnnnnnnnnnnnnnnnnnnnnnnnnnnnnnnnnnnnnnnnnnnnnnnnnnnnnnnnnnnnnnnnnnnnnnnnnnnnnnnnnnnnnnnnnnnnnnnnnnnnnnnnnnnnnnnnnnnnnnnnnnnnnnnnnnnnnnnnnnnnnnnnnnnnnnnnnnnnnnnnnnnnnnnnnnnnnnnnnnnnnnnnnnnnnnnnnnnnnnnnnnnnnnnnnnnnnnnnnnnnnnnnnnnnnnnnnnnnnnnnnnnnnnnnnnnnnnnnnnnnnnnnnnnnnnnnnnnnnnnnnnnnnnnnnnnnnnnnnnnnnnnnnnnnnnnnnnnnnnnnnnnnnnnnnnnnnnnnnnnnnnnnnnnnnnnnnnnnnnnnnnnnnnnnnnnnnnnnnnnnnnnnnnnnnnnnnnnnnnnnnnnnnnnnnnnnnnnnnnnnnnnnnnnnnnnnnnnnnnnnnnnnnnnnnnnnnnnnnnnnnnnnnnnnnnnnnnnnnnnnnnnnnnnnnnnnnnnnnnnnnnnnnnnnnnnnnnnnnnnnnnnnnnnnnnnnnnnnnnnnnnnnnnnnnnnnnnnnnnnnnnnnnnnnnnnnnnnnnnnnnnnnnnnnnnnnnnnnnnnnnnnnnnnnnnnnnnnnnnnnnnnnnnnnnnnnnnnnnnnnnnnnnnnnnnnnnnnnnnnnnnnnnnnnnnnnnnnnnnnnnnnnnnnnnnnnnnnnnnnnnnnnnnnnnnnnnnnnnnnnnnnnnnnnnnnnnnnnnnnnnnnnnnnnnnnnnnnnnnnnnnnnnnnnnnnnnnnnnnnnnnnnnnnnnnnnnnnnnnnnnnnnnnnnnnnnnnnnnnnnnnnnnnnnnnnnnnnnnnnnnnnnnnnnnnnnnnnnnnnnnnnnnnnnnnnnnnnnnnnnnnnnnnnnnnnnnnnnnnnnnnnnnnnnnnnnnnnnnnnnnnnnnnnnnnnnnnnnnnnnnnnnnnnnnnnnnnnnnnnnnnnnnnnnnnnnnnnnnnnnnnnnnnnnnnnnnnnnnnnnnnnnnnnnnnnnnnnnnnnnnnnnnnnnnnnnnnnnnnnnnnnnnnnnnnnnnnnnnnnnnnnnnnnnnnnnnnnnnnnnnnnnnnnnnnnnnnnnnnnnnnnnnnnnnnnnnnnnnnnnnnnnnnnnnnnnnnnnnnnnnnnnnnnnnnnnnnnnnnnnnnnnnnnnnnnnnnnnnnnnnnnnnnnnnnnnnnnnnnnnnnnnnnnnnnnnnnnnnnnnnnnnnnnnnnnnnnnnnnnnnnnnnnnnnnnnnnnnnnnnnnnnnnnnnnnnnnnnnnnnnnnnnnnnnnnnnnnnnnnnnnnnnnnnnnnnnnnnnnnnnnnnnnnnnnnnnnnnnnnnnnnnnnnnnnnnnnnnnnnnnnnnnnnnnnnnnnnnnnnnnnnnnnnnnnnnnnnnnnnnnnnnnnnnnnnnnnnnnnnnnnnnnnnnnnnnnnnnnnnnnnnnnnnnnnnnnnnnnnnnnnnnnnnnnnnnnnnnnnnnnnnnnnnnnnnnnnnnnnnnnnnnnnnnnnnnnnnnnnnnnnnnnnnnnnnnnnnnnnnnnnnnnnnnnnnnnnnnnnnnnnnnnnnnnnnnnnnnnnnnnnnnnnnnnnnnnnnnnnnnnnnnnnnnnnnnnnnnnnnnnnnnnnnnnnnnnnnnnnnnnnnnnnnnnnnnnnnnnnnnnnnnnnnnnnnnnnnnnnnnnnnnnnnnnnnnnnnnnnnnnnnnnnnnnnnnnnnnnnnnnnnnnnnnnnnnnnnnnnnnnnnnnnnnnnnnnnnnnnnnnnnnnnnnnnnnnnnnnnnnnnnnnnnnnnnnnnnnnnnnnnnnnnnnnnnnnnnnnnnnnnnnnnnnnnnnnnnnnnnnnnnnnnnnnnnnnnnnnnnnnnnnnnnnnnnnnnnnnnnnnnnnnnnnnnnnnnnnnnnnnnnnnnnnnnnnnnnnnnnnnnnnnnnnnnnnnnnnnnnnnnnnnnnnnnnnnnnnnnnnnnnnnnnnnnnnnnnnnnnnnnnnnnnnnnnnnnnnnnnnnnnnnnnnnnnnnnnnnnnnnnnnnnnnnnnnnnnnnnnnnnnnnnnnnnnnnnnnnnnnnnnnnnnnnnnnnnnnnnnnnnnnnnnnnnnnnnnnnnnnnnnnnnnnnnnnnnnnnnnnnnnnnnnnnnnnnnnnnnnnnnnnnnnnnnnnnnnnnnnnnnnnnnnnnnnnnnnnnnnnnnnnnnnnnnnnnnnnnnnnnnnnnnnnnnnnnnnnnnnnnnnnnnnnnnnnnnnnnnnnnnnnnnnnnnnnnnnnnnnnnnnnnnnnnnnnnnnnnnnnnnnnnnnnnnnnnnnnnnnnnnnnnnnnnnnnnnnnnnnnnnnnnnnnnnnnnnnnnnnnnnnnnnnnnnnnnnnnnnnnnnnnnnnnnnnnnnnnnnnnnnnnnnnnnnnnnnnnnnnnnnnnnnnnnnnnnnnnnnnnnnnnnnnnnnnnnnnnnnnnnnnnnnnnnnnnnnnnnnnnnnnnnnnnnnnnnnnnnnnnnnnnnnnnnnnnnnnnnnnnnnnnnnnnnnnnnnnnnnnnnnnnnnnnnnnnnnnnnnnnnnnnnnnnnnnnnnnnnnnnnnnnnnnnnnnnnnnnnnnnnnnnnnnnnnnnnnnnnnnnnnnnnnnnnnnnnnnnnnnnnnnnnnnnnnnnnnnnnnnnnnnnnnnnnnnnnnnnnnnnnnnnnnnnnnnnnnnnnnnnnnnnnnnnnnnnnnnnnnnnnnnnnnnnnnnnnnnnnnnnnnnnnnnnnnnnnnnnnnnnnnnnnnnnnnnnnnnnnnnnnnnnnnnnnnnnnnngccgtgcagctcaaggcccagcctctggacaagctgggcttcgtggtggatgtggaggcaggctcccgctgcttccggctgcaattccccagcaaccgggagacgctgcccgacccctgccccgtcccctacagctccctgcagctggccgagcacccccgcgccctggcaggccggccgggcatgcagctcctgtggcggcgccgtgtctactcagtgcagggatccggcccgcccttgccactgcctggcactgtgctggacccacacacctgggccgtgtatattgctctgtggaagcagctgctggtgctggtggagctgcagcgctggccggaggcggctgctctcatccaggagaagggtgaggcgtccccacagcgggggctggtgcaggtgcagcggagccgctgtggccatttcctggaggtggcccgggagctgggcagtggggacaccctgcaggtgcagctcggcgccagcctgcagcacggcttcctggtaccgaaccctcagctctggactgtggcacccggcttcagcctctgcctggagcacgtggagcggcctggagactgcttcctgggccacgtgtaccaggccccgcgggaccgctatcgcgacgtggatgagtacgcctgtgtgtgggagccattctgcgctctggagtcggccactggtgcagttgccgagaatgacgctgtcacacttcagcacctgagtgtttcctgggatgtgtcacggatgccgcaggggcagctgcagggcgccttccgcctggaggccgccttcctcgaggagaactgtgtcgacatcaacctcagttgctgctacctctgcatccggctcgaggggctgccggctcccacggccagcccacgccccgggcccagcagccttggccctggcctgagtgtcgaccccggcacatacacctgggtggcgcatgggcagacggaggactgggaccaggagcgccgggcagaccggcaggaggctcccagacaggtgcacctcttcatccaccacatgggcatggaaaaagttccagaagaggtgctgaggccgggcaccctggtcaccgttgagctgctgcccaagcagcttcctgatctnnnnnnnnnnnnnnnnnnnnnnnnnnnnnnnnnnnnnnnnnnnnnnnnnnnnnnnnnnnnnnnnnnnnnnnnnnnnnnnnnnnnnnnnnnnnnnnnnnnnnnnnnnnnnnnnnnnnnnnnnnnnnnnnnnnnnnnnnnnnnnnnnnnnnnnnnnnnnnnnnnnnnnnnnnnnnnnnnnnnnnnnnnnnnnnnnnnnnnnnnnnnnnnnnnnnnnnnnnnnnnnncagggaagacgattgtgggcctccacatcatattctggtttcataaatcaaaccaggagcaggtgcagcccggaggctccccccatggggagacgcagctggggggtccctgcatcttgtactgcggcccctccaacaagtcggtggatgtcctggcagnnnnnnnnnnnnnnnnnnnnnnnnnnnnnnnnnnnnnnnnnnnnnnnnnnnnnnnnnnnnnnnnnnnnnnnnnnnnnnnnnnnnnnnnnnnnnnnnnnnnnnnnnnnnnnnnnnnnnnnnnnnnnnnnnnnnnnnnnnnnnncaggagcatcaccctgcaccatcggatccggcaggcccccaacccgtactcgtcggaaatcaaggcctttgacacccggctgcagagcggggagcctttctccagggaggacctggtc

SEQ ID NO: 30669 - DNA, 817 bp, Macaca Mulatta
  misc_feature (1)...(817): n = A,T,C or G
ggggaacaaagatcaaacacacccattggtgactacccatctagggcgaaaatttctggccaaaacagcagtgttcggggaagagggattacccgcttactagagagcatctccaattcctccagcaatatccacaaattctccaactgtgacacttcactctcatcttacatgtcccaaaaagatggttacaaatctttctcttccttatcttaatgatggtactcttttcaatttctgaaaacaataacaggcccaagttccttcttactacagtcatattaaacagatcacatcaatgataaatgtcactactataaaaactacttaatttgtaaggaaattgtttcatagatttaaaaaaattgtggttggagagcatcttggcatttgtactttttttcttgagggattgttctgcttcctggctgtatgatgggtatatcattaaagttttgagtcctatacaaacaaaactgacatttttagagttgtacttttgggaatgttatagattgataattatttcccctgataataaaggtattgaatgtctgttatgaaaaaaaacaaccccccaaaacccccaaccaacccaaacaacggagcaacaaaaacangnnnaaaatttgtgggcccccctccgcccctaaaagaaaatttctttgaacctttccctttggggccccccgggcccaatttgggaaaaacaaaacttgttccaaaaccggttccccaaaagaaaaaaaccggggacacgggaccaaaggccttgggttcccccccaccaattnnnnnnnnnnnnnnnnnnnnccct

SEQ ID NO: 30670 - DNA, 1001 bp, Macaca Mulatta
caagtgtggcccgccggggcaccagtccgtggtttccgtttggcgccggctgcagatggttgggaaaggacccgtgctttcccgtcggccgacgcgggctcacgagttgcctgtggcgttctcgttgctggtcgatctggaggaggaggaggacgacgaggaggagaagctcaccccagtgaggcccggggggttcgtgtccgtgttctgtcccgtgaggctttttcggcagacggggcagctgtcgtgctgctccagccagggcacgatgcagccgtcgtggaacaggtggttgcagggcagctgccgcacacgctcacccagcgcgtagtcgtccttgcacacagggcactcgagcccggagcctacgtgctcctcggtgacggggacggtggggagggcctggattttctctttatctgccggtggggggcccgtgttttcaaactgattgaggagctgtgtgatgatggcgtccaggccgttgtccccccaggcgtagtccatagggtttgagtgcaggactccccagggacccaggctggggatggtggcaggcgtgatgatgccattgacaagctgctggatgatcccttccagcgtggggacgccttcgtgccggccggtggcccgccgcgtggtgaggcgggcgcggggctgccgggcgccataccggtgccgggacggatggtctctctcccgccggctctcagggtccctgccttcatcagcctgagccccaggagggaacgtagggatctcgaagctgtcatcgaagatgccgaaagcaaactgtccgtagccctccagtggtggccggctctggtccgtgggggctgtggagggggcagaaccattttctgtgctcctggtctcttccggaagctcctcaatgaaaccagactcgcatcttggacagatataatccggcaggcgcgggacgatctccacggagcagcagtggcagaagtaccgtccgggctgcggcgacgcctcggcca

SEQ ID NO: 30671 - DNA, 938 bp, Macaca Mulatta
  misc_feature (1)...(938): n = A,T,C or G
ttcaggcgcacaccaccacnnnnnnnnnnnnnnnnnnnnnnnnnnnnncagagtttcaccatanngggnnnnnnnnnnnnnnnnnnnnnnnnnnnnnnnnnnngcctactnnnnnnnnnnnnnnnnnnnnnnnnnnncgcgtgagccaccatgcccggcctccatctttaaacttttaaatgtgaaattctattatgtaccattagcctaacaagattttctttcctatttctgactggtgcctttcccctttttaggagcaatgaaagctactctgttagttatgttcttctgatgtgataaaatgtcaagaagataggagaagagaatattttatgttgttgatgcttttgttcccaagtgtgaccctaaacttaagctttgtaggagatgacattctttcatgtcccttccctttactcatgcctatcaactgggacattttgtgcttttggtttaaaagttaattgatattataccttggttttatccaaaaagtaaaagtatttgcctttgacaaaagactgacacaagagcaaataagctttaaaatcaggggtgttatgtgctttcctccatttttgagcatattatccaaaatggtctgtataaatgagaatgatgcagtttaagtaagccttgtataccattgtcatggagccctgtcataaagccatttttcggtttcttttggtgaagaggcatatggggatttatacagattcacttttaaatgtttggaattggggatttttttgtgtaaatttttcctcaaataaagggcctagcaaaaacccttttataaatattcgaacattagaaagaaaagacatataaaaatattgtaggataatccgatgaatggcatttataataaacaacaacattatataattatttttttaacacagaaaaatgaaatactcaaacagaaaaag

SEQ ID NO: 30672 - DNA, 578 bp, Macaca Mulatta
tatgtatgtatattccatatacatatatattcactagtaataacagattgttaagtatcttatatttgacagccttgtacagttagccaaatgacaaaaccttaagtcttcaatgaaattttctgatttaataggctgaattaagaaagccataattttcttctataagcctttaacttctatctttacaagtttatatagaaaaattgactgtggggcttgagatttactaatgcatgggttttcaaccttagatgcacattggaatcatttaggatgcttgaaaatctctacagccaaaccacatcccagatcaattacactggaaatatctagggatgggacccaggtgtcgtaaatctcccccagtgattgcaatgtgcagccacggttaagaaacactgaagcctgctttgagaaatttagcaatccgactgaaatctgcagagagcgcaacaatgatttttgcagaaacaaccaaatcctactagttacataaattttatattttgttgggacttgggtttttatttagctctacatatgcgttcatgggatgtagaagaaatatcttctac

SEQ ID NO: 30673 - DNA, 475 bp, Macaca Mulatta
tctgcttcagggacacttgggttgtgtccccaggagccctgcggctgcccgcagatgaactgagtgcccgacagctgagaccggcgcccacccgccctgagcataactaggcagtgcgggcgtggcctgcatagtgtcctggtgttgggagtgccccgtggacagagccagagggcagtggtgctccctgtcagagctggatcaggtcccccatccaggcgggagggcagagaaaggcccgagagcctccccagggcctggcctcttcatggaaaggtcccagtaccacccatagggggtctcagctctggcatggctgccctggatgtggccaaggagggggcttcaccctgtgtccctaggagagggtggcctggaggcagagctgtgccacactgacccccggaggctgcatcctccccatggaatggggtgttaaactgcccccacttggcccacagcaggccagaccccc

SEQ ID NO: 30674 - DNA, 364 bp, Macaca Mulatta
  misc_feature (1)...(364): n = A,T,C or G
caccagctggagaccgacaagttcgagtttggggagaagttgaaacgccagaaatatgnnnnnnnnnnnnnnnnnnnnnnnnnnnnnnnnnnnnnnnnnnnnnnnnnnnnnnnnnnnnnnnnnnnnnnnnnnnnnnnnnnnnnnnnnnnnnnnnnnnnnnnnnnnnnnnnnnnnnnnnnnnnnnnnnnnnnnnnnnnnnnnnaccagggccgcctgtgggactccacctctctccggcccccacagtcctgtcaggggctccctgacaatcctgggggtgaagaggccatcccagggcatcccccgcatctctgtccttgctgcctctatcccctggggcctgtgaataaagccgcagaccccc

SEQ ID NO: 30675 - DNA, 106 bp, Macaca Mulatta
atacctgtcagcacttttcacatgctgattgttactgatcaaaaacagattgatactgatgaatgattaataaatataggttctgttttacttttaaacatccaat

SEQ ID NO: 30676 - DNA, 267 bp, Macaca Mulatta
ctcccccttccccctagcttcttgagcccctctaggactgtggtggtgtggggaggtatagcttcagatgttatcccactgcaggagatggggactaggaggaaggagttggtggtgagagaggcttcctcttttgaggctcagccaatctttacaggcagccccatctttcctggaagtggctggtgggtcagcaccacggacagagacatcctgccctcaacacacacgcttctggaaggcacccttgcccaagacttcaaagct

SEQ ID NO: 30677 - DNA, 107 bp, Macaca Mulatta
gatctacccagaccccgagctggaagtacaagtattgggcctgcctatccgctgcatccacagtgaggagggctgccgctggaatgggccactacgccatctacagg

SEQ ID NO: 30678 - DNA, 531 bp, Macaca Mulatta
gaaggaaaaccttcaagacctatggaggtcagtagcagccagctcatcacatagaggtgcaggtgaggtgtattttcatcatggtaaaaattctggctgcttcatctccatctctagagcctacattggagcttttcaataaaagctatggcctcaaccaccagcaccaagaagatgatggaggaagccacctgctccatctgcctgagcctgatgacgaacccagtaagcatcaactgtggacacagctactgccacttgtgtataacggacttctttaaaaacccaagccaaaagcgactgaggcaggagacgttctgctgtccccagtgtcgggctccatttcacatgcatagcctccgaccgaacaagcagctgggaagcctcattgaagccctcaaagagatggatcaagagatgtcatgtgaggaacacggagagcagctccacctgttctgcgaagacgaggggaagctcatctgctggcgctgtgagcgggcaccacagcacaaagggcacaccacagctctt

SEQ ID NO: 30679 - DNA, 1700 bp, Macaca Mulatta
  misc_feature (1)...(1700): n = A,T,C or G
caggtgggcccgcacgggcactcatcagtagaagatgccatgacagccatggagctctaccggctggtggaggtgcagtgggaacagcaggaggcccgcagcctctggacctgccctgaggacagagaacctgacagcagcacagacatggaacagtacatggaggaccagtactggcccgaagaccttgcccacggcagcagaggaggagccagggaggcacaggacagaaggaattgagaagggggcggggatccctgactgggcttctgagtggccagtaggaagtgggggccaggagagcagcgggcactccttcctgggcagggcagggcaggatgcagcgaaccagccccagggccagaggagttggggtcatctgttatcttgacaccctctgctcacagcatagggctctgtctctccagggctgttggttctttctcctgactcctgtgattttgctaatggcactttacagactccatggagatgtcaggtggaccatcttctagggcccagcaggagtagagaatgtgtccacagactgaccaggttgtcgtggccttccccacccctcagatctcctgagtcgtcatgctgtgctaatgaaaggaatcatatcaccctctctggggttggtgggtgggggtgtcaatatcctggagctcccttaccccaacnnnnnnnnnnnnnnnnnnnnnnnnnnnnnnnnnnnnnnnnnnnnnnnnnnnnnnnnnnnnnnnnnnnnnnnnnnnnnnnnnnnnnnnnnnnnnnnnnnnnnnnnnnnnnnnnnnnnnnnnnnnnnnnnnnnnnnnnnnnnnnnnnnnnnnnnnnnnnnnnnnnnnnnnnnnnnnnnnnnnnnnnnnnnnnnnnnnnnnnnnnnnnnnnnnnnnnnnnnnnnnnnnnnnnnnnnnnnnnnnnnnnnnnnnnnnnnnnnnnnnnnnnnnnnnnnnnnnnnnnnnnnnnnnnnnnnnnnnnnnnnnnnnnnnnnnnnnnnnnnnnnnnnnnnnnnnnnnnnnnnnnnnnnnnnnnnnnnnnnnnnnnnnnnnnnnnnnnnnnnnnnnnnnnnnnnnnnnnnnnnnnnnnnnnnnnnnnnnnnnnnnnnnnnnnnnnnnnnnnnnnnnnnnnnnnnnnnnnnnnnnnnnnnnnnnnnnnnnnnnnnnnnnnnnnnnnnnnnnnnnnnnnnnnnnnnnnnnnnnnnnnnnnnnnnnnnnnnnnnnnnnnnnnnnnnnnnnnnnnnnnnnnnnnnnnnnnnnnnnnnnnnnnnnnnnnnnnnnnnnnnnnnnnnnnnnnnnnnnnnnnnnnnnnnnnnnnnnnnnnnnnnnnnnnnnnnnnnnnnnntgacagtttagaaatactgggtaaccaagaactcaggtcacacagaccttggagccccatctttgctggccacttagctttgagatattaggcaagcgagggaattcactcttgagcctgttgtttcatcatctgtaagatggggatagtggtacggcctacctcatagggttgtaatgaaaaataaatgtgaagtgtttggcacagtgcctggcatgtggtgagccacagccactgtgagtttctgttnnnnnnnnnnnnnnnnnnnnnnnnnnttgtttattctttgaggatttgttgcaacttcttcaggataacgcctgagtccacaggctgagtagctgtggcccagacag

SEQ ID NO: 30680 - DNA, 941 bp, Macaca Mulatta
  misc_feature (1)...(941): n = A,T,C or G
cgaggccgcggcgccccgggacgaggcgacggccggggggagttgtaaggaggagcagcgnncgtccagcagcagcaagagccccgggccggtgaaagtgcgggaacagctgtgcaagctgaaaggcggggtgntggtagatgatctgagctgcagccgccaacgggccccttccagcaaacaggtgaatggggtgcagaagcagagacggctagcagccaacgccagggagcggcgcagaatgcatgggctgaaccacgccttcgaccagctgcgcaatgtcatcccgtcgttcaacaacgacaagaagctgtccaaatatgagaccctgcagatggcccaaatctacatcaatgccttgtctgagctgctacaaacgcccagcggaggggaacagccaccgccgcctccagtctcctgcaaaagcgaccaccaccaccttcgcacagccgcctcctatgaagggggcgccggcaacgcgaccgcagctggggctcagcaggcttccggagggagtcagcggccgaccccgcccgggaattgtcgaactcgcttctcagccccggcctctgcgggagggtactcggtgcagctggacgctctgcacttctcgactttcgaggacagcgccctgacagcgatgatggcgcaaaagaatttgtctccttcgctccccgggagcatcttgcagccagtgcaggaagaaaacagcaaaacctcccctcggtcgcacagaagcgacggggaattttccccccattcccattacagtgactcggatgaggcaagttaggaaggtgacagaagcctgaaaactgagacagaaacaaaactgccctttcccagtgcgcgggaagccccgcggttaaagattcccgcaccctttaatttttgctctgcgaccgtcgttgtttagcaaagacttggcttcagatggcagc

SEQ ID NO: 30681 - DNA, 313 bp, Macaca Mulatta
ctcctcaaggactgcaaagcaaatgtaatggtatgaagagttttgagcattgtcgatgcttgtcttacagaattcctggctcagctctttatggacacaggttatgaagaagtggtaaacgagtatgtgtgtcgagagacggtgaataaaaaagaaggcctgtgtgtgccaagagttttccttcagagcaaatttctaaagcctcttaagaacccatctcctgtgatcctgggcctggatcgtaagtcctgacctttcatgaaattggcattcatacctccccttgaagaggataatttaaaatcactctttt

SEQ ID NO: 30682 - DNA, 189 bp, Macaca Mulatta
gggctgcccagctagcagaaagtaaaacagatgagtcgatcaaagatgctcccaccactcagcatgataagagtggagagtggcaagaaacaagtggagaaatacagtgggtatcaactgaaaagactgatggtacagaagagaaacataagaaggaggaggaggatgaagaacttgacctcaataaag

SEQ ID NO: 30683 - DNA, 183 bp, Macaca Mulatta
tgaacggacagttggatctgagcgggaagctaatcatcaaagctcaacttggggaggatattcggcgaattcctattcataatgaagatattacttatgatgaattagtgctaatgatgcaacgagttttcagaggaaaactactgagtaatgatgaagtaacaataaagtataaagatgaag

SEQ ID NO: 30684 - DNA, 5579 bp, Macaca Mulatta
  misc_feature (1)...(5579): n = A,T,C or G
ctccgcgctcgcagcgttctcgggagggcccaggtagcgagcggcgacctcgcgagccccccgcactcccgcccggtttcccggccgtccgcctgtcctttgccccctctgccttctccgcgccggcccgcctcgcttatgcctcggcgctgagccgctctcccaattgcctgccgacatgagctgcaacggaggctcccacccgcggatcaacactctgggccgcatgacccgcgccgaatctggcccggacctgcgctacgagatgaccagcggcggcgggggcaccagcaggatctactactcgcggcgcggcgtgatcaccgaccagaactcggacggctactgnnnnnnnnnnnnnnnnnnnnnnnnnnnnnnnnnnnnnnnnnnnnnnnnnnnnnnnnnnnnnnnnnnnnnnnnnnnnnnnnnnnnnnnnnnnnnnnnnnnnnnnnnnnnnnnnnnnnnnnnnnnnnnnnnnnnnnnnnnnnnnnnnnnnnnnnnnnnnnnnnnnnnnnnnnnnnnnnnnnnnnnnnnnnnnnnnnnnnnnnnnnnnnnnnnnnnnnnnnnnnnnnnnnnnnnnnnnnnnnnnnnnnnnnnnnnnttcttcagctccaagagcaaatgcgagccctttataaagccatcagtgtccctcgagtccgcagggccagctccaagggtggtggaggctacacgtgtcagagcggctctggctgggatgagttcaccaagcacgtcaccagtgaatgtttggggtggatgaggcagcaaagggnnnnnnnnnnnnnnnnnnnnnnnnnnnnnnnnnnnnnnnnnnnnnnnnnnnnnnnnnnnnnnnnnnnnnnnnnnnnnnnnnnnnnnnnnnnnnnnnnnnnnnnnnnnnnnnnnnnnnnnnnnnnnnnnnnnagaaatctgccatctaccagttggaggaggagtatgaaaacctgctggaaagcgtcctttgagaggatggatcacctgcgacagctgcagaacatcatccaggccacgtcccgggagatcatgtggatcaatgactgcgaggaggaggagctgctgtacgactggagcgacaagaacaccaacatcgctcagaaacaggaggccttctcctacgcatgagtcaactggaagttaaagaaaaagagctcaataagctgaaacaagaaagtgaccaacttgtcctcaatcagcatccagcttcagacaaaattgaggnnggcctatatggacactctgcagacgcagtggagctggattcttcagatcaccaagtgcattgatgttcatctgaaagaaaatgctgcctactttcaggtttttnnnnnnnncagttttttgaagaggcccagtcgacggaagcatacctgaaggggcttcaggactccatcaggaagaagtacccctgcgacaagaacatgcccctgcagcacctgctggaacagatcaaggagctgganagaaagaacgagagaaaatccttgaatacaagcgtcaggtgcagaacttggtaaacaagtctaagaagattgtacagctgaagcctcgtaacccagactacagaagcaataaacccattattctcagggctctctgtgactacaaacaagnnnnnnnnnnnnnnnnnnnnnnnnnnnnnnnnnnnnnnnnnnnnnnnnnnnnnnnnnnnnnnnnnnnnnnnnnnnnnnnnnnnnnnnnnnnnnnnnnnnnnnnnnnnnnnnnnnnnnnnnnnnnnnnnnnnnnnnnnnnnnnnnnnnnnnnnnnnnnnnnnnnnnnnnnnnnnnnnnnnnnnnnnnnnnnnnnnnnnnnnnnnnnnnnnnnnnnnnnnnnnnnnnnnnnnnnnnnnnnnnnnnnnnnnnnnnnnnnnnnnnnnnnnnnnnnnnnnnnnnnnnnngctgaaaacaatgcggcaggaagattacacgaagacgatagctgaccttgagttacattaccaagagttcatcagaaatagccaaggctcggagatgtttggagatgatgacaaacggaaaatacagtctcagttcaccgatgcccagaagcattaccagaccctggtcattcagctccctggccacccccagcaccagacagnncagtgaccaaaactgaaatcactcatcatggaacctgccaagatgtcaatcataataaagtaattgaaaccaacagagaaaatgacaagcaagaaacatggatgctgatggagctgcagaagattcgcaggcagatagagcactgcgagggcaggatgactctcaaaaacctccctctagcagaccaggggtcttcacaccacatcacagtgaaaattaatgagcttaagnnnnnnnnnnnnnnnnnnnnnnnnnnnnnnnnnnnnnnnnnnnnnnnnnnnnnnnnnnnnnnnnnnnnnnnnnnnnnnnnnnnnnnnnnnnnnnnnnnnnnnnnnnnnnnnnnnnnnnnnnnnnnnnnnnnnnnnnnnnnnnnnnnnnnnnnnnnnnnnnnnnnnnnnnnnnnnnnnnnnnnnnnnnnnnnnnnnnnnnnnnnnnnnnnnnnnnnnnnnnnnnnnnnnnnnnnnnnnnnnnnnnnnnnnnnnnnnnnnnnnnnnnnnnnnnnnnnnnnnnnnnnnnnnnnnnnnnnnnnnnnnnnnnnnnnnnnnnnnnnnnnnnnnnnnnnnnnnnnnnnnnnnnnnnnnnnnnnnnnnnnnnnnnnnnnnnnnnnnnnnnnnnnnnnnnnnnnnnnnnnnnnnnnnnnnnnnnnnnnnnnnnnnnnnnnnnnnnnnnnnnnnnnnnnnnnnnnnnnnnnnnnnnnnnnnnnnnnnnnnnnnnnnnnnnnnnnnnnnnnnnnnnnnnnnnnnnnnnnnnnnnnnnnnnnnnnnnnnnnnnnnnnnnnnnnnnnnnnnnnnnnnnnnnnnnnnnnnnnnnnnnnnnnnnnnnnnnnnnnnnnnnnnnnnnnnnnnnnnnnnnnnnnnnnnnnnnnnnnnnnnnnnnnnnnnnnnnnnnnnnnnnnnnnnnnnnnnnnnnnnnnnnnnnnnnnnnnnnnnnnnnnnnnnnnnnnnnnnnnnnnnnnnnnnnnnnnnnnnnnnnnnnnnnnnnnnnnnnnnnnnnnnnnnnnnnnnnnnnnnnnnnnnnnnnnnnnnnnnnnnnnnnnnnnnnnnnnnnnnnnnnnnnnnnnnnnnnnnnnnnnnnnnnnnnnnnaggctgcagatgttcatgctcggtacattgaactacttacaagatctggagactattacaggttcttaagtgagatgctgaagagtctggaagatctgaannnnnnnnnnnnnnnnnnnnnnnnnnnnnnnnnnnnnnnnnnnnnnnnnnnnnnnnnnnnnnnnnnnnnnnnnnnnnnnnnnnnnnnnnnnnnnnnnnnnnnnnnnnnnnnnnnnnnnnnnnnnnnnnnnnnnnnnnnnnnnnnnnnnnnnnnnnnnnnnnnnnnnnnnnnnnnnnnnnnnnnnnnnnnnnnnnnnnnnnnnnnnnnnnnnnnnnnnnnnnnnnnnnnnnnnnnnnnnnnnnnnnnnnnnnnnnnnnnnnnnnnnnnnnnnnnnnnnnnagagaagaagaaaatctgtggaagacagatttgaccaacagaagaatgactatgaccaactgcagaattcaaggcaatgtgaaaaggagaaccttggttggcagaagttagagtctgagaaagccatcaaggagaaggagtacgagatcgaaaggctgagggttcttctgcaggacgaaggcgcccggaagagagaatatgaaaatgagctggcaaaggtaagaaaccactataatgaggagatgagtaatttaaggaacaagtatgaaacagagattaacattacgaagaccaccatcaaggagatatccatgcaaaaagaggatgattccaaaaatcttagaaaccagcttgatagactctcaagggaaaatcgagatctgaaggatgaaattgtcaggctcaatgacagcatcttgcaggccactgagcagcgaaggcgagctgaagaaaatgcccttcagcaaaaggcctgtggctctgagataatgcagaagaagcagcatctggagatagagctgaagcaggtcatgcagcagcgctctgaggacaatgcccggcacaagcagtccctggaggaggctgccaagaccattcaggacaaaaataaggagatcgagagactcanagctgagtttcaggaggaggccaagcgccgctgggaatatgaaaatgaactgagtaaggtaagaaacaattacgatgaggagatcattagcttaaaaaatcagttcgagaccgagatcaacatcaccaagaccaccatccaccagctcannnnnnnnnnnnnnnnnnnnnnnnnnnnnnnnnnnnnnnnnnnnnnnnnnnnnnnnnnnnnnnnnnnnnnnnnnnnnnnnnnnnnnnnnnnnnnnnnnnnnnnnnnnnnnnnnnnnnnnnnnnnnnnnnnnnnnnnnnnnnnnnnnnnnnnnnnnnnnnnnnnnnnnnnnnnnnnnnnnnnnnnnnnnnnnnnnnnnnnnnnnnnnnnnnnnnnnnnnnnnnnnnnnnnnnnnnnnnnnnnnnnnnnnnnnnnnnnnnnnnnnnnnnnnnnnnnnnnnnnnnnnnnnnnnnnnnnnnnnnnnnnnnnnnnnnnnnnnnnnnnnnnnnnnnnnnnnnnnnnnnnnnnnnnnnnnnnnnnnnnnnnnnnnnnnnnnnnnnnnnnnnnnnnnnnnnnnnnnnnnnnnnnnnnnnnnnnnnnnnnnnnnnnnnnnnnnnnnnnnnnnnnnnnnnnnnnnnnnnnnnnnnnnnnnnnnnnnnnnnnnnnnnnnnnnnnnnnnnnnnnnnnnnnnnnnnnnnnnnnnnnnnnnnnnnnnnnnnnnnnnnnnnnnnnnnnnnnnnnnnnnnnnnnnnnnnnnnnnnnnnnnnnnnnnnnnnnnnnnnnnnnnnnnnnnnnnnnnnnnnnnnnnnnnnnnnnnnnnnnnnnnnnnnnnnnnnnnnnnnnnnnnnnnnnnnnnnnnnnnnnnnnnnnnnnnnnnnnnnnnnnnnnnnnnnnnnnnnnnnnnnnnnnnnnnnnnnnnnnnnnnnnnnnnnnnnnnnnnnnnnnnnnnnnnnnnnnnnnnnnnnnnnnnnnnnnnnnnnnnnnnnnnnnnnnnnnnnnnnnnnnnnnnnnnnnnnntgaggtcgaggccctgaggcggcagttactccaggaacaggacagtgtcaaacaagctcacttgaggaatgagcatttccagaaggcgatagaagataaaagcagaagcttaaatgaaagcaaaatagaaattgagaggctgcagtctctcacagagaacctgaccaaggagcacttgatgttggaagaagaactgcggaacctgaggctggagtacgatgacctgaggaggggacgaagcgaagcggacagtgataaaaatgcaaccatctcggaactaaggaaccagctgcagatcagcaacaaccggaccctggaactgcaggggctgattaatgatttacagagagagagggaaaatttgagacaggaaattgagaaattccaaaagcaggctttagag

SEQ ID NO: 30685 - DNA, 538 bp, Macaca Mulatta
  misc_feature (1)...(538): n = A,T,C or G
gcaatacgtttggtttaatattggcagtgtggacacctttgaacggaatctggaaactttacagcaggaactgggcatataaggagaaaatcgggtgcctgttgtctacattgctgaaagtgatgnnnnnnnnnnnnnnnnnnnnnnnnnnnnnnnnnnnnnnnnnnnnnnnnnnnnnnnnnnnnnnnnnnnnnnnnnnnnnnnnnnnnnnnnnnnnnnnnnnnnnnnnnnnnnnnnnnnnnnnnnnnnnnnnnnnnnnnnnnnnnnnnnnnnnnnnnnnnnnnnnnnnnnnnnnnnnnnnnnnnnnnnnnnnnnnnnnnnnnnnnnnnnnnnnnnnnnnnnnnnnnnnnnnnnnnnnnnnnnnnnnnnnnnnnnnnnnnnnnnnnnnnnnnnnnnagggtgccattctcactggtcctccaggcactgggaagacgctgctagctaaggccacagccggagaagccaatgtccccttcatcaccgttagtggatccgagtttttggagatgttcgttggtgtgggcccagctagagt

SEQ ID NO: 30686 - DNA, 903 bp, Macaca Mulatta
gggaagacgggggggctctttccttgcctaacgcagccatggctcgtggtcccaagaagcatctgaagcgggtagcagctccaaagcattggatgctggataaattgaccggtgtgtttgctcctcgtccatccaccggtccccacaagttgagagagtgtctccccctcatcatcttcctaaggaacagacttaagtatgccctgacaggagatgaagtaaagaagatttgcatgcagcggttcattaagatcgatggcaaggtccgaactgatataacctaccctgctggattcatggatgtcatcagcattgacaagacgggagagaatttccgtctgatctatgacaccaagggtcgctttgctgtacatcgtattacacctgaggaggccaagtacaagttatgcaaagtgagaaagatctttgtgggcacaaaaggaatccctcatctggtgactcatgatgcccgcaccatccgctaccccgatcccctcatcaaggtgaatgataccattcagattgatttggagactggcaagattactgatttcatcaagttcgacactggtaacctgtgtatggtgactggaggtgctaacctgggaagaattggtgtgatcaccaacagagagaggcatcctggatcttttgacgtggttcacgtgaaagatgccaatggcaacagctttgccactcgacttttccaacatttttgttaattggcaaggggcaacaaaaccatggaatttctccttccccgagagaaaaggggtatccgcctcaacaattgctgagagaaagaacagaatggcggccaacagacgaggtgtaagggtctgtgatgctaacctgtcgaattaaaattggggggtaaaaaaaaaaaagatttgcgctaaaata

SEQ ID NO: 30687 - DNA, 732 bp, Macaca Mulatta
  misc_feature (1)...(732): n = A,T,C or G
gttcaaaggtcaggcgccctcaccctgcgatcctgtgtgcaagattgtcgactgggctctgtccgtctggcgtcagcttaactcctgcctgtcccgcttgggcacacctgaagcacttcttggaccagaatatttcctgtcttgtcctgtagttcctggacatgcccaagtgacagtgaagtngtggatgtctaagctgtggaacggcgtcatcgcgcccagagttcaagaagcaatattgtcaagagcctctgtgaaaagacaacctggctttggacagacaactgctaaaagacacccgagccaaggacagcaagctgtggtcaaagctgctctcagcatcttgctaaataaagctgtactgcatggctgtcccctccccagagcagnnagaactagaccagcatacagctgatttcaaaggaggaagtttccctttatccatagtttccagttataacagttgtaacaaaaagaaaggagagagtggtgcctggagaaaggtgaacaccagtcctcgcaggaagtctggccgcttctctttacccacctggaataagccagacctaagcaccgaaggtaaggggccggggtnggtctttagagaatgatctgtcactgacgttgaatttggatcagagactctctctgggttcggatgacgaagcagatcttgtcaaggaacttcagagcatgtgctccagcaagtctgagtctgatatcagcaaggtg

SEQ ID NO: 30688 - DNA, 1423 bp, Macaca Mulatta
  misc_feature (1)...(1423): n = A,T,C or G
aggacggctggcaccttgtttggggaaggattccatgcctttttgacagaccggaagaaagtgacagccacggtnnnnnnnnnnnnnnnnnnnnnnnnnnnnnnnnnnnnnnnnnnnnnnnnnnnnnnnnnnnnnnnnnnnnnnnnnnnnnnnnnnnnnnnnnnnnnnnnnnnnnnnnnnnnnnnnnnnnnnnnnnnnnnnnnnnnnnnnnnnnnnnnnnnnnnnnnnnnnnnnnnnnnnnnnnnnnnnnnnnnnnnnnnnnnnnnnnnnnnnnnnnnnnnnnnnnnnnnnnnnnnnnnnnnnnnnnnnnnnnnnnnnnnnnnnnnnnnnnnnnnnnnnnnnnnnnnnnnnnnnnnnnnnnnnnnnnnnnnnnnnnnnnnnnnnnnnnnnnnnnnnnnnnnnnnnnnnnnnnnnnnnnnnnnnnnnnnnnnnnnnnnnnnnnnnnnnnnnnnnnnnnnnnnnnnnnnnnnnnnnnnnnnnnnnnnnnnnnnnnnnnnnnnnnnnnnnnnnnnnnnnnnnnnnnnnnnnnnnnnnncctcctgctcttcgtggatgaagcagacgccttccttcggaagcgagccaccgnnnnnnnnnnnnnnnnnnnnnnnnnnnnnnnnnnnnnnnnnnnnnnnnnnnnnnnnnnnnnnnnnnnnnnnnnnnnnnnnnnnnnnnnnnnnnnnnnnnnnnnnnnnnnnnnnnnnnnnnnnnnnnnnnnnnnnnnnnnnnnnnnnnnnnnnnnnnnnnnnnnnnnnnnnnnnnnnnnnnnnnnnnnnnnnnnnnnnnnnnnnnnnnnnnnnnnnnnnnnnnnnnnnnnnnnnnnnnnnnnnnnnnnnnnnnnnnnnnnnnnnnnnnnnnnnnnnnnnnnnnnnnnnnnnnnnnnnnnnnnnnnnnnnnnnnnnnnnnnnnnnnnnnnnnnnnnnnnnnnnnnnnggccacggcgtatgcctccgaggacggggtcctcaccgaggccatgatggacgcctgtgtgcaagatgctgtccagcagcaccagcagaagatgtgctggctgaagtcagaagggcctgggcgcggggacgagccctccccatcctgagtccacagcgagacccacacctcacggagctgtcagcggacccctcccacccccaacttccggcccctgcacatttaggaaatattcctggatggggaagggctgtgcccagggcctctgtgcaccagcttagcttgtggtgggggtcggccgttctgccccccaggacaccccctgttgtgggcactggctagggaggggcaggcctccttcctgccccttaagacacttgggagacgcattttccatgtgactcagagcgggaggggaggcttcacaccccagcccctgcccaggccacggggagggtgggtgccggctgagcccccagggcagcaggag

SEQ ID NO: 30689 - DNA, 698 bp, Macaca Mulatta
gtgttggcagatctgaagacagcatgtcacagccattccccagagtggctctccattcccaggctcagtgcaggatccaggcctgcatgtgtggcgggtggagaagctgaagccagtgcccgtggcacgagagaaccagggcgtcttcttctcgggggactcctacctagtgctgcacaatggcccagaagaggtttcccatctgcacctgtggataggtcagcagtcatcccgggatgagcagggggcctgtgccgtgctggctgtgcacctcaacacgctgctgggagagcggcctgtgcagcaccgtgaggtgcagggcaatgagtccgacctcttcatgagctacttcccacaaggcctcaagtaccaggaaggtggtgtggagtcagcatttcacaagacctccacaggagccccagctgccatcaagaaactctaccaggtgaaggggaagaagaacatccgtgccaccgagcgggcactgaactgggacagcttcaacactggggactgcttcatcctggacctgggccagaacatctttgcctggtgtggtggaaagtccaacatcctggaacgcaacaaggcgagggacctggccctggccatccgggacagtgagcgacagggcaaggcccacgtggagatcgtcactgatggggaggagcctgctgagatgatccacgtcctgggcc

SEQ ID NO: 30690 - DNA, 791 bp, Macaca Mulatta
ggggtgttaaaaacgaagagcactgtctgccctgtctacacggctgtgacaaaagtgccacaagcctgaagcaagatgccgatgacatgtgtatgatatgtttcaccgaagcgctctcagcagcaccagccattcagctggattgtagtcacgtattccacttacagtgctgtcggcgagttttagaaaatcgatggcttggcccaaggataacatttggatttatatcttgtcccatttgtaagaacaaaattaatcacatagtactaaaagacctacttgatccaataaaagaactctatgaggatgtcagaagaaaagccttaatgagattggaatatgaaggtctgcataagagtgaagctatcacaactcctggtgtgaggttttataatgacccagctggctatgcaatgaatcgatatgcatattatgtctgctacaaatgcagaaaggcatattttggtgggtgaaagctcgctgtgatgctgaagcctggacacggaagatgattatggattcccacaaaagctcaatttgtggtgccctggttctgatggtttccaggggctcaaaaggtgttccccaaaacatgggccacagaactttttttggaaataaaaaaatggtcccctaacctgcctgtttccgatgggcttggaccctttttcccgggtttttggggaaacaaaaacaattttatttgttaaaatgccttggtccacaggaatcgaaattctttccaaagcagaatgggactccttcccctttttcccccaaaggggaaaaaa

SEQ ID NO: 30691 - DNA, 1071 bp, Macaca Mulatta
  misc_feature (1)...(1071): n = A,T,C or G
cagccctgcttcctcaaggactgggaaatgcacgtccacttcaaagtccacggcacagggaagaagaacctccatggagacggcatcgccttgtggtacacccgggaccgcctcgtgccaggnnnnnnnnnnnnnnnnnnnnnnnnnnnnnnnnnnnnnnnnnnnnnnnnnnnnnnnnnnnnnnnnnnnnnnnnnnnnnnnnnnnnnnnnnnnnnnnnnnnnnnnnnnnnnnnnnnnnnnnnnnnnnnnnnnnnnnnnnnnnnnnnnnnnnnnnnnnnnnnnnnnnnnnnnnnnnnnnnnnnnnnnnnnnnnnnnnnnnnnnnnnnnnnnnnnnnnnnnnnnnnnnnnnnnnnnnnnnnnnnnnnnnnnnnnnnnnnnnnnnnnnnnnnnnnnnnnnnnnnnnnnnnnnnnnnnnnnnnnnnnnnnnnnnnnnnnnnnnnnnnnnnnnnnnnnnnnnnnnnnnnnnnnnnnnnnnnnacaatcatgacatcatctccatgaagctgttccagctgatggtggagcacacgcccgacgaggagagcatcgactggaccaagatcgagcccagcgtcaacttcctcaagtcgcccaaanagacaacgtggacgaccccacggggaacttccgcagcgggcccctgacagggtggcgggtgttcctgctgctgctgtgcgcgctcctgggcattgtcgtctgcgccgtggtgggggccgtggtgttccagaagcggcaggagcggaacaagcgcttctactgagcggcaccaccagcggggcctgnnctgggcccaggagccaatgtgaacttttttttttactgggattatagaagaacaagatgaccttatttcttaaccgtttcaaataaatgattaaagtattttcatacattttgcttcttgcccagcagggacaggtggcagagccgaggctcagggtctggcacctctgcagctggagacggaggctctcctggggctggcgtctcagtgcaggggtctgtgcctagagctgggctgcagcccctgcaggcagctgttgaacactggagggtcccccgaaccacact

SEQ ID NO: 30692 - DNA, 849 bp, Macaca Mulatta
  misc_feature (1)...(849): n = A,T,C or G
aaacgtaatgtgtaaatcaaagtatatacatgtgtgggtgttcctgtttctggagtntcatgaggatttacacatgccattcagtgttctgtataggtctgcctacctttgtgaattcatctgttaacccctcttcctntgagagagcaccggcgatggtggttaactccttgtgttttccctctctcctactggttattcttgaattaagcacagactcgtcagctcggctgctttatcatgaataatgtgtgtgaccttgcagttcttccacagttcagcaaacaagtgctagcttcactgaccaaaaattaaggaaggaaaacacagtttttaaaacgatccatcttttaacagccgaaaccgatgtgtctatggtgctgcatcttgctgttgtacttctgaaatcagacctgtgggaaccatcatttctgacttaaccgtgagatgctcacgagtacccttcctgttgttttgttagcattgaaatcaagactatttatttggaatacatacaacagtgtttttccactgtatttcatttgcaaaagttgagaactgccttctctaccttttgcaaaataattgatattccatattggattctcaaagacttcgatatggtgaacctattaaacctagaaattgtattcatcctttcatgactgtggcctgagttccccagcccctctcctccttttttttagatgagatttagcacactctcagttatttaaacatgcaacatttcttgagtatgtatgttgaggccatctgagctcatagctgattcagtaaccagtttcatgctgagtcattcacactcactacttaatactggaatggtga

SEQ ID NO: 30693 - DNA, 1404 bp, Macaca Mulatta
  misc_feature (1)...(1404): n = A,T,C or G
tgtctctatggaacagtgcccaaattaaagcaattgcacgtgcatcctcctggcatgcaatacccagacttacattaggacgccaggctcaaagaaacccttctcttctcggctggaaagggcttcacagaccaccaaacccaaaaaagtgattacctcgagttaagggccaaacttcaaaccaagccggattacctcgaagtcctggagaagacaacatataggttctaacagagagaagaaaatatattagtgcnnnnnnnnnnnaaaagaaaaggaatataaaagaaatatatcccttgctccctttacacttgtcccaataactccatcctcacgatcttccctaccctgaacaaaactgaaaccgcatgataactagagaatacagatgtatgctctcccctctcagatgtgatttggaggaagggccatactcagatcattaatcaatgaagtgccttcgcagacttttgccagcaaatgttatcattatttttttatactgaaacttgagactttgactgtgccatgtataaggtataccggggatcattgtatggatcctaattaagtaaaattcaatgtgtctttttattttcagtaactannnnnnnnnngttgtagttttgttttaaagggaggggggaaacaagttgacatttgtcatttgtggctttctttcttctcatcatggcacagattctgtacatgtattaacaatgcagtttgctgcatgcctggaaactgcaagacggggagggagggggcggnnnnnnnnnnnnnnnnnnnnnnnnnnnnnnnnnnnnnnnnnnnnnnnnnnnnnnnnnnnnnnnnnnnnnnnnnnnnnnnnnnnnnnnnnnnnnnnnnnnnnnnnnnnnnnnnnnnnnnnnnnnnnnnnnnnnnnnnnnnnnnnnnnnnnnnnnnnnnnnnnnnnnnnnnnnnnnnnnnnnnnnnnnnnnnnnnnnnnnnnnnnnnnnnnnnnnnnnnnnnnnnnnnnnnnnnnnnnnnnnnnnnnnnnnnnnnnnnnnnnnnnnnnnnnnnnnnnnnnnctaggctggattctaccgaagtggaggcctggtggtttaacagccgaagacacgcgcctaggggtgagcaccctctttgtgacacttcatcctgatgccaagattttttggagaacatctgcactttcnnnnnnnnnnnnnnnnnnnnnnnnnngcaactgggtatatatcactaacagctttgtaggaagcacttttaatgttttctctctcacacacaaagattcaaaagaaatgtgcatatatttattctgtaatttcagtgattataaattgtaaaggtaatgtttaatcattgtatagtgattatgcgtctggtatagctttcctaataaaaagtttttgaaaaaca

SEQ ID NO: 30694 - DNA, 527 bp, Macaca Mulatta
gagatgaagaaaaggcgacattatttctgggagaaaaactaatggcttattactggctgttgttgacttagttctgagaaatgggccttcctaagtttagtaaaggaaggaggtgaagcttggaagagggaaagtcgtgtgcagtggggacatttttgataagcgttataaactgtaaaacgttcacatgcatttagaaacagtgacccgcaggcagccccagtgtgcgccttcgatgccggcaccgtcggacgctgtgtctcctccgcagcggtctgcactacactcagctttctcggtaacttttctctgtggggatctacactcggctgggctctttgctcaacctggagcttcacttttgagggctctgcaaagctgatttaaattcagcctgggagacatttttcctctagaaaaacaagcattagtggtagtagctgtccacaggagggtgtgggaactgcttttccagagttcacactcctttcctgagggatgaagggcccagtggccccacaggatcc

SEQ ID NO: 30695 - DNA, 481 bp, Macaca Mulatta
  misc_feature (1)...(481): n = A,T,C or G
tgttgctgggagctgttctactgctattagctctgcccagtcatggccaggataccacaactcaagggcccggagtcctgcttcctctgcccaagggggccnnnnnnnnnnnnnnnnnnnnnnnnnnnnnnnnnnnnnnnnnnnnnnnnnnnnnnnnnnnnnnnnnnnnnnnnnnnnnnnnnnnnnnnnnnnnnnnnnnnnnnnnnnggtcttattggtcctaagggagacactggtgaaactggagtaaccggggctgaaggtccccgaggctttccgggaatccaaggcaggaaaggagaacctggagaaggtgcctatgtataccgctcagcattcagtgtgggattggagacctacgttactgtccccaacatgcccattcgctttaccaagatcttctacaatcagcaaaaccactatgatggctccactggtaaattccactgcaacattcctgggctgtactactttgcctacc

SEQ ID NO: 30696 - DNA, 685 bp, Macaca Mulatta
  misc_feature (1)...(685): n = A,T,C or G
agatttctgacgccctcataaggagagtgcacctgactgaggatcagtggggtaaaggcacactcactccaaggatgaccacggactttgacttgagtctggacaacagccctctgctgcaatccatccaccagctcgacttcgtgcaggtgaaannnnnnnnnnnnnnnnnnnnnnnnnnnnnnnnnnnnnnnnnnnnnnnnnnnnnnnnnnnnnnnnnnnnnnnnnnnnnnnnnnnnnnnnnnnnnnnnnnnnnnnnnnnnnnnnnnnnnnnnnnnnnnnnnnnnnnnnnnnnnnnnnnnnnnnnnnnnnnnnnnnnnnnnnnnnnnnnnnnnnnnnnnnnnnnnnnnnnnnnnnnnnnnnnnnnnnnnnnnnnnnnnnnnnnnnnnnnnnnnnnnnnnnnnnnnnnnnnnnnnnnnnnnnnnnnnnnnnnnnnnnnnnnnnnnnnnnnnnnnnnnnnnnnnnnnnnnnnnnnnnnnnnnnnnnnnnnnnnnnnnnnnnnnnnnnnnnnnnnnnnnnnnnnnnnnnnnnnnnnnnnnnnnnnnnnnnnnnnnnnnnnnnnnnnnnnnnnnnnnnnnnnnnnnnnnnnnnnnnnnnnnnnnnnnnnnnnnnnnnnnnnnnnnnnnnnggatgcaattttgagacacaatctgcaccttactctcaattaggcaagtatacctat

SEQ ID NO: 30697 - DNA, 4846 bp, Macaca Mulatta
  misc_feature (1)...(4846): n = A,T,C or G
gggacaccctggaggctgccaccagcctgtacgaccgagtggatgaggaggtgcacaggctggtccttgcctcgaacggtcgtctccggcagctggagcgcctccgggagctggcatcgctccaggacgggaatgaccannnnnnnnnnnnnnnnnnnnnnnnnnnnnnnnnnnnnnnnnnnnnnnnnnnnnnnnnnnnnnnnnnnnnnnnnnnnnnnnnnnnnnnnnnnnnnnnnnnnnnnnnnnnnnnnnnnnnnnnnnnnnnnnnnnnnnnnnnnnnnnnnnnnnnnnnnnnnnnnnnnnnnnnnnnnnnnnnnnnnnnnnnnnnnnnnnnnnnnnnnnnnnnnnnnnnnnnnnnnnnnnnnnnnnnnnnnnnnnnnnnnnnnnnnnnnnnnnnnnnnnnnnnnnnnnnnnnnnnnnnnnnnnnnnnnnnnnnnnnnnnnnnnnnnnnnnnnnnnnnnnnnnnnnnnnnnnnnnnnnnnnnnnnnnnnnnnnnnnnnnnnnnnnnnnnnnnnnnnnnnnnnnnnnnnnnnnnnnnnnnnnnnnnnnnnnnnnnnnnnnnnnnnnnnnnnnnnnnnnnnnnnnnnnnnnnnnnnnnnnnnnnnnnnnnnnnnnnnnnnnnnnnnnnnnnnnnnnnnnnnnnnnnnnnnnnnnnnnnnnnnnnnnnnnnnnnnnnnnnnnnnnnnnnnnnnnnnnnnnnnnnnnnnnnnnnnnnnnnnnnnnnnnnnnnnnnnnnnnnnnnnnnnnnnnnnnnnnnnnnnnnnnnnnnnnnnnnnnnnnnnnnnnnnnnnnnnnnnnnnnnnnnnnnnnnnnnnnnnnnnnnnnnnnnnnnnnnnnnnnnnnnnnnnnnnnnnnnnnnnnnnnnnnnnnnnnnnnnnnnnnnnnnnnnnnnnnnnnnnnnnnnnnnnnnnnnnnnnnnnnnnnnnnnnnnnnnnnnnnnnnnnnnnnnnnnnnnnnnnnnnnnnnnnnnnnnnnnnnnnnnnnnnnnnnnnnnnnnnnnnnnnnnnnnnnnnnnnnnnnnnnnnnnnnnnnnnnnnnnnnnnnnnnnnnnnnnnnnnnnnnnnnnnnnnnnnnnnnnnnnnnnnnnnnnnnnnnnnnnnnnnnnnnnnnnnnnnnnnnnnnnnnnnnnnnnnnnnnnnnnnnnnnnnnnnnnnnnnnnnnnnnnnnnnnnnnnnnnnnnnnnnnnnnnnnnnnnnnnnnnnnnnnnnnnnnnnnnnnnnnnnnnnnnnnnnnnnnnnnnnnnnnnnnnnnnnnnnnnnnnnnnnnnnnnnnnnnnnnnnnnnnnnnnnnnnnnnnnnnnnnnnnnnnnnnnnnnnnnnnnnnnnnnnnnnnnnnnnnnnnnnnnnnnnnnnnnnnnnnnnnnnnnnnnnaagagcagtttgggatgtacgtggtctacagcaagaacaagccacagtcggacgccctgctcagcagccacggcaatgccttcttcaaggnaggacaagcagcgggagctgggtgacaagatggacctggcctcctacctgctgcggcccgtgcagcgcgtggccaagtacgcgctgctgctccaggacctgctcaaggaggccggtcgcggcccggcccaggggcaggagctgggtgagctccgagccgccgaggtcgtggtctgcttccagctgcgccacggcaatgacctgctggccatggacgccatccgcggctgtgacgtnnnnnnnnnnnnnnnnnngcagctgaaatgccaagatgagtttatcatttgctgcgggagaaagaagtatctgaggcacgtgttcctctttgaagacctcatcctgttcagcaagacccagaaggtggagggcggccacgacgtctacctgtacaagcagtctttcaannnnnnnnnnnnnnnnnnnnnnnnnnnnnnnnnnnnnnnnnnnnnnnnnnnnnnnnnnnnnnnnnnnnnnnnnnnnnnnnnnnnnnnnnnnnnnnnnnnnnnnnnnnnnnnnnnnnnnnnnnnnnnnnnnnnnnnnnnnnnnnnnnnnnnnnnnnnnnnnnnnnnnnnnnnnnnnnnnnnnnnnnnngggaacaccccccaggcagagagacctgggcagccaccgccatgaatgagagcagtctggttgcccccaggccagctgtgctctgatggccaaggatggcggtccttgcctgtgtcccagcgtggggttagttctggaacatttgatcacttctgctccgctctctgtgctccacctggaactccnnnnnnnnnnnnnnnnnnnnnnnnnnnnnnnnnnnnnnnnnnnnnnnnnnnnnnnnnnnnnnnnnnnnnnnnnnnnnnnnnnnnnnnnnnnnnnnnnnnnnnnnnnnnnnnnnnnnnnnnnnnnnnnnnnnnnnnnnnnnnnnnnnnnnnnnnnnnnnnnnnnnnnnnnnnnnnnnnnnnnnnnnnnnnnnnnnnnnnnnnnnnnnnnnnnnnnnnnnnnnnnnnnnnnnnnnnnnnnnnnnnnnnnnnnnnnnnnnnnnnnnnnnnnnnnnnnnnnnnnnnnnnnnnnnnnnnnnnnnnnnnnnnnnnnnnnnnnnnnnnnnnnnnnnnnnnnnnnnnnnnnnnnnnnnnnnnnnnnnnnnnnnnnnnnnnnnnnnnnnnnnnnnnnnnnnnnnnnnnnnnnnnnnnnnnnnnnnnnnnnnnnnnnnnnnnnnnnnnnnnnnnnnnnnnnnnnnnnnnnnnnnnnnnnnnnnnnnnnnnnnnnnnnnnnnnnnnnnnnnnnnnnnnnnnnnnnnnnnnnnnnnnnnnnnnnnnnnnnnnnnnnnnnnnnnnnnnnnnnnnnnnnnnnnnnnnnnnnnnnnnnnnnnnnnnnnnnnnnnnnnnnnnnnnnnnnnnnnnnnnnnnnnnnnnnnnnnnnnnnnnnnnnnnnnnnnnnnnnnnnnnnnnnnnnnnnnnnnnnnnnnnnnnnnnnnnnnnnnnnnnnnnnnnnnnnnnnnnnnnnnnnnnnnnnnnnnnnnnnnnnnnnnnnnnnnnnnnnnnnnnnnnnnnnnnnnnnnnnnnnnnnnnnnnnnnnnnnnnnnnnnnnnnnnnnnnnnnnnnnnnnnnnnnnnnnnnnnnnnnnnnnnnnnnnnnnnnnnnnnnnnnnnnnnnnnnnnnnnnnnnnnnnnnnnnnnnnnnnnnnnnnnnnnnnnnnnnnnnnnnnnnnnnnnnnnnnnnnnnnnnnnnnnnnnnnnnnnnnnnnnnnnnnnnnnnnnnnnnnnnnnnnnnnnnnnnnnnnnnnnnnnnnnnnnnnnnnnnnnnnnnnnnnnnnnnnnnnnnnnnnnnnnnnnnnnnnnnnnnnnnnnnnnnnnnnnnnnnnnnnnnnnnnnnnnnnnnnnnnnnnnnnnnnnnnnnnnnnnnnnnnnnnnnnnnnnnnnnnnnnnnnnnnnnnnnnnnnnnnnnnnnnnnnnnnnnnnnnnnnnnnnnnnnnnnnnnnnnnnnnnnnnnnnnnnnnnnnnnnnnnnnnnnnnnnnnnnnnnnnnnnnnnnnnnnnnnnnnnnnnnnnnnnnnnnnnnnnnnnnnnnnnnnnnnnnnnnnnnnnnnnnnnnnnnnnnnnnnnnnnnnnnnnnnnnnnnnnnnnnnnnnnnnnnnnnnnnnnnnnnnnnnnnnnnnnnnnnnnnnnnnnnnnnnnnnnnnnnnnnnnnnnnnnnnnnnnnnnnnnnnnnnnnnnnnnnnnnnnnnnnnnnnnnnnnnnnnnnnnnnnnnnnnnnnnnnnnnnnnnnnnnnnnnnnnnnnnnnnnnnnnnnnnnnnnnnnnnnnnnnnnnnnnnnnnnnnnnnnnnnnnnnnnnnnnnnnnncacccggagccggcatcggtgctagagtcacagaactcaaactgtgggtggaaccgcagcccttacgtccagaaagttaannnnnnnnnnnnnnnnnnnnnnnnnnnnnnnnnnnnnnnnnnnnnnnnnnnnnnnnnnnnnnnnnnnnnnnnnnnnnnnnnnnnnnnnnnnnnnnnnnnnnnnnnnnnnnnnnnnnnnnnnnnnnnnnnnnnnnnnnnnnnnnnnnnnnnnnnnnnnnnnnnnnnnnnnnnnnnnnnnnnnnnnnnnnnnnnnnnnnnnnnnnnnnnnnnnnnnnnnnnnnnnnnnnnnnnnnnnnnnnnnnnnnnnnnnnnnnnnnnnnnnnnnnnnnnnnnnnnnnnnnnnnnnnnnnnnnngaagagattaagaagacccagaccgaccttacagggatgagcaactacaatactgacagtgaaaactaccctggatggggtgacagattggatttcacagaagagaccatgaggcaccttgaagacgcatcagtagaagctatttgcattagtcgggcctccagagagacggaaccagtaggnnnnnnnnnnnnnnnnnnnnnnnnnnnnnnnnnnnnnnnnnnnnnnnnnnnnnnnnnnnnnnnnnnnnnnnnnnnnnnnngacagactgacagatgagaggggccttaggggcattggctgacacaattttggcaggtcaagagccccacaataggccacccacaagctggagacccaagcaagctgctagtgtagcccagtccaagtcctgaagcctcagagccagggaaggcaatggtataattctcagtcagaggccaaaggcctgagaacctgggggccactggtgtaaatctggagtcccatagacccagtgaactccaaacacaagagatgtgagtgcacatcataatccaattgcataaaaccagtgacaaacagaaaatactaaaagcagtcagaggacaagggcatgttctgttgggaggcacaaagctgacgaggatggctgactcctcagaagcagcacgggtgagagacagtggaatgtactaagg

SEQ ID NO: 30698 - DNA, 647 bp, Macaca Mulatta
  misc_feature (1)...(647): n = A,T,C or G
ggaactaagtataacctagactacacaaagaggataatgaaagccagagagnnnnnnnnnnnnnnnnnnnnnnnnnnnnnnnnnnnnnnnnnnnnnnnnnnnnnnnnnnnnnnnnnnnnnnnnnnnnnnnnnnnnnnnnnnnnnnnnnnnnnnnnnnnnnnnnnnnnnnnnnnnnnnnnnnnnnnnnnnnnnnnnnnnnnnnnnnnnnnnnnnnnnnnnnnnnnnnnnnnnnnnnnnnnnnnnnnnnnnnnnnnnnnnnnnnnnnnnnnnnnnnnnnnnnnnnnnnnnnnnnnnnnnnnnnnnnnnnnnnnnnnnnnnnnnnnnnnnnnnnnnnnnnnnnnnnnnnnnnnnnnnnnnnnnnnnnnnnnnnnnnnnnnnnnnnnnnnnnnnnnnnnnagtttaatccccgtaaaccaattacacctgagcattctacttttatcacctctccatctctgaaggacaggattcactgtgtggcttatgtcttagacatcaactctattgacaatctctcctctaaaatgttggcaaaattcaagcaagttcacaaagaagtattaaactgtggtntagcacatgtagacttgcttactaaagtggatgattgcagtgagattcttcaagagaactttttaaacctgagt

SEQ ID NO: 30699 - DNA, 1055 bp, Macaca Mulatta
  misc_feature (1)...(1055): n = A,T,C or G
ggatatatcacttgagcatctgttgcctgaggagaaagttttattatcaagaagagaatctcaaaccaaaaaacttcaagctaaagtaacttcaagaaaaannnnnnnnnnnnnnnnnnnnnnnnnnnnnnnnnnnnnnnnnnnnnnnnnnnnnnnnnnnnnnnnnnnnnnnnnnnnnnnnnnnnnnnnnnnnnnnnnnnnnnnnnnnnnnnnnnnnnnnnnnnnnnnnnnnnnnnnnnnnnnnnnnnnnnnnnnnnnnnnnnnnnnnnnnnnnnnnnnnnnnnnnnnnnnnnnnnnnnnnnnnnnnnnnnnnnnnnnnnnnnnnnnnnnnnnnnnnnnnnnnnnnnnnnnnnnnnnnnnnnnnnnnnnnnnnnnnnnnnnnnnnnnnnnnnnnnnnnnnnnnnnnnnnnnnnnnnnnnnnnnnnnnnnnnnnnnnnnnnnnnnnnnnnnnnnnnnnnnnnnngagactggcctaaaacacttgaaaggtgttaatgaaaaagatataataaaagatctaatcaacatacagtcaaagaggcatgnnnagactgataagaacttctttgcatatgctattggaagaggtgtaaggaaggagtcaatcaagacacaattaaaaagtcacccagnnnagagactgataaggaacacttggcagatgctattggaagaggtataataaagggatcaatcaatgcacaactaaaaggtcaccaggnnnnnnnnnnnnnnnnnnnnnnnnnnnnnnnnnnnnnnnnnnnnnnnnnnnnnnnnnnnnnnnnnnnnnnnnnnnnnnnnnnnnnnnnnnnnnnnnnnnnnnnnnnnnnnnnnnnnnnnnnnnnnnnnnnnnnnnnnnnnnnnnnnnnnnnnnnnnnnnnnnnnnnnnnnnnnnnnnnnnnnnnnnnnnnnnnnnnnnnnnnnnnagaggaaacttatgagtactcttcaccctatgcgattgcaccttcaaaagcagtttatagaacatatagggctagttcaagcttttctaaagacatccatcttcctttactgaatcaactccattcagg

SEQ ID NO: 30700 - DNA, 3389 bp, Macaca Mulatta
  misc_feature (1)...(3389): n = A,T,C or G
aggcaaacagaccttgctgactgaaggcaaagactcctccatcccacccaccctcccagctgccgcggccattgacccctcctttacaaggggcttaagcaactccccagtggcgcgtgttggaatggacttcgaaccctggcctcttgggatgcaaaggnnnnnnnnnnnnnnnnnnnnnnnnnnnnnnnnnnnnnnnnnnnnnnnnnnnnnnnnnnnnnnnnnnnnnnnnnnnnnnnnnnnnnnnncagctgagggcacccggtgcacggacccgcctgcaggcaagcccgccatggcacccaagcgcaagggcggcctgaagctgaacgccatctgcgccaagctgagccgccaggtggtggtggaaaagcgagctgacgccggctcccacgcggagggcagcccatcgcggccccgggacccagagcgcagtggccctgagtctggggcagcccgggccccccgcagcgaagaagacaagagacgggcggtgatcgagaagtgggtgaacggggagtacagcgannnnnnnnnnnnnnnnnnnnnnnnnnnnnnnnnnnnnnnnnnnnnnnnnnnnnnnnnnnnnnnnnnnnnnnnnnnnnnnnnnnnnnnnnnnnnnnnnnnnnnnnnnnnnnnnnnnnnnnnnnnnnnnnnnnnnnnnnnnnnnnnnnnnnnnnnnnnnnnnnnnnnnnnnnnnnnnnnnnnnnnnnnnnnnnnnnnnnnnnnnnnnnnnnnnnnnnnnnnnnnnnnnnnnnnnnnnncgcggcctccaccatgacggagttccttggcatgtttggctacgacgaccagaacacgcgggacgagctggccaggaagatcagctttgagaagctgcacgcgggctccaccccagaggcggccacctcctccatgctgcccacctccgaggataccctcagcaagcgggcacggttctctaagtacgaggagtacatccgcaagctcaaggctggcgagcagctctcctggccggcccccggcgccaagactgaggagcgggtgggcaaggaggtggtgggcccccttcccggcctgcggctgcccagcagcacggcccacctggagaccaaggccaccatcctgcccctgccgtcgcacagcagtgtccagatgcagaacctggtggcccgggcctccaagtatgacttcttcatccaaaaactgaagaccggcgagaacctgcggccccagaacgggagcacctacaagaagccatccaagtacgacctggagaatgtcaagtacctgcacctcttcaaacctggggagggcagccctgacatgggcggggccatcgccttcaagacgggcaaggtggggcgcccctccaagtatgacgtccggggcatccagaagccaggccccgccaaggttccgcccacccccagcctggctcccgcaccccttgccagcatgcccagtgctcccagcgcccctgggccagggccggagccgcctgcctccctgtccttcaacactcccgagtacctgaagtcaaccttctccaaaacagactccatcacnnnnnnnnnnnnnnnnnnnnnnnnnnnnnnnnnnnnnnnnnnnnnnnnnnnnnnnnnnnnnnnnnnnnnnnnnnnnnnnnnnnnnnnnnnnnnnnnnnnnnnnnnnnnnnnnnnnnnnnnnnnnnnnnnnnnnnnnnnnnnnnnnnnnnnnnnnnnnnnnnnnnnnnnnnnnnnnnnnnnagaggttcacgagtaagcaggacgtgatccgtcactacaacatgcacaagaagcgtgacaactccctacagcatggcttcatgcgcttcagcccgctggacgactgcagcgtctactaccacggctgccacctcaacgggaagagcactcactaccactgcatgcaggtgnnnnnnnnnnnnnnnnnnnnnnnnnnnnnnnnnnnnnnnnnnnnnnnnnnnnnnnnnnnnnnnnnnnnnnnnnnnnnnnnnnnnnnnnnnnnnnnnnnnnnnnnnnnnnnnnnnnnnnnnnnnnnnnnnnnnnnnnnnnnnnnnnnnnnnnnnnnnnnnnnnnnnnnnnnnnnnnnnnnnnnnnnnnnnnnnnnnnnnnnnnnnnnnnnnnnnnnnnnnnnnnnnnnnnnnnnnnnnnnnnnnnnnnnnnnnnnnnnnnnnnnnnnnnnnnnnnnnnnnnnnnnnnnnnnnnnnnnnnnnnnnnnnnnnnnnnnnnnnnnnnnnnnnnnnnnnnnnnnnnnnnnnnnnnnnnnnnnnnnnnnnnnnnnnnnnnnnnnnnnnnnnnnnnnnnnnnnnnnnnnnnnnnnnnnnnnnnnnnnnnnnnnnnnnnnnnnnnnnnnnnnnnnnnnnnnnnnnnnnnnnnnnnnnnnnnnnnnnnnnnnnnnnnnnnnnnnnnnnnnnnnnnnnnnnnnnnnnnnnnnnnnnnnnnnnnnnnnnnnnnnnnnnnnnnnnnnnnnnnnnnnnnnnnnnnnnnnnnnnnnnnnnnnnnnnnnnnnnnnnnnnnnnnnnnnnnnnnnnnnnnnnnnnnnnnnnnnnnnnnnnnnnnnnnnnnnnnnnnnnnnnnnnnnnnnnnnnnnnnnnnnnnnnnnnnnnnnnnnnnnnnnnnnnnnnnnnnnnnnnnnnnnnnnnnnnnnnnnnnnnnnnnnnnnnnnnnnnnnnnnnnnnnnnnnnnnnnnnnnnnnnnnnnnnnnnnnnnnnnnnnnnnnnnnnnnnnnnnnnnnnnnnnnnnnnnnnnnnnnnnnnnnnnnnnnnnnnnnnnnnnnnnnnnnnnnnnnnnnnnnnnnnnnnnnnnnnnnnnnnnnnnnnnnnnnnnnnnnnnnnnnnnnnnnnnnnnnnnnnnnnnnnnnnnnnnnnnnnnnnnnnnnnnnnnnnnnnnnnnnnnnnnnnnnnnnnnnnnnnnnnnnnnnnnnnnnnnnnnnnnnnnnnnnnnnnnnnnnnnnnnnnnnnnnnnnnnnnnnnnnnnnnnnnnnnnnnnnnnnnnnnnnnnnnnnnnnnnnnnnnnnnnnnnnnnnnnnnnnnnnnnnnnnnnnnnnnnnnnnnnnnnnnnnnnnnnnnnnnnnnnnnnnnnnnnnnnnnnnnnnnnnnnnnnnnnnnnnnnnnnnnnnnnnnnnnnnnnnnnnnnnnnnnnnnnnnnnnnnnnnnnnnnnnnnnnnnnnnnnnnnnnnnnnnnnnnnnnnnnnnnnnnnnnnnnnnnnnnnnnnnnnnnnnnnnnnnnnnnnnnnnnnnnnnnnnnnnnnnnnnnnnnnnnnnnnnnnnnnnnnnnnnnnnnnnnnnnnnnnnnnnnnntgtgatggccagtgtgacttcctccacaaggcccacttccactgcgtggtggaggaatgcggcgcactcttcagcaccttggacggggccatcaagcacgcaa

SEQ ID NO: 30701 - DNA, 797 bp, Macaca Mulatta
  misc_feature (1)...(797): n = A,T,C or G
ggtattgatatatcatttcatgaggcatattttgttagaaattgtgtttttggtgctaacctacaagcacagtagtgaatatgaatgaagagcaggtgctgcaagttaatcctacattgtgccaatgtataatagtaccatgtatatggatatgaataaatgaacatgaggattaacatattgttgaaaatagactgaggtactagttttctttcttttttagaggggacatgatattaaacatagttttaagtaacaaattacttattaaaagttataacatgtggaatcaatactgtttgttcattaatttattcattcagcaaacatttgttgaacatttaatgtgtacccgatattgccaggatgaggaaataaagaaataaaagacattcagcctgcaattgctagaagaggccaaaagaggctgtgaagggataaacacttctgagagtgggtggtagtacaactgagtattcaagactgaatgttaggcaggtagacagtgactggttaggctgagaaacccataaataccttccttgagttctgcttccactattacttacttttcaatggatgttaatgttccaaatttcatccttattaacaaaaattggaaaaaaggacgttggaaagtaggggtttaaggggctccccaaaggtagattttatggannnnnnnnnnnnnnnnnnnnnccggtttttgggaaaaagagttccgtgaaccccttttacattaaatttaaccggttacaagtttttcacataaattcactttaaaatttgtacaagcg

SEQ ID NO: 30702 - DNA, 1090 bp, Macaca Mulatta
ctgctgggtagatgcacccccgagacagcccaggtgtctccagaggcagacagccccgtctcaggcttcagggaccctgcctcttccctcctgacaagggccgtggatggcagcccggtctggccctgatgggattgttggaggcctcctggaatcagctctaagggggtgtcggctctcctgggggatctaagcccccatccccctgcatgttctctggtaggaggcagagaagagaccccaggtgcctggggaggcgtgctagctgctaggtggtcctcgggaattccaggccgggttttccagggaggactggttgccaagcgcggtcgctgttgactagacagagtcggctcgggggtcctctgtgggggcttgccctgtcgtggcctgtctgccacgcaccacccctttcaccgttggtgggggccttgaggggaggacccagtcggcgggagctggctcagaacttcggccgaaggtgaatggagttttttgggagcagcacctcctgccccgaggctgaccggcactggcagtactttgctgttgaagaagtcttctggcctgtggtttcaaagtgtaagcacctcagcgacccaccctgtcctgtctaagcatcgagaggcatgtttagttgtgaatatgagaccgtgagattctcgatgagaggaaagtgctgtcccccacggccttgcagagtggcctcgagtacagcggctgtcaagagcagacagtggtctggcctgctgggcacctggcctgggccctggccttccagcgggctgcctgctggccccagtgtagggccttaggagaagcttaggccttcttcttcctcacagttccccagtttgagccatcaaaggccttcctcctgcccaccttcccgtctcagccacagccattcccaagcacgagggtggctcctggtgccagtgacctgccaggaggcctcttgtgatcataaaagcattcagttggctgggcgtggtggctcacgcctataatcccagcactttgggaggccaaggtaggcggatcatctgaggtcaggagtttgagaccagcctggccaacatggtgaaac

SEQ ID NO: 30703 - DNA, 473 bp, Macaca Mulatta
tcaccaatccttggaaattacgacctgaaaatggctgaaggagggggctaagagaggagcaagcaggaggtctcttgggccaaaaatcttttataccaaaaataaatctaagtctgatttagttttatcagctagggtcaaagacattcttttctcaaggcaatcttatagcacggaacactgctggggtaagagacgatttctgcccacagcctgtgaccaatcatcttgacactgttaaatcaacagtgtaattcatgatgtggctcacaggagatggggtgctcagattaacactctattttgggaagctttattattcaactcaatatatgctcattattttacatctttgtgttgtttaaatgctcaagcggtggggcaaaatccctggttgctccactttgattatggctctgcctgtctatagtccaagatgatggcactgttagttcttttagaaatgggtattc

SEQ ID NO: 30704 - DNA, 481 bp, Macaca Mulatta
  misc_feature (1)...(481): n = A,T,C or G
atgctgaagccgagcgtcacttcggctcccacggcagacatggcgacattgacagtggtccagccgctcaccctggacagannnnnnnnnnnnnnnnnnnnnnnnnnnnnnnnnnnnnnnnnnnnnnnnnnnnnnnnnnnnnnnnnnnnnnnnnnnnnnnnnnnnnnnnnnnnnnnnnnnnnnnnnnnnnnnnnnnnnnnnnnnnnnnnnnnnnnnnnnnnnnnnnnnnnnnnnnnnnnnnnnnnnnnnnnnnnnnnnnnnnnnnnnnnnggcaacagttgcagcttttgcagctagcgaaggccactcccaccctcgagtagttgaactgccaaagactgatgaaggccttggttttaacgtgatgggaggaaaagagcaaaattcccccatttatatctctcgcatcattcctggaggggtcgctgaaagacacggaggcctcaaaagaggagaccagctgctatcagtgaacggagtg

SEQ ID NO: 30705 - DNA, 654 bp, Macaca Mulatta
cagccccctctgcagtgcactgcaagccgatggtggtggacagccagctgtatgtggtcgtggcccagctgtttggtggctcttacatttaccactgggatcccaacaccacgcgcttcacaaagctgcaggatatcgacccacagcgcgtgcgcaagcctaatgacctagaagccttccgcatcgacggcgactggtactttgccgtggccgacagctccaaggcgggcgccaccagcctctaccgctggcaccagaatggcttctactcccaccaggcgctgcacccctggcaccgcgacaccgacctggagtttgtggatggcgagggcaagccacggctgattgtgtccagcagctcccaggcaccggtcatctatcagtggagtcgcacacagaagcagtttgtggcccagggtgaggtgactcaggtgcctgatgcccaagctgtgaaacactttcgtgccggccgcgacagttacctgtgcctcagccgttacattggtgactccaagatcctgcgctgggagggtacccgcttctcggaggtgcaggccctgccctcccggggttcgctggccctgcagcccttccttgtgggtggccgccgctacctggcgctgggcagcgatttctccttcacccagatctacc

SEQ ID NO: 30706 - DNA, 2807 bp, Macaca Mulatta
  misc_feature (1)...(2807): n = A,T,C or G
tggggactcgggagccactgtcgtcggatccgcccgtagtccgctgtcccgccgagcccggaggccgcctggatggagccgccgctcccggtcggagcccagccccttgccgnnnnnnnnnnnnnnnnnnnnnnnnnnnnnnnnnnnnnnnnnnnnnnnnnnnnnnnnnnnnnnnnnnnnnnnnnnnnnnnnnnnnnnnnnnnnnnnnnnnnnnnnnnnnnnnnnnnnnnnnnnnnnnnnnnnnnnnnnnnnnnnnnnnnnnnnnnnnnnnnnnnnnnnnnnnnnnnnnnnnnnnnnnnnnnnnnnnnnnnnnnnnnnnnnnnnnnnnnnnnnnnnnnnnnnnnnnnnnnnnnnnnnnnnnnnnnnnnnnnnnnnnnnnnnnnnnnnnnnnnnnnnnnnnnnnnnnnnnnnnnnnnnnnnnnnnnnnnnnnnnnnnnnnnnnnnnnnnnnnnnnnnnnnnnnnnnnnnnnnnnnnnnnnnnnnnnnnnnnnnnnnnnnnnnnnnnnnnnnnnnnnnnnnnnnnnnnnnnnnnnnnnnnnnnnnnnnnnnnnnnnnnnnnnnnnnnnnnnnnnnnnnnnnnnnnnnnnnnnnnnnnnnnnnnnnnnnnnnnnnnnnnnnnnnnnnnnnnnnnnnnnnnnnnnnnnnnnnnnnnnnnnnnnnnnnnnnnnnnnnnnnnnnnnnnnnnnnnnnnnnnnnnnnnnnnnnnnnnnnnnnnnnnnnnnnnnnnnnnnnnnnnnnnnnnnnnnnnnnnnnnnnnnnnnnnnnnnnnnnnnnnnnnnnnnnnnnnnnnnnnnnnnnnnnnnnnnnnnnnnnnnnnnnnnnnnnnnnnnnnnnnnnnnnnnnnnnnnnnnnnnnnnnnnnnnnnnnnnnnnnnnnnnnnnnnnnnnnnnnnnnnnnnnnnnnnnnnnnnnnnnnnnnnnnnnnnnnnnnnnnnnnnnnnnnnnnnnnnnnnnnnnnnnnnnnnnnnnnnnnnnnnnnnnnnnnnnnnnnnnnnnnnnnnnnnnnnnnnnnnnnnnnnnnnnnnnnnnnnnnnnnnnnnnnnnnnnnnnnnnnnnnnnnnnnnnnnnnnnnnnnnnnnnnnnnnnnnnnnnnnnnnnnnnnnnnnnnnnnnnnnnnnnnnnnnnnnnnnnnnnnnnnnnnnnnnnnnnnnnnnnnnnnnnnnnnnnnnnnnnnnnnnnnnnnnnnnnnnnnnnnnnnnnnnnnnnnnnnnnnnnnnnnnnnnnnnnnnnnnnnnnnnnnnnnnnnnnnnnnnnnnnnnnnnnnnnnnnnnnnnnnnnnnnnnnnnnnnnnnnnnnnnnnnnnnnnnnngttgtcatttggttgggagatttgaattatagactctgcatgcctgatgccaatgaggtgaaaagtcttattaataagaaagaccttcagagactcttgaaattcgaccannnnnnnnnnnnnnnnnnnnnnnnnnnnnnnnnnnnnnnnnnnnnnnnnnnnnnnnnnnnnnnnnnnnnnnnnnnnnnnnnnnnnnnnnnnnnnnnnnnnnnnnnnncagtgggaaatgccgggttccagcctggtgtgaccgaattctttggagaggaacaaatgttaatcagcttaattatcggagtcacatggaactgaaaaccagtgaccacaagcctgttagcgccctcttccatattggggnnnnnnnnnnnnnnnnnnnnnnnnnnnnnnnnnnnnnnnnnnnnnnnnnnnnnnnnnnnnnnnnnnnnnnnnnnnnnnnnnnnnnnnnnnnnnnnnnnnnnnnnnnnnnnnnnnnnnnnnnnnnnnnnnnnnnnnnnnnnnnnnnnnnnnnnnnnnnnnnnnnnnnnnnnnnnnnnnnnnnnnnnnnnnnnnnnnnnnnnnnnnnnnnnnnnnnnnnnnnnnnnnnnnnnnnnnnnnnnnnnnnnnnnnnnnnnnnnnnnnnnnnnnnnnnnnnnnnnnnnnnnnnnnnnnnnnnnnnnnnnnnnnnnnnnnnnnnnnnnnnnnnnnnnnnnnnnnnnnnnnnnnnnnnnnnnnnnnnnnnnnnnnnnnnnnnnnnnnnnnnnnnnnnnnnnnnnnnnnnnnnnnnnnnnnnnnnnnnnnnnnnnnnnnnnnnnnnnnnnnnnnnnnnnnnnnnnnnnnnnnnnnnnnnnnnnnnnnnnnnnnnnnnnnnnnnnnnnnnnnnnnnnnnnnnnnnnnnnnnnnnnnnnnnnnnnnnnnnnnnnnnnnnnnnnnnnnnnnnnnnnnnnnnnnnnnnnnnnnnnnnnnnnnnnnnnnnnnnnnnnnnnnnnnnnnnnnnnnnnnnnnnnnnnnnnnnnnnnnnnnnnnnnnnnnnnnnnnnnnnnnnnnnnnnnnnnnnnnnnnnnnnnnnnnnnnnnnnnnnnnnnnnnnnnnnnnnnnnnnnnnnnnnnnnnnnnnnnnnnnnnnnnnnnnnnnnnnnnnnnnnnnnnnnnnnnnnnnnnnnnnnnnnnnnnnnnnnnnnnnnnnnnnnnnnnnnnnnnnnnnnnnnnnnnnnnnnnnnnnnnnnnnnnnnnnnnnnnnnnnnnnnnnnnnnnnnnnnnnnnnnnnnnnnnnnnnnnnnnnnnnnnnnnnnnnnnnnnnnnnnnnnnnnnnnnnnnnnnnnnnnnnnnnnnnnntactctcttcactagtcttctcctgaggcctccacccaaccttatggcaagacagactccaagtgaccgccagcgtgctattcagttccttctgggctttctgcttgggagcgaagaagactaaggcttttactattctctgatattctaaaagcagacgatctcgggctccaagtatttcagaatgat

SEQ ID NO: 30707 - DNA, 618 bp, Macaca Mulatta
  misc_feature (1)...(618): n = A,T,C or G
ggtaccggtccggtttcccgggatgcagaggcccgtttctcgcggctccgggaccttgtggcgcatcaggacgcggctgtccctctgccgggacccacagccgccgccgccgctctgtctcctgcgtgttagcctcctctgcgcgctccgggcaggcggccgtgttatccgctggggcgaggacggcgcgcggctgctgctgctgcccccggcccgcgtggctggaaacggagaggccgagccaagcggcggcacctcttatgctgggaggatgctggagagcagcggctgcaaagcgctgaaggagggcgtgctggagaagcgcagcgacgggttgttgcagctctggaagaaaaagtgctgcatcctcaccgaggaggggctgctgctcatcccccccaagcagctgcaacnnnnnnnnnnnnnnnnnnnnnnnnnnnnnnnnnnnnnnnnnnnnnnnnnacagcccgggcaggggccggccgagccgtccctacccagtggccccgctgtcgncagcctcgagccgccggtcaagctcaaggaactgcacttctccaacatgaagaccgtggactgtgtagagcgcaagggcaagtacatgtacttcactgtggt

SEQ ID NO: 30708 - DNA, 1014 bp, Macaca Mulatta
  misc_feature (1)...(1014): n = A,T,C or G
ggatccatgaagaggagtcggcagttgtgtgcccagtgattgatgtgatcgactggaacaccttcgaatacctggggaactccggggagccccagatcggcggtttcgactggaggctggtgttcacgtggcacacggttcccgagcgggagaggannnnnnnnnnnnnnnnnnnnnnnnnnnnnnnnnnnnnnnnnnnnnnnnnnnnnnnnnnnnnnnnnnnnnnnnnnnnnnnnnnnnnnnnnnnnnnnnnnnnnnnnnnnnnnnnnnnnnnnnnnnnnnnnnnnnnnnnnnnnnnnnnnnnnnnnnnnnnnnnnnnnnnnnnnnnnnnnnnnnnnnnnnnnnnnnnnnnnnnnnnnnnnnnnnnnnnnnnnnnnnnnnnnnnnnnnnnnnnnnnnnnnnnnnnnnnnnnnnnnnnnnnnnnnnnnnnnnnnnnnnnnnnnnnnnnnnnnnnnnnnnnnnnnnnnnnnnnnnnnnnnnnnnnnnnnnnnnnnnnnnnnnnnnnnnnnnnnnnnnnnnnnnnnnnnnnnnnnnnnnnnnnnnnnnnnnnnnnnnnnnnnnnnnnnnnnnnnnnnnnnnnnnnnnnnnnnnnnnnnnnnnnnnnnnnnnnnnnnnnnnnnnnnnnnnnnnnnnnnnnnactgctttgactataaccctcctgatgaaaaccagatcgtgggacaccaggtcattctgtacgtctgtcatgggatgggccataatcagnnnnnnnnnnnnnnnnnnnnnnnnnnnnnnnnnnnnnnnnnnnnnnnnnnnnnnnnnnnnnnnnnnnnnnnnnnnnnnnnnnnnnnnnnnnnnnnnnnnnnnnnnnnnnnnnnnnnnnnnnnnnnnnnnnnnnnnnnnnnnnnnnggatggttctttatttcacgaacagtccaagaaatgtgtccaggctgcgaggaaggagtcgagtgacagttttgttccactcttacgagactgcaccaactcggatcatcagaaatggttcttcaaggagcgcatgttatga

SEQ ID NO: 30709 - DNA, 452 bp, Macaca Mulatta
  misc_feature (1)...(452): n = A,T,C or G
caggtgactatgatcagaggacatcatcaagcacacagataaaacacaggaatgcagttcaaggaagcaaatcctcattgtcaaccagttctccagagtctgcaagaaaacttcatcctcgaccaagtgataaactgaaccctaaaacaattannnnnnnnnnnnnnnnnnnnnnnnnnnnnnnnnnnnnnnnnnnnnnnnnnnnnnnnnnnnnnnnnnnnnnnnnnnnnnnnnnnnnnnnnnnnnnnnnnnnnnnnnnnnnnnnnnnnnnnnnnnnnnnnnnnnnnnnnnnnnnnnnnnnnnnnnnnnnnnnngggtttgagagaaaccaagcatccatacacctttgtgtcaaaggagggctttagagaattacttttggtcagaggtgcttctgaaaaagctgttcctttgctacctagactgattcctgtgctaaaggcagctctggt

SEQ ID NO: 30710 - DNA, 603 bp, Macaca Mulatta
  misc_feature (1)...(603): n = A,T,C or G
acagcactacctgacatgcttcagcggcacgatcgcggtgcccttcctgttggccgatgccatgtgtgtggggtatgaccagtgggccaccagccagctcattgggaccattttcttctgtgtgggaatcactactttgctacagacaacatttggatgcaggnnnggttacccctgtttcaggccagtgcttttgcatttttggcccctgctcgagccatcctgtctttagataaatggaaatgtaacaccacagnnnnnnnnnnnnnnnnnnnnnnnnnnnnnnnnnnnnnnnnnnnnnnnnnnnnnnnnnnnnnnnnnnnnnnnnnnnnnnnnnnnnnnnnnnnnnnnnnnnnnnnnnnnnnnnnnnnnnnnnnnnnnnnnnnnnnnnnnnnnnnnnnnnnnnnnnnnnnnnnnnnnnnnnnnnnnnnnnnnnnnnnnnnnnnnnnnnnnnnnnnnnnnnnnnnnnnnnnnnnnnnnnnnnnnnnnnnnnnnnnnnnnnnnnnnnnacaatattcctagtattactgttttctcaatatgccagaaatgttaaatttcctctcccgatttataaatctaagaaaggatggactgcgtaca

SEQ ID NO: 30711 - DNA, 704 bp, Macaca Mulatta
tcaactgggacaacaacacggacaggctggaggccatagagacccaggacccctccctgggctgcagcctcccactcaactgcactcctatcaagggcctgggcctccctggctgcatccctggcctcctccctgagaactccatggactgcatctaactgcaggaacccagtgtcccagcacaccaggaggggcaaccaggcctcccagcaagtcctgcagggcccatctagaggactttgggggccatcagctgcatccaggtctgtcaaactcagcccctaggaaagaacaggcctcgggactcctctagtcctggccagaaggatgatctcgcttttcctgtacaggcctataagaagcaggtacttcagttctaaattctttctgacttgtgttcttttcgtcttcataaattctacctaaggccattgtgccactgtgcacccctgagtaccactgacccaaagctttccgacagacctccctggcctgcctagaggctttcttggtcagtgcccgtcaaggctctggtcctgctgagccaaaggttctgtcattcctttctcttcccgtacactgagcagatccactccagctttctggtgtcacaggcaggaatcttggttagtaggtagacttagatcccatttctgtcctgctcccaggaagattcttaggtcctcttcaatccagcagcccct

SEQ ID NO: 30712 - DNA, 763 bp, Macaca Mulatta
  misc_feature (1)...(763): n = A,T,C or G
cgtattgccctntcctcacccagtatatcacttcctgttactgtattaacccttgttattaggaactctaagccatgccagaacaccgtccctccccttggaccatatagattctgccctgggtccctagccccttgcagtgataaataactccagctaaaagtgtttggtgttcttatctccatcctctttcctactttgcttaccctcatcctcagacagatgcctcttgcttctaaaagttggatttaacgacgtgttgtagggttcttggtctctgtgaaggtagagaccagagagaaggaagtgagcccactgctctcctgtggagcaatgtgggtgagtccaccagaggccctgctgtgtgtggccaataaattttagtcttccccagccctcgaggcagtgtgtgtggatgtatgcgtgtggatatttatatatgtaccctgcactcatgaatgtatgaactggaggaagttactacagtggaggggttcttaataacaaggtctacctagcatgaagtatttaacattctcccaccccttaaaaaatatacatttttataaaatgaaaaccataataaatgttttgaatattaaaaaaagaaataacctacagaggaaaattaatggagaaagctatttgccttgtactttttccacaactgttgctgctagttgtacacatctctagttcagctcttgcccacgggacactcatcacttaggctttattctcaattctctcctctaccccagaa

SEQ ID NO: 30713 - DNA, 2257 bp, Macaca Mulatta
  misc_feature (1)...(2257): n = A,T,C or G
ggaatataagcgcaaacaactggaagaacagagacaagcagaaagactgcagaggcagctaaagcaagaaagagactacttagtttcccttcagcatcagcggcaggagcagaggcctgtggagaagaagccactgtaccattacaaagaaggaatgagtcctagtgagaagccagcatgggccaaggaggtaannnnnnnnnnnnnnnnnnnnnnnnnnnnnnnnnnnnnnnnnnnnnnnnnnnnnnnnnnnnnnnnnnnnnnnnnnnnnnnnnnnnnnnnnnnnnnnnnnnnnnnnnnnnnnnnnnnnnnnnnnnnnnnnnnnnnnnnnnnnnnnnnnnnnnnnnnnnnnnnnnnnnnnnnnnnnnnnnnnnnnnnnnnnnnnnnnnnnnnnnnnnnnnnnnnnnnnnnnnnnnnnnnnnnnnnnnnnnnnnnnnnnnnnnnnnnnnnnnnnnnnnnnnnnnnnnnnnnnnnnnnnnnnnnnnnnnnnnnnnnnnnnnnnnnnnnnnnnnnnnnnnnnnnnnnnnnnnnnnnnnnnnnnnnnnnnnnnnnnnnnnnnnnnnnnnnnnnnnnnnnnnnnnnnnnnnnnnnnnnnnnnnnnnnnnnnnnnnnnnnnnnnnnnnnnnnnnnnnnnnnnnnnnnnnnnnnnnnnnnnnnnnnnnnnnnnnnnnnnnnnnnnnnnnnnnnnnnnnnnnnnnnnnnnnnnnnnnnnnnnnnnnnnnnnnnnnnnnnnnnnnnnnnnnnnnnnnnnnnnnnnnnnnnnnnnnnnnnnnnnnnnnnnnnnnnnnnnnnnnnnnnnnnnnnnnnnnnnnnnnnnnnnnnnnnnnnnnnnnnnnnnnnnnnnnnnnnnnnnnnnnnnnnnnnnnnnnnnnnnnnnnnnnnnnnnnnnnnnnnnnnnnnnnnnnnnnnnnnnnnnnnnnnnnnnnnnnnnnnnnnnnnnnnnnnnnnnnnnnnnnnnnnnnnnnnnnnnnnnnnnnnnnnnnnnnnnnnnnnnnnnnnnnnnnnnnnnnnnnnnnnnnnnnnnnnnnnnnnnnnnnnnnnnnnnnnnnnnnnnnnnnnnnnnnnnnnnnnnnnnnnnnnnnnnnnnnnnnnnnnnnnnnnnnnnnnnnnnnnnnnnnnnnnnnnnnnnnnnnnnnnnnnnnnnnnnnnnnnnnnnnnnnnnnnnnnnnnnnnnnnnnnnnnnnnnnnnnnnnnnnnnnnnnnnnnnnnnnnnnnnnnnnnnnnnnnnnnnnnnnnnnnnnnnnnnnnnnnnnnnnnnnnnnnnnnnnnnnnnnnnnnnnnnnnnnnnnnnnnnnnnnnnnnnnnnnnnnnnnnnnnnnnnnnnnnnnnnnnnnnnnnnnnnnnnnnnnnnnnnnnnnnnnnnnnnnnnnnnnnnnnnnnnnnnnnnnnnnnnnnnnnnnnnnnnnnnnnnnnnnnnnnnnnnnnnnnnnnnnnnnnnnnnnnnnnnnnnnnnnnnnnnnnnnnnnnnnnnnnnnnnnnnnnnnnnnnnnnnnnnnnnnnnnnnnnnnnnnnnnnnnnnnnnnnnnnnnnnnnnnnnnnnnnnnnnnnnnnnnnagctctgtttactagcgaacttcttaggcaagaacaggccaaactcaatgaagcaagaaaaatttccgtggtaaacgtaaacccaaccaacattcggcctcacagtgacacaccagaaatcagaaaatacaagaaacgattcaactcagaaatactttgtgcagctctgtggggtnnnnnnnnnnnnnnnnnnnnnnnnnnnnnnnnnnnnnnnnnnnnnnnaagtgggcaaggcaaagtctataatctgatcannnnnnnnnnnnnnnnnnnnnnnnnnnnnnnnnnnnnnnnnnnnnnnnnnnnnnnnnnnnnnnnnnnnnnnnnnnnnnnnnnnnnnnnnnnnnnnnnnnnnnnnnnnnnnnnnnnnnnnnnnnnnnnnnnnnnnnnnnnnnnnnnnnnnnnnnnnnnnnnnnnnnnnnnnnnnnnnnnnnnnnnnnnnnnnnnnnnnnnnnnnnnnnnnnnnnnnnnnnnnnnnnnnnnnnnnnnnnnnnnnnnnnnnnnnnnnnnnnnnnnnnnnnnnnnnnnnnnnnnnnnnnnnnnnnnnnnnaagtcttttgcagatctccagcacaagcctctgctagttgatctcacggtagaagaaggtcaaagattaaaggttatttttggttcacacactggtttccatgtaattgatgttgattcaggaaactcttatgatatctacataccatctcat

SEQ ID NO: 30714 - DNA, 281 bp, Macaca Mulatta
acagcgagccgacgggtcacgccaggggccagcacacactggtacccgttgcccggagcggggccatgtgaacagtgatgaacattgaaaatgcctctcagagagggattcacatggactttgtgtgagacttatttatatctttaatataaaggattgataaacaacttagggataaaaaagagggggttttctaacgtgaggatgaagtctacacttcagattaaaaagggatatgttgtatcctggtgtcttgtgggggctcgagacctgcctgcctg

SEQ ID NO: 30715 - DNA, 134 bp, Macaca Mulatta
aggttttcaacacatactccaatgaagactatgacaggagaaatgatgaagttgaccctgtggctgcttcagctgagtatgaacttgaaaaacgtgtagaaaagctggaacttttcccagtggaactagagaaa

SEQ ID NO: 30716 - DNA, 1442 bp, Macaca Mulatta
  misc_feature (1)...(1442): n = A,T,C or G
agtagggtccacgaggaagtcaggatccactggcaatgtttgcagtgttgtgtntaatgtggcaactggttgcgtgatgatagagaagtaaacagcatgtctggtggcagtcgggttaccacatagaatntaggacgcccagtgaaatgtgaatgctaggtcagtgacataactttttgatataagtatatcccaggcaacatttatttattggaaattgnnnnnnnnnnnnnnnnnnnnnnnnnnnnnnnnnnnnnnnnnnnnnnnnnnnnnnnnnnnnnnnnnnnnnnnnnnnnnnnnnnnnnnnnnnnnnnnnnnnnnnnnnnnnnnnnnnnnnnnnnnnnnnnnnnnnnnnnnnnnngagacaaagggaggtgggggtgctgccagggagggagagccaaggtccacttccacgcccctcccagaactggagccagaggcccgcttgttgggggcctggggctcagaggggagcgagcggctgctgtcatgctgtctgcaaatgctgtccagcttcccccactttctcttgcttggcaggtcacctggtccacacnnnnnnnnnnnnnnnnnnnnnnnnnnnnnnnnnnnnnnnnnnnnnnnnnnnnnctgggtgagcctggatgccagcaccctgtttcgcccgcccagcatgcagaaccaaagcgcaatgctcagaaacaccgccagtgtgcacagggcagcaggctggcttcnnnnnnnnnnnnnnnnnnnnnnnnnnnnnnnnnnnnnnnnnnnnnnnnnnnnnnnnnnnnttctattagaaactgtgagtgttagggttcaattgtgtccccccaaaacaggtatattggggtcctcatccccagtcccctagaatgtgactgtgcttagagattagacctttacagagttatctgattaaaatgaggtcatcagcagggaccctagtgcagtatgactggtgccctttcaaaaaggagaaacttggatacagacacagacacacacggagggaaggtggagtaaaggggcagggagaagatggcttgcgatgggagtgacgccgttacaggccgaaagacgcctggcagtgccagcagacaccaggagcggggagaggccaggaangcctggcagtgccagcagacaccaggagcggggagaggccaggaacaattctccctggagacatccgggagacaccttggtttcaggattccatgatagcttccataactgccaaagaacacatttctgtgttttcagccacccagtctgtggtgtcttaagactgccaccctaggaaagtaaaacaaggagttaattcatgaacggtgggggaaatacgtatcctttgaaataccacctagaggaaggggtaatagtatacccgatcacggctccagtttatgaaatagtcactcggaactttgaaaaacaatatattttcagga

SEQ ID NO: 30717 - DNA, 654 bp, Macaca Mulatta
cttgaatatggatgacacagtgaatcagagtaatattgaattaaaaaatgttaatcgaagcaatgcagtaaatcaagagaacagccgttcaagtagcactgaagccacaaacaataaccatgcaaatgggactcagaataagccacgacaaccaagaggtgcagcagatgcctgcaccactgaaaaaagcaataaatcttctcttcacccaaaccgtcatggccattcatcttctgacccagtgtatccttgtggaatttgtacaaacgaggtgaatgatgatcaggatgccatcttatgtgaggcctcttgtcagaaatggtttcatcggatctgtactggaatgactgaaacagcttatggcctcttaactgcagaagcatctgcagtatggggctgtgatacctgtatggctgacaaagatgtccagttaatgcgtactagagaaactttcggtccatctgcagtgggcagtgatgcttaatcacaggcattaactaaagtgggtttattttcctgtgtattgcgaaagttcattgacacaggattttaatgttttacattatttttttaaatgcatacacgaaaacattatttacttagtttttattaataattcactcatactagagcaaattttttattggctttgct

SEQ ID NO: 30718 - DNA, 545 bp, Macaca Mulatta
  misc_feature (1)...(545): n = A,T,C or G
aatgcatcttgtcgggcatcatgtctgtgaacgggaagaaggtgctgcacatggaccggaacccctactacgggggcgagagctcctccatcacacccctggaggagnagctgtataagcgttttcagttgctggaggggccccctgagtccatgggccgaggccgagactggaacgttgacctgattcccaaattcctcatggctaacggnggcagctggtaaagatgctactgtatacagaagtgactcgctacctggacttcaannnnnnnnnnnnnnnnnnnnnnnnnnnnnnnnnnnnnnnnnnnnnnnnnnnnnnnnnnnnnnnnnnnnnnnnnnnnnnnnatctgatgggtatgtttgagaaacggcgcttccgcaagttcctggtgtttgtggcaaacttcgatgagaatgaccccaagacctttgagggtgttgacccccagactaccagcatgcgtgatgtctaccggaagtttgatctgggccaggatgtcatcgatttcactggccacgccctggcactctaccgcactgatg

SEQ ID NO: 30719 - DNA, 2669 bp, Macaca Mulatta
  misc_feature (1)...(2669): n = A,T,C or G
cgcggcaaggatggagctgggttgctggacgcagttggggctcacttttcttcagctccttctcatctcgtccttgccaagannnnnnnnnnnnnnnnnnnnnnnnnnnnnnnnnnnnnnnnnnnnnnnnnnnnnnnnnnnnnnnnnnnnnnnnnnnnnnnnnnnnnnnnnnnnnnnnnnnnnnnnnnnnnnnnnnnnnnnnnnnnnnnnnnnnnnnnnnnnnnnnnnnnnnnnnnnnnnnnnnnnnnnnnnnnnnnnnnnnnnnnnnnnnnnnnnnnnnnnnnnnnnnnnnnnnnnnnnnnnnnnnnnnnnnnnnnnnnnnnnnnnnnnnnnnnnnnnnnnnnnnnnnnnnnnnnnnnnnnnnnnnnnnnnnnnnnnnnnnnnnnnnatgcggccaggttctgcgagccccaaagggtcagattttgttggaaagctatcccctaaatgctcactgcgaatggaccattcatactaaacctgggttcatcatccaactaagnnnnnnnnnnnnnnnnnnnnnnnnnnnnnnnnnnnnnnnnnnnnnnnnnnnnnnnnnnnnnnnnnnnnnnnnnnnnnnnnnnnnnnnnnnnnnnnnnnnnnnnnnnnnnnnnnnnnnnnnnnnnnnnnnnnnnnnnnnnnnnnnnnnnnnnnnnnnnnnnnnnnnnnnnnnnnnnnnnnnnnnnnnnnnnnnnnnnnnnnnnnnnnnnnnnnnnnnnnnnnnnnnnnnnnnnnnnnnnnnnnnnnnnnnnnnnnnnnnnnnnnnnnnnnnnnnnnnnnnnnnnnnnnnnnnnnnnnnnnnnnnnnnnnnnnnnnnnnnnnnnnnnnnnnnnnnnnnnnnnnnnnnnnnnnnnnnnnnnnnnnnnnnnnnnnnnnnnnnnnnnnnnnnnnnnnnnnnnnnnnnnnnnnnnnnnnnnnnnnnnnnnnnnnnnnnnnnnnnnnnnnnnnnnnnnnnnnnnnnnnnnnnnnnnnnnnnnnnnnnnnnnnnnnnnnnnnnnnnnnnnnnnnnnnnnnnnnnnnnnnnnnnnnnnnnnnnnnnnnnnnnnnnnnnnnnnnnnnnnnnnnnnnnnnnnnnnnnnnnnnnnnnnnnagcctgccgagaaccaaagatttcagacctggtgagaaggagagttcttccaatgcaggttcagtcaagnnnnnnnnnnnnnnnnnnnnnnnnnnnnnnnnnnnnnnnnnnnnnnnnnnnnnnnnnnnnnnnnnnnnnnnnnnnnnnnnnnnnnnnnnnnnnnnnnnnnnnnnnnnnnnnnnnnnnnnnnnnnnnnnnnnnnnnnnnnnnnnnnnnnnnnnnnnnnnnnnnnnnnnnnnnnnnnnnnnnnnnnnnnnnnnnnnnnnnnnnnnnnnnnnnnnnnnnnnnnnnnnnnnnnnnnnnnnnnnnnnnnnnnnnnnnnnnnnnnnnnnnnnnnnnnnnnnnnnnnnnnnnnnnnnnnnnnnnnnnnnnnnnnnnnnnnnnnnnnnnnnnnnnnnnnnnnnnnnnnnnnnnnnnnnnnnnnnnnnnnnnnnnnnnnnnnnnnnnnnnnnnnnnnnnnnnnnnnnnnnnnnnnnnnnnnnnnnnnnnnnnnnnnnnnnnnnnnnnnnnnnnnnnnnnnnnnnnnnnnnnnnnnnnnnnnnnnnnnnnnnnnnnnnnnnnnnnnnnnnnnnnnnnnnnnnnnnnnnnnnnnnnnnnnnnnnnnnnnnnnnnnnnnnnnnnnnnnnnnnnnnnnnnnnnnnnnnnnnnnnnnnnnnnnnnnnnnnnnnnnnnnnnnnnnnnnnnnnnnnnnnnnnnnnnnnnnnnnnnnnnnnnnnnnnnnnnnnnnnnnnnnnnnnnnnnnnnnnnnnnnnnnnnnnnnnnnnnnnnnnnnnnnnnnnnnnnnnnnnnnnnnnnnnnnnnnnnnnnnnnnnnnnnnnnnnnnnnngggtggtcagcgtggtggactcgctgttgtgtgaggagcagcatgaggaccatggcatcccagtgagtgtcactgataacatgttctgtgccagccaggaccccactgccccttctgatatatgcactgcagagacaggaggcatcgcagctgtgtccttcccgggacgagcatctcctgagccacgctggcatctgatgggactggtcagctggagctatgataaaacatgcagccacaggctctccactgccttcaccaaggtgctgccttttaaagactggattgaaagaaacatgaaatgaaccaggctcatgcactccttgagaagtgtttctgtatatccatctatacatgtgtcattgcgtgaagcagtgtgggcctgaagtgtgattttgtctgtgaacttggctgtgccagggtttctgacttcagggacaaaactcagtgaagggtgagtagacctccattgctggtaggctgatgccacctccactactaggacagtcaattggaagatgccagggcttgcaagaagtaagtttcttcaaagaagaccatatacaaaacctctccactccactgacctggtggcctttcccacctttcagtgtcacgaatgccatcagcttgaccagggaagatctgggcttcatgagaccccttttgaggctctcaagttctagagagctgcccgtgggacagcccagagcagcagaactgggatgtggtgcatgcctttgtgtacatggc

SEQ ID NO: 30720 - DNA, 869 bp, Macaca Mulatta
ttttttgttgcaccaccccttagttgtaagtcataactaagaacactatagcagtgctggagatgcaaagacgtccctgcccttaaggggcttacaatcttactggagaatataacaggcacataagaagctggactacaatgaagcatgagctaacaaatgccagactttggaaggcagcgtagtttgagaacatgggattcagagtcacaaaacccacatcctagtcccaacccagtacatcagtgaacctctctgggttttttcccagctacaacattaaatagttaagactgagaggctgtctgcatgtttccatggtgattcagatcaaaagctgagatgagctttatggagtaggtggcacctgagcgggacactgaaggaaggcaaaggaggtgtttcagacaaggaaagcagtactgaggtagctgtaagcttggagtttggaggggagatgacagacaagtgtcacaaggagtaatggcagagaggtgggtgggtggcaggaagtaccaccacacttcccacacaggggtgagcggcgtgcctcacatttacatccgatcatttacagtacataattccagagagtagaaaataccagaggacaatggcggcattttatcaaacatttcacttgatttccataaagtataaaataatttaacattatacctctacatttcaaaattcacatcaataaaccatcctgtcaaactgtaaaccaattccaagtttacatccttagtaaacctaactaaatctcttaatccaaaggactttgatacaagtcaattctccaataatccaacattcatttcaccaagtccagcatgtaaaataaatgctttacagtcctgccttaa

SEQ ID NO: 30721 - DNA, 522 bp, Macaca Mulatta
  misc_feature (1)...(522): n = A,T,C or G
ttggggccaaaaaaggaagtttgggagctcagaaactggcaaatacatgctttaatgaaattgaaaaacaagctcaagctgcggataaaatgaaggagcaggaagacctggccnnnnnnnnnnnnnnnnnnnnnnnnnnnnnnnnnnnnnnnnnnnnnnnnnnnnnnnnnnnnnnnnnnnnnnnnnnnnnnnnnnnnnnnnnnnnnnnnnnnnnnnnnnnnnnnnnnnnnnnnnnnnnnnnnnnnnnnnnnnnnnnnnnnnnnnnnnnnnnnnnnnnnnnnnnnnnnnnnnnnnnnnnnnnnnnnnnnnnnnnnnnnnnnnnnnnnnnnnnnnnnnnnnnnnnnnnnnnnnnnnnnnnnnnnnnnnnnnnnnnnnnnnnnnnnnnnnnnnnntactttgacgaggcagtggagttaaggagcagttctttctctagctgggatgacagttcagattcctactggaaaaaagagaccagcaaagatactgaaaccattctgaaaaccacaggctattcagaca

SEQ ID NO: 30722 - DNA, 132 bp, Macaca Mulatta
  misc_feature (1)...(132): n = A,T,C or G
gtgccgcttntgacacaaaaacggggttacgtgtggcagtgaagaagctctccagaccatttcagtccatcattcatgccaaaagaacctacagagaactgcggttacttaaacatatgaaacatgaaaatg

SEQ ID NO: 30723 - DNA, 653 bp, Macaca Mulatta
gctgatcatttcgtggaatgccctttggagataaatcatcagcaagcagaggttactggccccaggcaacagctgccttccctcccttgagtgtccctgcccacagacccctccctgagtctctctgtgtccacaggggatgaggagctactgcgcttctccaactgacaactggccggtctgcaagtcagaggatggccagtgtctgtccaggggtcctgtagcaggcagcgccaagcaacctgggttcaaataaaaactaaattgtgaactcctgaaattctgtgtcctcattgttcatcgtcatcacaaatgtaacagggtggcggagggaagaaaaagccagggtggggccatatgcaaccccagctttccccagaagtgaaaactgcgttggaaacataatagaactatcttcagtacgtgacactggctatgcaaattatgaaacaaatcacagttctatttacaatagtgtaaaatgggattattttgttttgttttaataaggctaggaaagaaaggaggacgaagctctggggacttgtttctgggagaggtttgatgggtcatcagtgacccaggctcagaagaaataattgtgccctgctgtgcccagggagctcagggcagacagcccacaaatgcctgaa

SEQ ID NO: 30724 - DNA, 4004 bp, Macaca Mulatta
  misc_feature (1)...(4004): n = A,T,C or G
cgatcaagataagaccaggcctctgtccaccctggccaatttgtacatgatcatcacagacgtccaggacatggaccnnnnnnnnnnnnnnnnnnnnnnnnnnnnnnnnnnnnnnnnnnnnnnnnnnnnnnnnnnnnnnnnnnnnnnnnnnnnnnnnnnnnnnnnnnnnnnnnnnnnnnnnnnnnnnnnnnnnnnnnnnnnnnnnnnnnnnnnnnnnnnnnnnnnnnnnnnnnnnnnnnnnnnnnnnnnnnnnnnnnnnnnnnnnnnnnnnnnnnnnnnnnnnnnnnnnnnnnnnnnnnnnnnnnnnnnnnnnnnnnnnnnnnnnnnnnnnnnnnnnnnnnnnnnnnnnnnnnnnnnnnnnnnnnnnnnnnnnnnnnnnnnnnnnnnnnnnnnnnnnnnnnnnnnnnnnnnnnnnnnnnnnnnnnnnnnnnnnnnnnnnnnnnnnnnnnnnnnnnnnnnnnnnnnnnnnnnnnnnnnnnnnnnnnnnnnnnnnnnnnnnnnnnnnnnncagggcctgaacagcatgtttgaggtgtatctggtggggaacaactcccaccacttcatcatctccccgacctccgtccaagggaaggcggacattcgtattcgggtggccatcccactggactacgagaccgtggaccgctacgactnnnnnnnnnnnnnnnnnnnnnnnnnnnnnnnnnnnnnnnnnnnnnnnnnnnnnnnnnnnnnnnnnnnnnnnnnnnnnnnnnnnnnnnnnnnnnnnnnnnnnnnnnnnnnnnnnnnnnnnnnnnnnnnnnnnnnnnnnnnnnnnnnnnnnnnnnnnnnnnnnnnnnnnnnnnnnnnnnnnnnnnnnnnnnnnnnnnnnnnnnnnnnnnnnnnnnnnnnnnnnnnnnnnnnnnnnnnnnnnnnnnnnnnnnnnnnnnnnnnnnnnnnnnnnnnnnnnnnnnnnnnnnnnnnnnnnnnnnnnnnnnnnnnnnnnnnnnnnnnnnnnnnnnnnnnnnnnnnnnnnnnnnnnnnnnnnnnnnnnnnnnnnnnnnnnnnnnnnnnnnnnnnnnnnnnnnnnnnnnnnnnnnnnnnnnnnnnnnnnnnnnnnnnnnnnnnnnnnnnnnnnnnnnnnnnnnnnnnnnnnnnnnnnnnnnnnnnnnnnnnnnnnnnnnnnnnnnnnnnnnnnnnnnnnnnnnnnnnnnnnnnnnnnnnnnnnnnnnnnnnnnnnnnnnnnnnnnnnnnnnnnnnnnnnnnnnnnnnnnnnnnnnnnnnnnnnnnnnnnnnnnnnnnnnnnnnnnnnnnnnnnnnnnnnnnnnnnnnnnnnnnnnnnnnnnnnnnnnnnnnnnnnnnnnnnnnnnnnnnnnnnnnnnnnnnnnnnnnnnnnnnnnnnnnnnnnnnnnnnnnnnnnnnnnnnnnnnnnnnnnnnnnnnnnnnnnnnnnnnnnnnnnnnnnnnnnnnnnnnnnnnnnnnnnnnnnnnnnnnnnnnnnnnnnnnnnnnnnnnnnnnnnnnnnnnnnnnnnnnnnnnnnnnnnnnnnnnnnnnnnnnnnnnnnnnnnnnnnnnnnnnnnnnnnnnnnnnnnnnnnnnnnnnnnnnnnnnnnnnnnnnnnnnnnnnnnnnnnnnnnnnnnnnnnnnnnnnnnnnnnnnnnnnnnnnnnnnnnnnnnnnnnnnnnnnnnnnnnnnnnnnnnnnnnnnnnnnnnnnnnnnnnnnnnnnnnnnnnnnnnnnnnnnnnnnnnnnnnnnnnnnnnnnnnnnnnnnnnnnnnnnnnnnnnnnnnnnnnnnnnnnnnnnnnnnnnnnnnnnnnnnnnnnnnnnnnnnnnnnnnnnnnnnnnnnnnnnnnnnnnnnnnnnnnnnnnnnnnnnnnnnnnnnnnnnnnnnnnnnnnnnnnnnnnnnnnnnnnnnnnnnnnnnnnnnnnnnnnnnnnnnnnnnnnnnnnnnnnnnnnnnnnnnnnnnnnnnnnnnnnnnnnnnnnnnnnnnnnnnnnnnnnnnnnnnnnnnnnnnnnnnnnnnnnnnnnnnnnnnnnnnnnnnnnnnnnnnnnnnnnnnnnnnnnnnnnnnnnnnnnnnnnnnnnnnnnnnnnnnnnnnnnnnnnnnnnnnnnnnnnnnnnnnnnnnnnnnnnnnnnnnnnnnnnnnnnnnnnnnnnnnnnnnnnnnnnnnnnnnnnnnnnnnnnnnnnnnnnnnnnnnnnnnnnnnnnnnnnnnnnnnnnnnnnnnnnnnnnnnnnnnnnnnnnnnnnnnnnnnnnnnnnnnnnnnnnnnnnnnnnnnnnnnnnnnnnnnnnnnnnnnnnnnnnnnnnnnnnnnnnnnnnnnnnnnnnnnnnnnnnnnnnnnnnnnnnnnnnnnnnnnnnnnnnnnnnnnnnnnnnnnnnnnnnnnnnnnnnnnnnnnnnnnnnnnnnnnnnnnnnnnnnnnnnnnnnnnnnnnnnnnnnnnnnnnnnnnnnnnnnnnnnnnnnnnnnnnnnnnnnnnnnnnnnnnnnnnnnnnnnnnnnnnnnnnnnnnnnnnnnnnnnnnnnnnnnnnnnnnnnnnnnnnnnnnnnnnnnnnnnnnnnnnnnnnnnnnnnnnnnnnnnnnnnnnnnnnnnnnnnnnnnnnnnnnnnnnnnnnnnnnnnnnnnnnnnnnnnnnnnnnnnnnnnnnnnnnnnnnnnnnnnnnnnnnnnnnnnnnnnnnnnnnnnnnnnnnnnnnnnnnnnnnnnnnnnnnnnnnnnnnnnnnnnnnnnnnnnnnnnnnnnnnnnnnnnnnnnnnnnnnnnnnnnnnnnnnnnnnnnnnnnnnnnnnnnnnnnnnnnnnnnnnnnnnnnnnnnnnnnnnnnnnnnnnnnnnnnnnnnnnnnnnnnnnnnnnnnnnnnnnnnnnnnnnnnnnnnnnnnnnnnnnnnnnnnnnnnnnnnnnnnnnnnnnnnnnnnnnnnnnnnnnnnnnnnnnnnnnnnnnnnnnnnnnnnnnnnnnnnnnnnnnnnnnnnnnnnnnnnnnnnnnnnnnnnnnnnnnnnnnnnnnnnnnnnnnnnnnnnnnnnnnnnnnnnnnnnnnnnnnnnnnnnnnnnnnnnnnnnnnnnnnnnnnnnnnnnnnnnnnnnnnnnnnnnnnnnnnnnnnnnnnnnnnnnnnnnnnnnnnnnnnnnnnnnnnnnnnnnnnnnnnnnnnnnnnnnnnnnnnnnnnnnnnnnnnnnnnnnnnnnnnnnnnnnnnnnnnnnnnnnnnnnnnnnnnnnnnnnnnnnnnnnnnnnnnnnnnnnnnnnnnnnnnnnnnnnnnnnnnnnnnnnnnnnnnnnnnnnnnnnnnnnnnnnnnnnnnnnnnnnnnnnnnnnnnnnnnnnnnnnnnnnnnnnnnnnnnnnnnnnnnnnnnnnnnnnnnnnnnnnnnnnnnnnnnnnnnnnnnnnnnnnnnnnnnnnnnnnnnnnnnnnnnnnnnnnnnnnnnnnnnnnnnnnnnnnnnnnnnnnnnnnnnnnnnnnnnnnnnnnnnnnnnnnnnnnnnnnnnnnnnnnnnnnnnnnnnnnnnnnnnnnnnnnnnnnnnnnnnnnnnnnnnnnnnnnnnnnnnnnnnnnnnnnnnnnnnnnnnnnnnnnnnnnnnnnnnnnnnnnnnnnnnnnnnnnnnnnnnnnnnnnnnnnnnnnnnnnnnnnnnnnnnnnnnnnnnnnnnnnnnnnnnnnnnnnnnnnnnnnnnnnnnnnnnnnnnnnnnnnnnnnnnnnnnnnnnnnnnnnnnnnnnnnnnnnnnnnnnnnnnnnnnnnnnnnnnnnnnnnnnnnnnnnnnnnnnnnnnnnnnnnnnnnnnnnnnnnnnnnnnnnnnnnnnnnnnnnnnnnnnnnnnnnnnnnnnnnnnnnnnnnnnnnnnnnnnnnnnnnnnnnnnnnnnnnnnnnnnnnnnnnnnnnnnnnnnnnnnnnnnnnnnnnnnnnnnnnnnnnnnnnnnnnnnnncaggttgtggcttctgaccgaggcacccctccacggaagaaggaccacatcctgcaggtgaccatcctagatgtcaatgacaaccctccagtcatcgagagcccctttggatacaatgtcagtgtgaatga

SEQ ID NO: 30725 - DNA, 637 bp, Macaca Mulatta
cgggcaagggcctggtgggagggcttgggggtggtcctggcctcggtggagaggcccggctgggggtgcggagttaggggtgctcgcctgcagaaggcagtggcctgaagtgatccagtggtccggctcagtgcccatcccccagggaccccatagcggccttcccatccagttagcccagtggtgaggagcgggaagaacggggactcaaagcacagactggcgggagctgcgcggcgccgagactccgggccgctgggcggcgctgtgggccgggcggcggagcggtgactctaggccccggggagtgctgcggaacgggagtagggaagctgcgagggtgacaccggaagtggcgagcggcctgcgcgcggatggcggcggtggctatggctgtagctggcggcggaggggctggcgcggcccgctctctctcacgcttccgaggctgcctggctggcgcgctgctcggggactgcgtgggctccttctacgaggcccacgacaccgtcgagctgacgtcagtcctgcgtcatgtccagagcctggagccggaccccggcacgcccgggagtgagcggacaggagggcggggccgggcgcacgtcagaggccgtgctagtgggagaccgaaggg

SEQ ID NO: 30726 - DNA, 693 bp, Macaca Mulatta
ggatctgcagggaaccctcctctgctgctgccagtgcctggggatgggtgggagagctgttaaagttttgaggggttgttcatccccccgctcatggcgtttatcttccctttgccagactgatcagccacaccccgtcttactgtgatgagtcgctgtttggctcccgatctgagggcgccagcttcggggccccgcggatggcaaagggggatgccgcaaagctccgtgctctcttctggacaccaccagctacccccaggggtagccactcgccccgccccagggaggccccactgcgagccattcacccagctggtccctccaagacagagccgggggcggcggcagactcccagaagttatccatggatgggttacactcttcatgccccctgaggcggggactttcccattccctcacccacctgaatgtccccagcactggtcatccagccaccagtgcctcccacacaaatgggcctcaggatctcaggccttccacatcaggggtgaccttccggagccccctggtgacttccagggctcgctcagttagcatttcagtgccagctaccccacgacgagttggggccacccagaaagcaaagcccccttggaaatgatactctttcatcagggttgcctatggggccacagcgagaggtgtagccccttgccagggtaggagga

SEQ ID NO: 30727 - DNA, 750 bp, Macaca Mulatta
ggccaataccaaaggaatgggggtccttcgaggcagccagccagaagctgcagttatttttacccccacaagaaaattttcagattgcccaggtcaaggtggtccgccacagtgtcaatgataaagtcacagtaattggagctggagttactctccatgaagccttagcagctgctgaccatctttctcaacaaggtatttctgtccgtgtcatcgacccatttaccattaaacccctggatgccgccaccatcatctccagtgcaaaagccacaggcggccgagttatcacagtggaggatcactacagggaaggtggcattggagaagctgtttgtgcagctgtctccagggagcctgatatccttgttcatcagctggcagtgtcaggagtgcctcaacatgggaaaactagtgaattgctggatatgtttggaatcagtaccagacacattatagcagccgtaacacttattttaatgaagtaaactaagcttatttctaaaaagtcaagtctattggctttggtccaaaagcactggtatctttgtattaaattcatgcttattgttacaaaaccattatttatacctatacagttgtactgtttcttttaaagcaaagccatttaatatttttcttcattcctaatttggaaattaaagtttacctttctgttaatctatgtataaatgttactctgagttattaatgtggattttaaaattgtaagcaatagaatagaaaata

SEQ ID NO: 30728 - DNA, 818 bp, Macaca Mulatta
cgtctggttagctacaatcctaggtactttttatttctcaagatagccaatttttctaactctatttttctctacctaaagtggagagttaaaaaggtggttttagtgctgcttcttgtgactttgggcctcttgtttttaaatattttactgataaacattcatataaatgccagtatcaatggatacagaggaaacatgacttgcagttccgcttcatgcaactttatacgattttccagggctattgcattaaccagcactgtgttcgttttaattccctttactttgtccctggcaacttctcttctgctcagcttctccctgtggaaacatcacaagaagatgcagcacactgtcaaaggatacagagacgtcagcaccaaggcccacagaggagttatgcaaactgtgatcactttcctcctactctatgccattttccttctgacttttttcataccaatttgggcctctgtacggttgaaggaaaatcaaattattattctttctgagatgatgggactggcttatccttcaggtcactcatgtgttctgattcttggaaacaagaagctgagacaggcctctctgtcagtgctatggtggctgaggtacaggtttaaagatggggagccctcaggtcacaaagaatttagggaatcatcttgaatatgttagaaaaaaatagttcataagaaattcttgtatgttatgtaaatttatacttcctcaagattctttcattgtgtataacgttgtgaattttacaaaggtatgtttggaatcaacaccaaccgaacatatcacaaattagg

SEQ ID NO: 30729 - DNA, 319 bp, Macaca Mulatta
  misc_feature (1)...(319): n = A,T,C or G
agcgggtcatgaatcattggcaggaagacctgatgtttggctaccagttcctgaatggctgcaaccctgtgttgatccggcgctgcacagagctgccggagaagttcccggtgaccacggagatggtggagtgcagcctggagcgacagctcagcttggagcaggaggtccagnnnnnnnnnnnnnnnnnnnnnnnnnnnnnnnnntggatggcatctatgccaacaaaacagacccctgcacactccagttcctggccgctcccatctgcttgctgtataagaacctggccaacaagatcgtccccattgccatccag

SEQ ID NO: 30730 - DNA, 261 bp, Macaca Mulatta
  misc_feature (1)...(261): n = A,T,C or G
gttatttatgattccatctgatatacataggagagaaagtgatagaagaattctgatggcaactgtatgatagaagctatataaagtcaagtgtccattttctttcaactatatttgagcatacccaggnnnnnnnnnnnnnnnnnnnnnnnnnnnnnnnnnnnnnnnnnnnnnnnnnnnnnnnnnnnnnnnnnnnnngacaaaacatggatgcatacacctgaagctttatctaaacatttcattccctataatgcaaag

SEQ ID NO: 30731 - DNA, 451 bp, Macaca Mulatta
ttttgatatgttacccaggctggtctcaaacttctgggctcaagtgatctttccacctcggcctcccaaagtgctgggattacaggtgtgagccagcgtgcccagccattttgcacatttgttgctttatgttggtgattttggtttttgaaatggctccgtggtgtagtgcagtctagtgttcctgggcgcaagaaggttatgacgtgcagagagaatccccgcactagagaagcacaagctcaggcatgagttaatgtgctgttggccacgagttcaataggaatgaatcaacagtatatattaaatagagtcttttaagcacaaacagacataaaatagagttatgtattgattggttgacaaaaatgtcatgtccagagactggcaggaacctaaccctgcgttaaccctgtgagcagtggttcagcgttcactaattcagtgttct

SEQ ID NO: 30732 - DNA, 271 bp, Macaca Mulatta
gacccctgttcattccttaagtgtaaagatgatgaccttttgcctggcgcctgtccttttggggcctggggtggctgggagggaggattgggagggaccctggtgctgttttggctgcccagggtggcacccataaagaggacctctccagcttggtgagagtcagtcggggtgaggacctagagtgtgagggaccacaagtagatattctgatggtgaggtccctttggggaccacccccacgttagggttagaataggggatggtagga

SEQ ID NO: 30733 - DNA, 72 bp, Macaca Mulatta
tgtgcgacaaggagttcatgtgggccctgaaaaacggagacttggatgaggtgaaagactatgtggcgaagg

SEQ ID NO: 30734 - DNA, 1019 bp, Macaca Mulatta
gatgtccttactacaccctgtaattcaaagttgccaaacagcttggccagtgcctgagctacttggaagataaagacctggtccatggagaatgtgtgtactaaaaacctcctcctggcccgtgagggcatcgacagcgagtgtggtccattcatcaagctcagtgaccctggcatccccattacggtgctgtctaggcaagagtgcattgaacgaatcccgtggattgctcccgagtgtgttgaggactccaagaacctgagtgtggctgctgacaagtggagctttggaactacgctctgggaaatctgctacaatggcgagatccccttgaaagacaagacactgattgagaaagagagattctatgaaagccggtgcaggccagtgacaccatcatgtaaggagctggctgacctcatgacccgctgcatgaactacgaccccaatcagaggcccttcttccgagccatcatgagagacattaataagcttgaagagcagaatccagatattgtttcagaaaaaaagccagcaactgaagtggaccccacgcattttgagaagcgcttcctaaagaggatccgtgacttgggagagggccactttgggaaggttgagctctgcaggtatgaccccgaaggggacaatacaggggagcaggtggctgtcaaatctctgaagcctgagagtggaggtaaccacatagctgatctgaaaaaggaaatcgagatcttaaggaacctctatcatgagaacattgtgaagtacaaaggaatctgcacggaagacggaggaaatggtattaagctcatcatggaatttctgccttcgggaagccttaaggagtatcttccaaagaataagaacaaaattaacctcaaacagcagctaaaatatgccgttcagatttgtaaggggatggactatttgggttctcggcaatatgttcaccgtgacttggcagcaagaaatgtccttgttgagagtgaacaccaagtgaaaattggagacttcgg

SEQ ID NO: 30735 - DNA, 6395 bp, Macaca Mulatta
  misc_feature (1)...(6395): n = A,T,C or G
ggatgtgatcaaccccctggatttcgaggatgtccagacgtgctcgttgagcatcaagtctcaggatgggggccggccgccgctcatcaattcttccggggtggtgtctgtgcaggtgatggatgtcagcgacaacgagcctatcttggtgagcagcccgttccaggccacggtgctggagaatgtgcccctgggcnnnnnnnnnnnnnnnnnnnnnnnnnnnnnnnnnnnnnnnnnnnnnnnnnnnnnnnnnnnnnnnnnnnnnnnnnnnnnnnnnnnnnnnnnnnnnnnnnnnnnnnnnnnnnnnnnnnnnnnnnnnnnnnnnnnnnnnnnnnnnnnnnnnnnnnnnnnnnnnnnnnnnnnnnnnnnnnnnnnnnnnnnnnnnnnnnnnnnnnnnnnnnnnnnnnnnnnnnnnnnnnnnnnnnnnnnnnnnnnnnnnnnnnnnnnnnnnnnnnnnnnnnnnnnnnnnnnnnnnnnnnnnnnnnnnnnnnnnnnnnnnnnnnnnnnnnnnnnnnnnnnnnnnnnnnnnnnnnnnnnnnnnnnnnnnnnnnnnnnnnnnnnnnnnnnnnnnnnnnnnnnnnnnnnnnnnnnnnnnnnnnnnnnnnnnnnnnnnnnnnnnnnnnnnnnnnnnnnnnnnnnnnnnnnnnnnnnnnnnnnnnnnnnnnnnnnnnnnnnnnnnnnnnnnnnnnnnnnnnnnnnnnnnnnnnnnnnnnnnnnnnnnnnnnnnnnnnnnnnnnnnnnnnnnnnnnnnnnnnnnnnnnnnnnnnnnnnnnnnnnnnnnnnnnnnnnnnnnnnnnnnnnnnnnnnnnnnnnnnnnnnnnnnnnnnnnnnnnnnnnnnnnnnnnnnnnnnnnnnnnnnnnnnnnnnnnnnnnnnnnnnnnnnnnnnnnnnnnnnnnnnnnnnnnnnnnnnnnnnnnnnnnnnnnnnnnnnnnnnnnnnnnnnnnnnnnnnnnnnnnnnnnnnnnnnnnnnnnnnnnnnnnnnnnnnnnnnnnnnnnnnnnnnnnnnnnnnnnnnnnnnnnnnnnnnnnnnnnnnnnnnnnnnnnnnnnnnnnnnnnnnnnnnnnnnnnnnnnnnnnnnnnnnnnnnnnnnnnnnnnnnnnnnnnnnnnnnnnnnnnnnnnnnnnnnnnnnnnnnnnnnnnnnnnnnnnnnnnnnnnnnnnnnnnnnnnnnnnnnnnnnnnnnnnnnnnnnnnnnnnnnnnnnnnnnnnnnnnnnnnnnnnnnnnnnnnnnnnnnnnnnnnnnnnnnnnnnnnnnnnnnnnnnnnnnnnnnnnnnnnnnnnnnnnnnnnnnnnnnnnnnnnnnnnnnnnnnnnnnnnnnnnnnnnnnnnnnnnnnnnnnnnnnnnnnnnnnnnnnnnnnnnnnnnnnnnnnnnnnnnnnnnnnnnnnnnnnnnnnnnnnnnnnnnnnnnnnnnnnnnnnnnnnnnnnnnnnnnnnnnnnnnnnnnnnnnnnnnnnnnnnnnnnnnnnnnnnnnnnnnnnnnnnnnnnnnnnnnnnnnnnnnnnnnnnnnnnnnnnnnnnnnnnnnnnnnnnnnnnnnnnnnnnnnnnnnnnnnnnnnnnnnnnnnnnnnnnnnnnnnnnnnnnnnnnnnnnnnnnnnnnnnnnnnnnnnnnnnnnnnnnnnnnnnnnnnnnnnnnnnnnnnnnnnnnnnnnnnnnnnnnnnnnnnnnnnnnnnnnnnnnnnnnnnnnnnnnnnnnnnnnnnnnnnnnnnnnnnnnnnnnnnnnnnnnnnnnnnnnnnnnnnnnnnnnnnnnnnnnnnnnnnnnnnnnnnnnnnnnnnnnnnnnnnnnnnnnnnnnnnnnnnnnnnnnnnnnnnnnnnnnnnnnnnnnnnnnnnnnnnnnnnnnnnnnnnnnnnnnnnnnnnnnnnnnnnnnnnnnnnnnnnnnnnnnnnnnnnnnnnnnnnnnnnnnnnnnnnnnnnnnnnnnnnnnnnnnnnnnnnnnnnnnnnnnnnnnnnnnnnnnnnnnnnnnnnnnnnnnnnnnnnnnnnnnnnnnnnnnnnngcatccacagcgttacggccttctgcaccctgcgtgtcaccatcatcacggacgacatgctgaccaacagcatcactgtccgcctggagaacatgtcccaggagaagttcctgtccccgctgctggccctctttgtagagggggtggccgcggtgctgtccaccaccaaggacgacgtcttcgtcttcaacgtccagaacgacaccgacgtcagttccaacatcctgaacgtgaccttctcggcgctgctgcccggcggcgtccgcggccagttcttcccgtcggaggacctgcaggagcagatctacctgaaccggacgctgctgaccaccatctccacgcagcgcgtgctgcccttcgacgacaacatctgcctgcgcgagccctgcgagaactacatgaagtgcgtgtccgtgctgcgcttcgacagctcggcgcccttcctcagctccaccaccgtgctcttccggcccatccaccccatcaacggcctgcgctgccgctgcccgcccggcttcaccggcgactactgcgagacggagatcgacctctgctactccaacccgtgcggcgccaacggccgctgccgcagccgtgagggcggctacacctgcgagtgcttccaggacttcactggnnnnactgtgaggtggatgcccactcagaccgctgtnnnnnnnnnnnnnnnnnnnnnnnnnnnnnnnnnnnnnnnnnnnnnnnnnnnnnnnnnnnnnnnnnnnnnnnnnnnnnnnnnnnnnnnnnnnnnnnnnnnnnnnnnnnnnnnnnnnnnnnnnnnnnnnnnnnnnnnnnnnnnnnnnnnnnnnnnnnnnnnnnnnnnnnnnnnnnnnnnnnnnnnnnnnnnnnnnnnnnnnnnnnnnnnnnnngctgctctaccacggccgcttcaatgaggagcatgacttcatcaccctggagattgtagacgagcaagtgcagctcaccttctctgcaggnnnnnnnnnnnnnnnnnnnnnnnnnnnnnnnnnnnnnnnnnnnnnnnnnnnnnnnnnnnnnnnnnnnnnnnnnnnnnnnnnnnnnnagcccaacatcggctacctgggcctgccccacaggccgtccagggagaagatggctgtgttgannnnnnnnnnnnnnnnnnnnnnnnnnnnnnnnnnnnnnnnnnnnnnnnnnnnnnnnnnnnnnnnnnnnnnnnnnnnnnnnnnnnnnnnnnnnnnnnnnnnnnnnnnnnnnnnnnnnnnnnnnnnnnnnnnnnnnnnnnnnnnnnnnnnnnnnnnnnnnnnnnnnnnnnnnnnnnnnnnnnnnnnnnnnnnnnnnnnnnnnnnnnnnnnnnnnnnnnnnnnnnnnnnnnnnnnnnnnnnnnnnnnnnnnnnnnnnnnnnnnnnnnnnnnnnnnnnnnnnnnnnnnnnnnnnnnnnnnnnnnnnnnnnnnnnnnnnnnnnnnnnnnnnnnnnnnnnnnnnnnnnnnnnnnnnnnnnnnnnnnnnnnnnnnnnnnnnnnnnnnnnnnnnnnnnnnnnnnnnnnnnnnnnnnnnnnnnnnnnnnnnnnnnnnnnnnnnnnnnnnnnnnnnnnnnnnnnnnnnnnnnnnnnnnnnnnnnnnnnnnnnnnnnnnnnnnnnnnnnnnnnnnnnnnnnnnnnnnnnnnnnnnnnnnnnnnnnnnnnnnnnnnnnnnnnnnnnnnnnnnnnnnnnnnnnnnnnnnnnnnnnnnnnnnnnnnnnnnnnnnnnnnnnnnnnnnnnnnnnnnnnnnnnnnnnnnnnnnnnnnnnnnnnnnnnnnnnnnnnnnnnnnnnnnnnnnnnnnnnnnnnnnnnnnnnnnnnnnnnnnnnnnnnnnnnnnnnnnnnnnnnnnnnnnnnnnnnnnnnnnnnnnnnnnnnnnnnnnnnnnnnnnnnnnnnnnnnnnnnnnnnnnnnnnnnnnnnnnnnnnnnnnnnnnnnnnnnnnnnnnnnnnnnnnnnnnnnnnnnnnnnnnnnnnnnnnnnnnnnnnnnnnnnnnnnnnnnnnnnnnnnnnnnnnnnnnnnnnnnnnnnnnnnnnnnnnnnnnnnnnnnnnnnnnnnnnnnnnnnnnnnnnnnnnnnnnnnnnnnnnnnnnnnnnnnnnnnnnnnnnnnnnnnnnnnnnnnnnnnnnnnnnnnnnnnnnnnnnnnnnnnnnnnnnnnnnnnnnnnnnnnnnnnnnnnnnnnnnnnnnnnnnnnnnnnnnnnnnnnnnnnnnnnnnnnnnnnnnnnnnnnnnnnnnnnnnnnnnnnnnnnnnnnnnnnnnnnnnnnnnnnnnnnnnnnnnnnnnnnnnnnnnnnnnnnnnnnnnnnnnnnnnnnnnnnnnnnnnnnnnnnnnnnnnnnnnnnnnnnnnnnnnnnnnnnnnnnnnnnnnnnnnnnnnnnnnnnnnnnnnnnnnnnnnnnnnnnnnnnnnnnnnnnnnnnnnnnnnnnnnnnnnnnnnnnnnnnnnnnnnnnnnnnnnnnnnnnnnnnnnnnnnnnnnnnnnnnnnnnnnnnnnnnnnnnnnnnnnnnnnnnnnnnnnnnnnnnnnnnnnnnnnnnnnnnnnnnnnnnnnnnnnnnnnnnnnnnnnnnnnnnnnnnnnnnnnnnnnnnnnnnnnnnnnnnnnnnnnnnnnnnnnnnnnnnnnnnnnnnnnnnnnnnnnnnnnnnnnnnnnnnnnnnnnnnnnnnnnnnnnnnnnnnnnnnnnnnnnnnnnnnnnnnnnnnnnnnnnnnnnnnnnnnnnnnnnnnnnnnnnnnnnnnnnnnnnnnnnnnnnnnnnnnnnnnnnnnnnnnnnnnnnnnnnnnnnnnnnnnnnnnnnnnnnnnnnnnnnnnnnnnnnnnnnnnnnnnnnnnnnnnnnnnnnnnnnnnnnnnnnnnnnnnnnnnnnnnnnnnnnnnnnnnnnnnnnnnnnnnnnnnnnnnnnnnnnnnnnnatgacgtgcgcacggcctaccagctgctgggccgcgtccttcagcacgagagctggcagcagggcttcgacctggcagccacacaggatgccaacttccacgaggnnnnnnnnnnnnnnnnnnnnnnnnnnnnnnnnnnnnnnnnnnnnnnnnnnnnnnnnnnnnnnnnnnnnnnnnnnnnnnnnnnnnnnnnnnnnnnnnnnnnnnnnnnnnnnnnnnnnnnnnnnnnnnnnnnnnnnnnnnnnnnnnnnnnnnnnnnnnnnnnnnnnnnnnnnnnnnnnnnnnnnnnnnnnnnnnnnnnnnnnnnnnnnnnnnnnnnnnnnnnnnnnnnnnnnnnnnnnnnnnnnnnnnnnnnnnnnnnnnnnnnnnnnnnnnnnnnnnnnnnnnnnnnnnnnnnnnnnnnnnnnnnnnnnnnnnnnnnnnnnnnnnnnnnnnnnnnnnnnnnnnnnnnnnnnnnnnnnnnnnnnnnnnnnnnnnnnncgcgcccggagcctggcaccgagaaggaggccccgatcagcaggcggaggcgacaccctgatgacgctggccagttcgccgttgccctggtcatcatttaccgcaccctggggcagctcctgccagagcgctatgaccccgaccgtcgcagcctccggnnnnnnnnnnnnnnnnnnnnnnnnnnnnnnnnnnnnnnnnnnnnnnnnnnnnnnnnnnnnnnnnnnnnnnnnnnnnnnnnnnnnnnnnnnnnnnnnnnnnnnnnnnnnnnnnnnnnnnnnnnnnnnnnnnnnnnnnnnnnnnnnnnnnnnnnnnnnnnnnnnnnnnnnnnntgggacaggagggtggtctgcccggggctgcgagctcctgtccaggaaccggacacacgtcgcctgccagtgtagccacacagccagctttgcagtactcatggacatatccaggcgtgagnnnnnnnnnnnnnnnnnnnnnnnnnnnnnnnnnnnnnnnnnnnnnnnnnnnnnnnnnnnnnnnnnnnnnnnnnnnnnnnnnnnnnnnnnnnnnnnnnnnnnnnnnnnnnnnnnnnnnnnnnnnnnnnnnnnnnnnnnnnnnnnnnnnnnnnnnnnnnnnnnnnnnnnnnnnnnnnnnnnnnnnnnnnnnnnnnnnnnnnnnnnnctgtgcacggtggtcgccatcctcctccactacatctacatgagcacctttgcctggaccctcgtggagagcctgcatgtctaccgcatgctgactgaggcacgcaacatcgacacggggcccatgcggttctactacgtcgtgggctggggcatcccggccattgtcacagnnnnnnnnnnnnnnnnnnnnnnnnnnnnnnnnnnnnnnnnnnnnnnnnnnnnnnnnnnnnnnnnnnnnnnnnnnnnnnnnnnnnnnnnnnnnnnnnnnnnnnnnnnnnnnnntcaacacagtcacttctgtcctatctgcaaaggtttcctgccaaagaaaacaccattattatgggaaaaaagggatcgt

SEQ ID NO: 30736 - DNA, 461 bp, Macaca Mulatta
  misc_feature (1)...(461): n = A,T,C or G
tcctgtgtggctttcagttgtctgtttgtatagcctggatttttttgagataaatgtaactttctcatttgtatatttgtcttgatatggtcttaatgttttctttccatgaaatgtatatatttctagaaaatatatcttatatttactaccataatttctgccaccaccctcatcttgctctgcattatacacagtnagagaagaactgaagacactgctgtgacaatattgcagtccaaggcatcatgtgctcctggtgggatactctggttatcaacatcaacagtactttcctgagcaagtctttgaaggcttgataagagaccaaagttacggaaagtatttaactcttcttttatatcanacaaacaaggtttcatcatttcatacatttttggttattctaagcagagactaatacaaatacagccacataaaggcagtgtactgagggtggg

SEQ ID NO: 30737 - DNA, 1624 bp, Macaca Mulatta
  misc_feature (1)...(1624): n = A,T,C or G
tgccgtggcaagcatttcgcagatttggtcaaacgctggtacgcagacgtacactggagtcaggcatggctgagactcgccttgccagatgtctaagcactctggatttagtggccctgggtgtgggcagcacattgggtgcaggcgtgtatgtcctggctggagaggtggccaaagataaagcagggccatccattgtgatctgctttttggtggctgccctgtcttctgtgttggctgggctgtgctatgcagagtttggtgcccgggttccccgttctggttcggcatatctctacagctatgtcactgtgggtgaactctgggccttcgccactggctggaacctcatcctctcctatgtcattggtnnnnnnnnnnnnnnnnnnnnnnnnnnnnnnnnnnnnnnnnnnnnnnnnnnnnnnnnnnnnnnnnnnnnnnnnnnnnnnnnnnnnnnnnnnnnnnnnnnnnnnnnnnnnnnnnnnnnnnnnnnnnnnnnnnnnnnnnnnnnnnnnnnnnnnnnnnnnggattgttggctctcggggctagtgagtcggccctggttaccaaagtgttcacaggcgtaaaccttttggttcttgggttcgtcatcatctctggcttcattaagggggacctgcacaactggaagctcacagaagaggactacgaattggccatggctgaactcaatgacacctatagntagcttgggccctctaggctctggaggatttgtgccttttggcttcgagggaattctccgcggagcagcgacctgtttctatgcatttgttggtttcgactgtattgctaccactggagaagaagcccagaatccccagcattccatcccgatgggcattgtgatctcgctgtctgtctgctgtttggcgtattttggtgtctcttctgcactcaccctcatgatgccttactaccagcttcagcctgagagccctttgcttgaggcatttctctacattggatgggctcctgcccgctatgttgtggctgttggctccctctgtgctctttctaccannnnnnnnnnnnnnnnnnnnnnnnnnnnnnnnnnnnnnnnnnnnnnnnnnnnnnnnnnnnnnnnnnnnnnnnnnnnnnnnnnnnnnnnnnnnnnnnnnnnnnnnnnnnnnnnnnnnnnnnnnnnnnnnnnnnnnnnnnnnnnnnnnnnnnnnnnnnnnnnnnnnnnnnnnnnnnnnnnnnnnnnnnnnnnnnnnnnnnnnnnnnnnnnnnnnnnnnnnnnnnnnnnnnnnnnnnnnnnnnnnnnnnnnnnnnnnnnnnnnnnnnnnnnnnnnnnnnnnnnnnnnnnnnnnnnnnnnnnnnnnnnnnnnnnnnnnnnnnnnnnnnnnnnnnnnnnnnnnnnnnnnnnnnnnnnnnnnnnnnnnnnnnnnnnnnnnnnnnnnnnnnnnnnnnnnnnnnnnnnnnnnnnnnnngctgtcctgctgactgctgtttgcctggtgctggcccagtggtcagttccattgctttctggagacctggtgtggattgcagtggttgtgctgctcctgctgctcattattgggatcactgtggtcatctggagacagccacagagctccactccccttcactttaagg

SEQ ID NO: 30738 - DNA, 306 bp, Macaca Mulatta
ttcagggttcaactgtggtgattttaattaaaacctaagaaaccaccacttccggatataatcatcaactatcatatgaatggttttctttccaaccagcagatggcagtagttgtagctctgatctttgtagggaacttctataaaaacaacacatgggaaattttaatcctaaaccttttatcctctccagccccactccagcatgatctttaggctgccttctgttattcccatgagtggtatactcaggtattgcagaaccatttttatcttagaccatgtaaaatgaaattagaggaaata

SEQ ID NO: 30739 - DNA, 815 bp, Macaca Mulatta
  misc_feature (1)...(815): n = A,T,C or G
nagctttatgaaaactttatcagtgaatttgaacacaggncagggtgaatcctttgtccctggtagaaatcattcttcatgtagttagacagatgactgngatcctaatgtggctcttactttcctggaaaagactcgtgagaaggtnaggtgaaaagtagtgatgaggcagtgatcctgtgtaaaacagcaattggagctctaaaattaaacatcggggacctacaggttacaaaggnnnnnnnnnnnnnnnnnnnnnnnnnnnnnnnnnnnnnnnnnnnnnnnnnnnnnnnnnnnnnnnnnnnnnnnnnnnnnnnnnnnnnnnnnnnnnnnnnnnnnnnnnnnnnnnnnnnnnnnnnnnnnnnnnnnnnnnnnnnnnnnnnnnnnnnnnnnnnnnnnnnnnnnnnnnnnnnnnnnnnnnnnnnnnnnnnnnnnnnnnnnnnnnnnnnnnnnnnnnnnnnnnnnnnnnnnnnnnnnnnnnnnnnnnnnnnnnnnnnnnnnnnnnnnnnnnnnnnnnnnnnnnnnnnnnnnnnnnnnnnnnnnnnnnnnnnnnnnnnnnnnnnnnnnnnnnnnnnnnnnnnnnnnnnnnnnnnnnnnnnnnnnnnnnnnnnnnagatgactttcacacgaccggccaatcacagacaacttacttttgaagaaattgccaaaagtgctaaaatcacagtgaatgaggtnnnnnnnnnnnnnnnnnncagatcaagggaatgaaggaccgcctggagttctggtgcacggatgtgaagagcatggagatgctggtggagcaccaggcccatgacatcctcacctag

SEQ ID NO: 30740 - DNA, 450 bp, Macaca Mulatta
tattagcttaggcaaatttcacagttcattgtacagtgttaaactcagaacatgtgtaacttttcacataaagagaatgcacctttgagagttatttgtaaagcagcctataaaatagttctgaaatattttatttacctaactgtaattattgggctacttgttaataaatggacttaatgttaacatggatttcatacgttctgtgtggtttaaaagcataggaatgaaactttggttaaaagtagaaaaaggaagatatatgccgtaattacatcaattgtcaatattttctcatagttcttcatgtggtaaataagataaaaatcccatttccccttctttactggtgatttgcagcggttgctgcttgtgcttgcactccatttgctaaaaatttgatatgattactactaggtaagtggtaactaagtggcaacaaagttccat

SEQ ID NO: 30741 - DNA, 346 bp, Macaca Mulatta
ttttagtgtcatgacatcctcagggggctcacgaactctagaggaactcctcagactaatttgctcttatctcatgcacactgtgaactacttgcctgaccattgttttccccttctctttggctgccaggaagctcagagccaaattagtggctcccttcgagcgaatgcccaggacttcaacgcatgcactttgtgttgacctcatccctggcttcaccttggtttttcccatcctagttctccctatgcctggataacccgtcttttcttttttataagcaaccacactgtattggatgaccctagaccttctttgagacaaggcaggctgtggccatgtagc

SEQ ID NO: 30742 - DNA, 133 bp, Macaca Mulatta
acatactgccagatcttttatccagagcagctcatcacaagcaaggaagatgctgccaataactatgcccgaggccactacaccactgggaaggagctcatcgacctggtactggaccggatttggaagctgg

SEQ ID NO: 30743 - DNA, 795 bp, Macaca Mulatta
ggggttcgaagatggcggcgcgatatctgtccggtattaccaggcgagtcttcctgtggacagtctcagggacaccacgtagagaattttggtctcgattcagaaaagagaaagagccagtggttgctgagacagtagaagagaaaaaggaacctatcctagtgtgtccacccttacgaagccaagcatacacaccacctgaagatctccagagtcgtttggaatcttacgttaaagaagtttttggttcatctcttcctagtaattggcaagacatctccctggaagatagtcgtctaaagttcaatcttttggcacatttagctgatgacttgggtcatgtagtccctaactccagactccaccagatgtgcagggttagagatgttcttgatttctataatgtccctattcaagatagatctaaatttgatgaactcagtgccagtaatctgcctccaaatttgaaaatcacttggagttactaagcaatttggaagagaaacacatcaaaatcattgtttttccctgaccaagagggctgctcattagacccttttgatactttaccatgtgaaatactacccagaactgttctcctaacccacttttttctgtaaaggaaagaataatcttttttttgtccccaattatgaaatggacaaaataacggactttctgttttccctatttggctgaaaaccatttttttaaaggaaatttaggtaattatttaaattttggaaaagtttttgaaaaggggccctgttactttaactttggggtttaaaaaaa

SEQ ID NO: 30744 - DNA, 314 bp, Macaca Mulatta
  misc_feature (1)...(314): n = A,T,C or G
gagaatcaagaagcagatttggatgagcagtattctagaaggctgtccgtcagagagaggaggcggcccaaggaacgacgaagaggtacaggcatcaatttctggacaaaggatnnnnnnnnnnnnnnnnnnnnnnnnnnnnnnnnnnnnnnnnnnnnnnnnnnnnnnnttggaatcaggaggtagtaatcctacaaccagtgattcttacggtgaccgggcttcagcaagagcccgtcgggaggcccgggaggcccgtctagccactctgaccagtcgtgtagaagaagacagcaacagagattataaaaaan

SEQ ID NO: 30745 - DNA, 214 bp, Macaca Mulatta
ctccatggtataactgaccaatagcctacttgcaggagatatggaaggcagaagtaaagaaagcattagtcaggttttatagccaccatatgtggagacagatggatgcataggggcttcagggacacctgcttccaccacattgtcctgatcctttgctctgccagctgagagtattcttagaaccaccactaactgcttgactgccatattt

SEQ ID NO: 30746 - DNA, 232 bp, Macaca Mulatta
ctgtccaagacaccagcagccctggcactgaaccagacgcaacactgcaagcagctggagggcctggtgtctgcacaggtgcagctgtgccgcagcaacctggagctcatgcacacggtggtgcacgctgcccgtgaggtcatgaaggcctgtcgccgggccttcgccgacatgcgctggaactgctcctccatcgagctcgcccccaactatttgcttgacctggagagag

SEQ ID NO: 30747 - DNA, 795 bp, Macaca Mulatta
  misc_feature (1)...(795): n = A,T,C or G
tctttttgggtgtgttgaagaagaggatccgggtggcctcagtgaaaaggattttctcgtaggccttctcgatgcacccagcgatctcatccctgatggtgtccagcaggatgtcaatgaagaaggtgtagctctcagcggggatgttacccttggccaggaacactttgttgtagctgccctccatcaggtattgctcctagggtacacctangggttgcntttggattgttaagcacggctttcgggtttcttggagtattggttccacttgtggggccaaggggacaacggccacgggccatgcccaaataatcttcccacaagttcggttcgcggaaaacctttccttaaggccaccaacccgccccagggggttcttcccctttgggggcggaacccctaagggcccctaactggtggnaagtagcgtaggggttttcgaatgcgcccccccaataggtaggcccttgggctgcctattattaggggccttggtatctttcggggtgagtacgccttggccttcgcacnttttgtttaaaagtcgcaaganntacggttttaangtttaaagccaaanttntttttgaaaccgggctcttggcgcctatgtagcgtctcgaaggaggggatgtccttgcgcaggatgctccactgggccccgatctccagtatgtcacgggccagaatgagctgctgtttggtcagcttggtccctgtggttggcaagaagttgagctccagaagaactagctttagccggcccagctcttccccgcacttgctaagatt

SEQ ID NO: 30748 - DNA, 313 bp, Macaca Mulatta
atgtccaagtacacacttattatgttaagacatggagagggtgcttggaataaggagaaccgtatatgtagctgggtggatcagaaactcaacagtgaaggcatggaggaagctcggaactgtgggaagcaactcaaagcattaaactctgagtttgatcttgtattcacatctgtccttaatcggtccattcacacagcctggctgatcctagaagagctagggcaggaatgggtgcccgtggaaagctcctggcgtgtaaatgagaaacactatggggccttgatcggtctcaacagggagcaaatggctt

SEQ ID NO: 30749 - DNA, 1499 bp, Macaca Mulatta
  misc_feature (1)...(1499): n = A,T,C or G
caacacctccaccatcttctggtcccacctaccagtgtctgaagggaacaggtgaaaactatcgtggggatgtggctgttaccgtgtctgggcacacctgtcagcgctggagtgcacagacccctcacacacataacaggacaccagaaaactttccctgcaanaaatttggatgaaaactactgccgcaatcctgatggagaaaaggccccatggtgctatacaaccaacagccaagtgcggtgggagtactgtaagataccgtcctgtgagtcctccccagtatccacggaaccattggatcccacagnnagcaccacctgagcttactcctgtggtccaggagtgctaccatggtgatgggcagagctaccgaggcacatcctccaccaccaccacaggaaagaagtgtcagtcttggtcatctatgacaccacactggcatgagaagaccccagaaaacttcccaaatgcnnnnnnnnnnnnnnnnnnnnnnnnnnnnnnnnnnnnnnnnnnnnnnnnnnnnnnnnnnnnnnnnnnnnnnnnnnnnnnnnnnnnnnnnnnnnnnnnnnnnnnnnnnnnnnnnnnnnnnnnnnnnnnnnnnnnnnnnnnnnnnnnnnnnnnnnnnnnnnnnnnnnnnnnnnnnnnnnnnnnnnnnnnnnnnnnnnnnnnnnnnnnnnnnnnnnnnnnnnnnnnnnnnnnnnnnnnnnnnnnnnnnnnnnnnnnnnnnnnnnnnnnnnnnnnnnnnnnnnnnnnnnnnnnnnnnnnnnnnnnnnnnnnnnnnnnnnnnnnnnnnnnnnnnnnnnnnnnnnnnnnnnnnnnnnnnnnnnnnnnnnnnnnnnnnnnnnnnnnnnnnnnnnnnnnnnnnnnnnnnnnnnnnnnnnnnnnnnnnnnnnnnnnnnnnnnnnnnnnnnnnnnnnnnnnnnnnnnnnnnnnnnnnnnnnnnnnnnnnnnnnnnnnnnnnnnnnnnnnnnnnnnnnnnnnnnnnnnnnnnnnnnnnnnnnnnnnnnnnnnnnnnnnnnnnnnnnnnnnnnnnnnnnnnnnnnnnnnnnnnnnnnnnnnnnnnnnnnnnnnnnnnnnnnnnnnnnnnnnnnngtcctcaaggccttcattctacaaggtcatcctgggtgcacaccgagaagtgcatctcgaaccacatgttcaggaaatagaagtatctaagatgttctcggagcccgcaagagcagatattgccttgctaaagctaagcanncagtcctgccatcatcactgacaaagtaatcccagcttgtctgccatccccaaattatgtggtcgctgaccggaccgaatgtttcatcactggctggggagaaacccaaggnnnggtacctatggggctggccttctcaaggaagcccggctccccgtgattgagaataaagtgtgcaatcgctatgagtttctgaatggaagagtcaaaaccaccgagctctgtgctgggcatttggccggaggcactgacagttgccagg

SEQ ID NO: 30750 - DNA, 255 bp, Macaca Mulatta
ggatgacaatgaagtgaataactaataaggagatttaagataagaccccataaatgaatgtattctgcaatgcttttaggatgtgaattttcaaattttgtgtataataattactttgaaaatatttgcagagtatctagaaattaccatgtagtatttggtatgcaaaatacattcttttgagacattatagtctacatgaaggaaataaagaggataatttcattggattgctatacctttacctgatttatg

SEQ ID NO: 30751 - DNA, 162 bp, Macaca Mulatta
agccacttatgaatcagtgttgttccatcagctacaagaaataaagggagttcagcaagatgaagctctccaactgccaaaagacatagattatttgactatcagggatgtgtctttgtcccatgaagttcgagagaaactacattttagtcgtccgcagac

SEQ ID NO: 30752 - DNA, 1357 bp, Macaca Mulatta
  misc_feature (1)...(1357): n = A,T,C or G
acttccccgggagccggaagtcctgtctcacggttgccctggcagcgcgcgaggctggtgagtcggtcgcactgtggcagccggccggctggtttccatggttgcacgattagnnnnnnnnnnnnnnnnnnnnnnnnnnnnnnnnnnnnnnnnnnnnnnnnnnnnnnnnnnnnnnnnnnnnnnnnnnnnnnnnnnnnnnnnnnnnnnnnnnnnnnnnnnnnnnnnnnnnnnnnnnnnnnnnnnnnnnnnnnnnnnnnnnnnnnnnnnnnnnnnnnnnnnnnnnnnnnnnnnnnnnnnnnnnnnnnnnnnnnnnnnnnnnnnnnnnnnnnnnnnnnnnnnnnnnnnnnnnnnnnnnnnnnnnnnnnnnnnnnnnnnnnnnnnnnnnnnnnnnnnnnnnnnnnnnnnnnnnnnnnnnnnnnnnnnnnnnnnnnnnnnnnnnnnnnnnnnnnnnnnnnnnnnnnnnnnnnnnnnnnnnnnnnnnnnnnnnnnnnnnnnnnnnnnnnnnnnnnnnnnnnnnnnnnnnnnnnnnnnnnnnnnnnnnnnnnnnnnnnnnnnnnnnnnnnnnnnnnnnnnnnnnnnnnnnnnnnnnnnnnnnnnnnnnnnnnnnnnnnnnnnnnnnnnnnnnnnnnnnnnnnnnnnnnnnnnnnnnnnnnnnnnnnnnnnnnnnnnnnnnnnnnnnnnnnnnnnnnnnnnnnnnnnnnnnnnnnnnnnnnnnnnnnnnnnnnnnnnnnnnnnnnnnnnnnnnnnnnnnnnnnnnnnnnnnnnnnnnnnnnnnnnnnnnnnnnnnnnnnnnnnnnnnnnnnnnnnnnnnnnnnnnnnnnnnnnnnnnnnnnnnnnnnnnnnnnnnnnnnnnnnnnnnnnnnnnnnnnnnnnnnnnnnnnnnnnnnnnnnnnnnnnnnnnnnnnnnnnnnnnnnnnnnnnnnnnnnnnnnnnnnnnnnnnnnnnnnnnnnnnnnnnnnnnnnnnnnnnnnnnnnnnnnnnnnnnnnnnnnnnnnnnnnnnnnnnnnnnnnnnnnnnnnnnnnnnnnnnnnnnnnnnnnnnnnnnnnnnnnnnnnnnnnnnnnnnnnnnnnnnnnnnnnnnnnnnnnnnnnnnnnnnnnnnnnnnnnnnnnnnnnnnnnnnnnnnnnnnnnnnnnnnnnnnnnnnnnnnnnnnnnnnnnnnnnnnnnnnnnnnnnnnnnnnnnnnnnnnnnnnnnctgtcccagaaactttgggcagctccgaacccgctgagggtgctctccgacagcgcnccacctgctctagttcctgaaggggcagactcctcacattccagtactttcccacctgacccctctcccctcgtttttccttcaataaactattttgtgtcagct

SEQ ID NO: 30753 - DNA, 2554 bp, Macaca Mulatta
  misc_feature (1)...(2554): n = A,T,C or G
cagatctgagtgttttaattaaattatggaatacagaaaacaacaaaaaacttaaatttcatctggaattccacaggtgagtnnnnnnnnnnnnnnnnnnnnnnnnnnnnnnnnnnnnnnnnnnnnnnnnnnnnnnnnnnnnnnnnnnnnnnnnnnnnnnnnnnnnnnnnnnnnnnnnnnnnnnnnnnnnnnnnnnnnnnnnnnnnnnnnnnnnnnnnnnnnnnnnnnnnnnnnnnnnnnnnnnnnnnnnnnnnnnnnnnnnnnnnnnnnnnnnnnnnnnnnnnnnnnnnnnnnnnnnnnnnnnnnnnnnnnnnnnnnnnnnnnnnnnnnnnnnnnnnnnnnnnnnnnnnnnnnnnnnnnnnnnnnnnnnnnnnnnnnnnnnnnnnnnnnnnnnnnnnnnnnnnnnnnnnnnnnnnnnnnnnnnnnnnnnnnnnnnnnnnnnnnnnnnnnnnnnnnnnnnnnnnnnnnnnnnnnnnnnnnnnnnnnnnnnnnnnnnnnnnnnnnnnnnnnnnnnnnnnnnnnnnnnnnnnnnnnnnnnnnnnnnnnnnnnnnnnnnnnnnnnnnnnnnnnnnnnnnnnnnnnnnnnnnnnnnnnnnnnnnnnnnnnnnnnnnnnnnnnnnnnnnnnnnnnnnnnnnnnnnnnnnnnnnnnnnnnnnnnnnnnnnnnnnnnnnnnnnnnnnnnnnnnnnnnnnnnnnnnnnnnnnnnnnnnnnnnnnnnnnnnnnnnnnnnnnnnnnnnnnnnnnnnnnnnnnnnnnnnnnnnnnnnnnnnnnnnnnnnnnnnnnnnnnnnnnnnnnnnnnnnnnnnnnnnnnnnnnnnnnnnnnnnnnnnnnnnnnnnnnnnnnnnnnnnnnnnnnnnnnnnnnnnnnnnnnnnnnnnnnnnnnnnnnnnnnnnnnnnnnnnnnnnnnnnnnnnnnnnnnnnnnnnnnnnnnnnnnnnnnnnnnnnnnnnnnnnnnnnnnnnnnnnnnnnnnnnnnnnnnnnnnnnnnnnnnnnnnnnnnnnnnnnnnnnnnnnnnnnnnnnnnnnnnnnnnnnnnnnnnnnnnnnnnnnnnnnnnnnnnnnnnnnnnnnnnnnnnnnnnnnnnnnnnnnnnnnnnnnnnnnnnnnnnnnnnnnnnnnnnnnnnnnnnnnnnnnnnnnnnnnnnnnnnnnnnnnnnnnnnnnnnnnnnnnnnnnnnnnnnnnnnnnnnnnnnnnnnnnnnnnnnnnnnnnnnnnnnnnnnnnnnnnnnnnnnnnnnnnnnnnnnnnnnnnnnnnnnnnnnnnnnnnnnnnnnnnnnnnnnnnnnnnnnnnnnnnnnnnnnnnnnnnnnnnnnnnnnnnnnnnnnnnnnnnnnnnnnnnnnnnnnnnnnnnnnnnnnnnnnnnnnnnnnnnnnnnnnnnnnnnnnnnnnnnnnnnnnnnnnnnnnnnnnnnnnnnnnnnnnnnnnnnnnnnnnnnnnnnnnnnnnnnnnnnnnnnnnnnnnnnnnnnnnnnnnnnnnnnnnnnnnnnnnnnnnnnnnnnnnnnnnnnnnnnnnnnnnnnnnnnnnnnnnnnnnnnnnnnnnnnnnnnnnnnnnnnnnnnnnnnnnnnnnnnnnnnnnnnnnnnnnnnnnnnnnnnnnnnnnnnnnnnnnnnnnnnnnnnnnnnnnnnnnnnnnnnnnnnnnnnnnnnnnnnnnnnnnnnnnnnnnnnnnnnnnnnnnnnnnnnnnnnnnnnnnnnnnnnnnnnnnnnnnnnnnnnnnnnnnnnnnnnnnnnnnnnnnnnnnnnnnnnnnnnnnnnnnnnnnnnnnnnnnnnnnnnnnnnnnnnnnnnnnnnnnnnnnnnnnnnnnnnnnnnnnnnnnnnnnnnnnnnnnnnnnnnnnnnnnnnnnnnnnnnnnnnnnnnnnnnnnnnnnnnnnnnnnnnnnnnnnnnnnnnnnnnnnnnnnnnnnnnnnnnnnnnnnnnnnnnnnnnnnnnnnnnnnnnnnnnnnnnnnnnnnnnnnnnnnnnnnnnnnnnnnnnnnnnnnnnnnnnnnnnnnnnnnnnnnnnnnnnnnnnnnnnnnnnnnnnnnnnnnnnnnnnnnnnnnnnnnnnnnnnnnnnnnnnnnnnnnnnnnnnnnnnnnnnnnnnnnnnnnnnnnnnnnnnnnnnnnnnnnnnnnnnnnnnnnnnnnnnnnnnnnnnnnnnnnnnnnnnnnnnnnnnnnnnnnnnnnnnnnnnnnnnnnnnnnnnnnnnnnnnnnnnnnnnnnnnnnnnnnnnnnnnnnnnnnnnnnnnnnnnnnnnnnnnnnnnnnnnnnnnnnnnnnnnnnnnnnnnnnnnnnnnnnnnnnnnnnnnnnnnnnnnnnnnnnnnnnnnnnnnnnntgatatatcttttgttggacctgctaatagtaggtctaagaggagtactccttgtcccctattcctgggattatgcagttttctttttagagtttatatagggcaagtggttatttttttctgaattataggatggaaaaagatcatatcctttgtcaggaaatataaacttgaaagtatgtagtcagctcttgtaatattcatatttatgattgtcctgcatgaaagacaatttcggtta

SEQ ID NO: 30754 - DNA, 491 bp, Macaca Mulatta
gaagagagactgatcagacctttgtgcagcctccttgtcacatgcacatccaagtctaaaggcacatccctgaccacgtggcacacacttcaccaactctaaaagccacccccacccactctctagccccaatccgattgacccactaaagcctttcctttgccctcttgcccatgtgcaataggcatatagggctgaagaaggatcccgtgacctaggagctaatatttctctggaaaattgcaaaagcaacagactcccatcattaaactgggatttgaggtgccttctccagtcccctcacatagctgctcagtcctcccagcctgggacactctgagccaatcttgagtgtccctaactcctaccttcctggcccaccctgtttgagcttgcctctccatcttaaagatacacatcagggctaggcttgacaagttcaacatttggcgatctatcccttgcctttctattaactgctgaggtagcac

SEQ ID NO: 30755 - DNA, 185 bp, Macaca Mulatta
ttcagaaggccttcctcggtaactcaatctccctttctgctgtaaaatcctgtgctgcctttattctgcactagaaatataactattggcttatactagaacatggctcatgctgtctatcatcagtgacaccatcagataatgtcaacttatagatgtgatgatctaagactcctagcctgaca

SEQ ID NO: 30756 - DNA, 615 bp, Macaca Mulatta
  misc_feature (1)...(615): n = A,T,C or G
ttctgctaacagactccgagttcagtatgcaggagcctatggtgcctgccaagctggggacccaggcagagaaggaccggcggctaaagaagaannnnnnnnnnnnnnnnnnnnnnnnnnnnnnnnnnnnnnnnnnnnnnnnnnnnnnnnnnnnnnnnnnnnnnnnnnnnnnnnnnnnnnnnnnnnnnnnnnnnnnnnnnnnnnnnnnnnnnnnnnnnnnnnnnnnnnnnnnnnnnnnnnnnnnnnnnnnnnnnnnnnnnnnnnnnnnnnnnnnnnnnnnnnnnnnnnnnnnnnnnnnnnnnnnnnnnnnnnnnnnnnnnnnnnnnnnnnnnnnnnnnnnnnnnnnnnnnnnnnnnnnnnnnnnnnnnnnnnnnnnnnnnnnnnnnnnnnnnnnnnnnnnnnnnnnnnnnnnnnnnnnnnnnnnnnnnnnnnnnnnnnnnnnnntggcctatggggacatgagccatgagtggattgggaatgaatggctgcctagcctggggctcccgcagtaccgcagctacttcatggagtgcctggtggacgcccgcatgctggaccacctcaccaagaaggacctgcgggtccacctgaagatggtggacagcttccatc

SEQ ID NO: 30757 - DNA, 408 bp, Macaca Mulatta
aatgaaggctgcagatggaattaaaatagattatgctggattatctgggtatgcccaattgatcaccagatccttaagagtggaagagaggcagatcaggatgtcagagtgatgaggtgtgagacggacttgacctgctgtcgctggaaagaaggaggtcatgagccaaggaatgtggacagtctcttgaagctggaaagtgtgcattggacatctggaagccggaaaagacaaagatccagaaaggaacaaagtcttgtggacacccggattttggtccagtgagatatatttgacttgttaacctacaaaactttatgatgataaatttgtgttggttgtaagccacgaaatcacggtaatttgttatagcagcagatagaaaaccaatatactcctcttaatata

SEQ ID NO: 30758 - DNA, 233 bp, Macaca Mulatta
aaagccaggcaggccaagacctgagttggcaactcagctgctgctgcttccatgtgttctgggttcagaggtcatggctgcaccagtcagagccctgagtgcctcagggtttggcgatggaatttttaatataataaatctttgttgagcactgctggtgggccaggagtgcagtctacttggggagttggaatggagagacccaggtactaaaatcccagctaatgtggcag

SEQ ID NO: 30759 - DNA, 465 bp, Macaca Mulatta
  misc_feature (1)...(465): n = A,T,C or G
cttctacgcagattttggaccactcaatctggcaatggtttacagatattgttgcaagataaataagaaattaaannnnnnnnnnnnnnnnnnnnnnnnnnnnnnnnnnnnnnnnnnnnnnnnnnnnnnnnnnnnnnnnnnnnnnnnnnnnnnnnnnnnnnnnnnnnnnnnnnnnnnnnnnnnnnnnnnnnnnnnnnnnnnnnnnnnnnnnnnnnnnnnnnnnnnnnnnnnnnnnnnnnnnnnnnnnnnnnnnnnnnnnnnnnnnnnnnnnnnnnnnnnnnnnnnnnnnnnnnnnnnnnnnnnnnnnnnnnnnnnnnnnnnnnnnnnnnnnnnnnnnnnnnnnnnnnnnnnnnnnnnnnnnnnnnnnnnnnnnnnnaaagcagaaaatggagatttaaattggataataccagaccgatttattgccttctgtggacctcattcaagagccagacttgaaagtgg

SEQ ID NO: 30760 - DNA, 547 bp, Macaca Mulatta
  misc_feature (1)...(547): n = A,T,C or G
gtgaccttgatcccactctgactgcatccatttctctgaaagacttgtttgttctgcttttcttcatataactgagctggccttatccttggcatccccctaaacaaacaagaggtgaccaccttattgtgaggttccatccagccaagtttatgtgacctattgtctcaagactgtcatcactcagaagcctgcctctggtttaccctacagcttcaggcccagctgcccccggtctttgggtggtgctgttcttttctggtggatttaatgctgagtcactggtacaaacagctgttgaagctcagagctggaggtgagcttctgaggcctttgccattatccaacccaagatttggtgcctgcagcctcttgtctggttgaggactttgggcaggaaagaatgctgctgaactttgatttcctttacnangggaagaaataaggggaagagttgctgccgacctgtcactggtttganattgatggnagtgtttggactgttctcagtcttgatttgctttgtcagntttctagcagcttttat

SEQ ID NO: 30761 - DNA, 1180 bp, Macaca Mulatta
  misc_feature (1)...(1180): n = A,T,C or G
gggtttctccaaggacatcaaggtgcccaaaagccgatacctgggctacatcaaggactacgagggagcgacactgatggagtgtgagctgaatccccgcatcccctacacagagctgtcccacatcatcaagaagcagaaagaggtgngatcatcaagaagctgattgagcgcaaacaggcccagatccgcaaggtctacccggggctcagctgcttcaaggagggagtgaggcagannnnnnnnnnnnnnnnnnnnnnnnnnnnnnnnnnnnnnnnnnnnnnnnnnnnnnnnnnnnnnnnnnnnnnnnnnnnnnnnnnnnnnnnnnnnnnnnnnnnnnnnnnnnnnnnnnnnnnnnnnnnnnnnnnnnnnnnnnnnnnnnnnnnnnnnnnnnnnnnnnnnnnnnnnnnnnnnnnnnnnnnnnnnnnnnnnnnnnnnnnnnnnnnnnnngacctgaagaccatgactgagcggctgcgaagccgctactatgtgacccggaagctctttgtggccgacctgcagcgggtcatcgccaactgccgcgagtacaaccccccggacagcgagtactgccgctgcgccagtgccctggagaagttcttctacttcaagctcaaggaaggagggctcattgacaagtaggcccagctttgggccacagccctgaccttgaatgtctccacctcggattctgatctgatccttaggggatgccctggccccacggacccaactcagcttgagacactctagccaagggccctccggcccctgatcctgcatccctttctggaccttcaggcacccccaagcctgcagctctgtcccagccttcactgtgtgtgagaggtttcctgggttggggcccagtccctctagagtggctggtgggacgggatgaaccttgcccagccgtggtggcccccagacctggtccttaacagctttggaggcttggattcnnnnnnnnncccaggtggctatttccctgaggaccaggactgctcattttagcttgagtgatggcttcagggattggaagttcagtccaaactggagggggccatgccttgtccggtactgtactgtcagtctcccccggggtgggggtatggggaccattcattccctggcattaatcccttagagggaacaataaagctttttatttctctgt

SEQ ID NO: 30762 - DNA, 703 bp, Macaca Mulatta
  misc_feature (1)...(703): n = A,T,C or G
gatagcactgtgagagtgatctgggcctaccaccatgaagatgcaggagaagctggtcccaagtaccatgactccaataggggcaccaagagtttgggggttattgaatcctgagaaaaccagtgtgctgtctgcagccttacnatactttgatctggtaaatcangacgtnnnnnnnnnnnnnnnnnnnnnnnnnnnnnnnnnnnnnnnnnnnnnnnnnnnnnnnnnnnnnnnnnnnnnnnnnnnnnnnnnnnnnnnnnnnnnnnnnnnnnnnnnnnnnnnnnnnnnnnnnnnnnnnnnnnnnnnnnnnnnnnnnnnnnnnnnnnnnnnnnnnnnnnnnnnnnnnnnnnnnnnnnnnnnnnnnnnnnnnnnnnnnnnnnnnnnnnnnnnnnnnnnnnnnnnnnnnnnnnnnnnnnnnnnnnnnnnnnnnnnnnnnnnnnnnnnnnnnnnnnnnnnnnnnnnnnnnnnnnnnnnnnnnnnnnnnnnnnnnnnnnnnnnnnnnnnnnnnnnnnnnnnnnnnnnnnnnnnnnnnnnggcttaatagataattctggactgaggttattttataccatggatataaggaaatatgatgctggggtaattgaggctggcctctgggtgagcctcttccataccatccctccagggatgcctgagttccagtctgagggtcactgtactctggagtgcctagaagagg

SEQ ID NO: 30763 - DNA, 728 bp, Macaca Mulatta
accactctgaaacatcatccacactgtgaacgtgcccctgcagacggccctggggactttggaggagattgcctgctgacacccctcgagccacccggcaccccctccaaacagaccttgaggcccaagaccaggacaaggaagagcaagctcaggtggaatggcccctgatgctggaaagaagcaagagccccctatgcacacattgcagactagctgcctagacctcgctccggccacgtccaacacgacgcgtccttgggccccgccgtgcgtccctcttaggagagatgagtcacactctggaactgtccaagaacgaacctgccatcacatctcactgccagatgtataaagcacctgcatgctcagacttcttatggcgccacctccacgtctgtcttttacatgacattcctccacgcggtttccagtgtccacaccgctgcccgtgcagtgggaccagattccaggtccaaagtcaccatgaggccaccctggaatcagaactgcacaatcaagagggaacccgtgggactctctgctacattcagttcttgtgtcgtttgtgaaggttcttaacctgcccacaaacccccttttccccaagctggcccatggggctttggcacctaaggtgacctgtgccaacctccctcccgccccagagcctgtgacggcggcacagcagccagcgggcggggggctcatgtgttcacccatggtgg

SEQ ID NO: 30764 - DNA, 737 bp, Macaca Mulatta
ctccagtacggtggcctccatccacgacaaagatgccaagggggagacccccatctccattgcacaccgcctgaaccacacacagagtgagcggcagatgttcctcctccaccagatagcgaagtcagggataccacatcttaccgacttggtcatgaataatgctttgcagaggatcaactctggatttaggtctaaggtgacgatgatgacccctcattagctcccagtgctaacgcttgcctgttgaagctggattgggcaactttgcagagttcaatcccatgggggtccttggtgagcagggaggcatgaaacccgggcaattaacctgaatcacatatgaaattatctgtcctgtttgcaaatgatttcgggagggtgttgatggcaggaggtaagtctgagctcatttggtaatccattacggactgaacaggctctgatgccagcctttaattttaagctatttggacattgaacccaatatcgctgcttaaggtgatgggagccaattaccttctctcgcttctggggactgtctaatgcactgtcatagcaggagtaataacaataatgataatagcactattgttattgtacaaaacaagtgttagcaaatgtcaagaagtcgtgagtgttgtgagctgtgatttcagcctgtaaacttggggactaagtgctcccacagttaatgtccaggttcctgaaccaccgtgaggggtctgcttcttgat

SEQ ID NO: 30765 - DNA, 5609 bp, Macaca Mulatta
  misc_feature (1)...(5609): n = A,T,C or G
agagtaaagaagtcggccagcagctccaagatgatttgatgaaggtcttgaacgagctctactcggtnnnnnnnnnnnnnnnnnnnnnnnnnnnnnnnnnnnnnnnnnnnnnnnnnnnnnnnnnnnnnnnnnnnnnnnnnnnnnnnnnnnnnnnnnnnnnnnnnnnnnnnnnnnnnnnnnnnnnnnnnnnnnnnnnnnnnnnnnnnnnnnnnnnnnnnnnnnnnnnnnnnnnnnnnnnnnnnnnnnnnnnnnnnnnnnnnnnnnnnnnnnnnnnnnnnnnnnnnnnnnnnnnnnnnnnnnnnnnnnnnnnnnnnnnnnnnnnnnnnnnnnnnnnnnnnnnnnnnnnnnnnnnnnnnnnnnnnnnnnnnnnnnnnnnnnnnnnnnnnnnnnnnnnnnnnnnnnnnnnnnnnnnnnnnnnnnnnnnnnnnnnnnnnnnnnnnnnnnnnnnnnnnnnnnnnnnnnnnnnnnnnnnnnnnnnnnnnnnnnnnnnnnnnnnnnnnnnnnnnnnnnnnnnnnnnnnnnnnnnnnnnnnnnnnnnnnnnnnnnnnnnnnnnnnnnnnnnnnnnnnnnnnnnnnnnnnnnnnnnnnnnnnnnnnnnnnnnnnnnnnnnnnnnnnnnnnnnnnnnnnnnnnnnnnnnnnnnnnnnnnnnnnnnnnnnnnnnnnnnnnnnnnnnnnnnnnnnnnnnnnnnnnnnnnnnnnnnnnnnnnnnnnnnnnnnnnnnnnnnnnnnnnnnnnnnnnnnnnnnnnnnnnnnnnnnnnnnnnnnnnnnnnnnnnnnnnnnnnnnnnnnnnnnnnnnnnnnnnnnnnnnnnnnnnnnnnnnnnnnnnnnnnnnnnnnnnnnnnnnnnnnnnnnnnnnnnnnnnnnnnnnnnnnnnnnnnnnnnnnnnnnnnnnnnnnnnnnnnnnnnnnnnnnnnnnnnnnnnnnnnnnnnnnnnnnnnnnnnnnnnnnnnnnnnnnnnnnnnnnnnnnnnnnnnnnnnnnnnnnnnnnnnnnnnnnnnnnnnnnnnnnnnnnnnnnnnnnnnnnnnnnnnnnnnnnnnnnnnnaggcgcagctcaactgtgaggaagcaggnnnnnnnnnnnnnnnnnnnnnnnnnnnnnnnnnnnnnnnnnnnnnnnnnnnnnnnnnnnnnnnnnnnnnnnnnnnnnnnnnnnnnnnnnnnnnnnnnnnnnnnnnnnnnnnnnnnnnnnnnnnnnnnnnnnnnnnnnnnnnnnnnnnnnnnnnnnnnnnnnnnnnnnnnnnnnnnnnnnnnnnnnnnnnnnnnnnnnnnnnnnnnnnnnnnnnnnnnnnnnnnnnnnnnnnnnnnnnnnnnnnnnnnnnnnnnnnnnnnnnnnnnnnnnnnnnaatggacaacctgcaggagagagctctgcacatccggaaagtcctgctggtcctgcccaaaaccactctgatcatcatgagatacctctttgccttcctcaatcannnnnnnnnnnnnnnnnnnnnnnnnnnnnnnnnnnnnnnnnnnnnnnnnnnnnnnnnnnnnnnnnnnnnnnnnnnnnnnnnnnnnnnnnnnnnnnnnnnnnnnnnnnnnnnnnnnnnnnnnnnnnnnnnnnnnnnnnnnnnnnnnnnnnnnnnnnnnnnnnnnnnnnnnnnnnnnnnnnnnnnnnnnnnnnnnnnnnnnnnnnnnnnnnnnnnnnnnnnnnnnntgatagccctcatggagagactacctcggttgaagactcaacccaggatgtgactgcagagcaccacacgagtgatgacgnnnnnnnnnnnnnnnnnnnnnnnnnnnnnnnnnnnnnnnnnnnnnnnnnnnnnnnnnnnnnnnnnnnnnnnnnnnnnnnnnnnnnnnnnnnnnnnnnnnnnnnnnnnnnnnnnnnnnnnnnnnnnnnnnnnnnnnnnnnnnnnnnnnnnnnnnnnnnnnnnnnnnnnnnnnnnnnnnnnnngaggacggtgtcgtggagaggtccagccccaagtctgagattgaggtcatttctgagccacctgaagaaaaggtgacagccagagcgggggccagctgtcccagtgggggtcatgtagccgatatttatcttgcaaacatcaacaagnnnnnnnnnnnnnnnnnnnnnnnnnnnnnnnnnnnnnnnnnnnnnnnnnnnnnnnnnnnnnnnnnnnnnnnnnnnnnnnnnnnnnnnnnnnnnnnnnnnnnnnnnnnnnnnnnnnnnnnnnnnnnnnnnnnnnnnnnnnnnnnnnnnnnnnnnnnnnnnnnnnnnnnnnnnnnnnnnnnnnnnnnnnnnnnnnnnnnnnnnnnnnnnnnnnnnnnnnnnnnnnnnnnnnnnnnnnnnnnnnnnnnnnnnnnnnnnnnnnnnnnnnnnnnnnnnnnnnnnnnnnnnnnnnnnnnnnnnnnnnnnnnnnnnnnnnnnnnnnnnnnnnnnnnnnnnnnnnnnnnnnnnnnnnnnnnnnnnnnnnnnnnnnnnnnnnnnnnnnnnnnnnnnnnnnnnnnnnnnnnnnnnnnnnnnnnnnnnnnnnnnnnnnnnnnnnnnnnnnnnnnnnnnnnnnnnnnnnnnnnnnnnnnnnnnnnnnnnnnnnnnnnnnnnnnnnnnnnnnnnnnnnnnnnnnnnnnnnnnnnnnnnnnnnnnnnnnnnnnnnnnnnnnnnnnnnnnnnnnnnnnnnnnnnnnnnnnnnnnnnnnnnnnnnnnnnnnnnnnnnnnnnnnnnnnnnnnnnnnnnnnnnnnnnnnnnnnnnnnnnnnnnnnnnnnnnnnnnnnnnnnnnnnnnnnnnnnnnnnnnnnnnnnnnnnnnnnnnnnnnnnnnnnnnnnnnnnnnnnnnnnnnnnnnnnnnnnnnnnnnnnnnnnnnnnnnnnnnnnnnnnnnnnnnnnnnnnnnnnnnnnnnnnnnnnnnnnnnnnnnnnnnnnnnnnnnnnnnnnnnnnnnnnnnnnnnnnnnnnnnnnnnnnnnnnnnnnnnnnnnnnnnnnnnnnnnnnnnnnnnnnnnnnnnnnnnnnnnnnnnnnnnnnnnnnnnnnnnnnnnnnnnnnnnnnnnnnnnnnnnnnnnnnnnnnnnnnnnnnnnnnnnnnnnnnnnnnnnnnnnnnnnnnnnnnnnnnnnnnnnnnnnnnnnnnnnnnnnnnnnnnnnnnnnnnnnnnnnnnnnnnnnnnnnnnnnnnnnnnnnnnnnnnnnnnnnnnnnnnnnnnnnnnnnnnnnnnnnnnnnnnnnnnnnnnnnnnnnnnnnnnnnnnnnnnnnnnnnnnnnnnnnnnnnnnnnnnnnnnnnnnnnnnnnnnnnnnnnnnnnnnnnnnnnnnnnnnnnnnnnnnnnnnnnnnnnnnnnnnnnnnnnnnnnnnnnnnnnnnnnnnnnnnnnnnnnnnnnnnnnnnnnnnnnnnnnnnnnnnnnnnnnnnnnnnnnnnnnnnnnnnnnnnnnnnnnnnnnnnnnnnnnnnnnnnnnnnnnnnnnnnnnnnnnnnnnnnnnnnnnnnnnnnnnnnnnnnnnnnnnnnnnnnnnnnnnnnnnnnnnnnnnnnnnnnnnnnnnnnnnnnnnnnnnnnnnnnnnnnnnnnnnnnnnttgatgtgaattggtcattggcgtttgctcttgctctcctccatcccctagaagtacaccccagtcttattaaggagcttttaaagtttttctgaatgtatagacatttctcgggttcctacctttgtctctgatggaccattttccatttaagacattttcctatataagacagttttatagctggttcgttttagggtaaagagtcttaagagagttttattgtgtctgtggcaggtttggaaaaggtaagaaatgggtcctttttccgcctaatgtttttggcacttaaaacataaaattcattatcctattaaaaaattaaattcagctttgctaatccagaaattgttcccaaatgaaaacttgttttaagtccaccccttagtttggttattttacaaggtctctcttcagggaccaacagggcttagagagccttagttagattaaagggagaccctgcctcctaaaaccagttttcattgatccaaacaaggacaattaagggaattctgaccccacgggttctcaagtcttcccaaggccggaatctaaagaaagttaaaatttgaatgctgaatattttggctctactctggccttttttctggttcccttccaaaatgcacaaatatacccttgtctgctccaatccagtctccaaacctggtgtccgtggtcctggcccccctagcatcatgctatcccaggagtaccaggaccggagacatccacagccaggctcatggttctcagacagcaacttgagttaaagctgaaactcatccttcttctctgtgttttctggtttaaagctgcacttacattttggccttattnnnnnnnnnnnnnnnnnnnnnnnnnnnnnnnnnnnnnnnnnnnnnnnnnnnnnnnnnnnnnnnnnnnnnnnnnnnnnnnnnnnnnnnnnnnnnnnnnnnnnnnnnnnnnnnnnnnnnnnnnnnnnnnnnnnnnnnnnnnnnnnnnnnnnnnnnnnnnnnnnnnnnnnnnnnnnnnnnnnnnnnnnnnnnnnnnnnnnnnnnnnnnnnnnnnnnnnnnnnnnnnnnnnnnnnnnnnnnnnnnnnnnnnnnnnnnnnnnnnnnnnnnnnnnnnnnnnnnnnnnnnnnnnnnnnnnnnnnnnnnnnnnnnnnnnnnnnnnnnnnnnnnnnnnnnnnnnnnnnnnnnnnnnnnnnnnnnnnnnnnnnnnnnnnnnnnnnnnnnnnnnnnnnnnnnnnnnnnnnnnntgaaaatgaaaccccatctttcactttacattcctttcagtccaactgatcaaaactagtacccacacttgccgtttctccctctctccagcacactcccctctaagaaagtaaaagcaaagctttcttaatggcaacgctttgggcctgttctgttgctcctgccttatttctctttcaaccctgtatgtaactcgtgttcaccatccccttgatcagtgtccatccgcgctaatttgcatcatgaactgaacagtgtgtgagtggtcccctactaaacccaactctgggggcagagctgtcttccccatctctggtgctcctgacacctgtgagatggtcctgtcgagaggactaggaaccgataggaggagagtccttctcggcagagctcactgcaaacaactggaattgaggttgcacactgtgatttttacaccgaaaagccaaaaggagctggccatccagggcctagggagaccagccttcctcagctatgcttgccgaaaccagcatgatgcttcaaagagccctgctctgcccctcatggcatggatccttttcctggtgtggactccgaagggtcagtctttggggaagagaggtggggtggggctactagcatcccaatttagaaaatagaggagtttgtagccagaagcctgtaaactggaaacactggtctcaaccaacctcctcagggcgccctggcttctccccaaggagatgaggagcagtgatgccagcaccagtatgcgcagagcactggaagggctggtgcagatctacttcccgagcggaagagaagtcagatcttccagggaatcgcaatg

SEQ ID NO: 30766 - DNA, 643 bp, Macaca Mulatta
ctagttgctatggcaaccatctttcaaccccactggtcttttcatactctctcctgccttcctttgtccttccctgagttcctccagagagactaggttattctccgccatagagctaactggggtctatacgttgggtgctgagaccctgatccccctcatttgatgaggaaatgagctacttttccctagacatcagcccagttctcttttatctgacttctgtttcttatcccataacttacttgtatctattatgtgtctcttccatcactctccatactctttcttgtgattctcctctagccatatatatgggccccatctctgttctgttccctccatctacgcacagctttcccccactctctctaatcctgtatctttctgactgtcctgtccctggccagaaggaagggaggatactgtgtttgggactgtatctcagcaatcacttgttaatgtatttgggtcaaatgagaggcctcaataaagacatctggggcagcatgaacaagtgtatgttggtgaaatctccccgctgtggcaggaggaggtggcctcagataggggattcagatgtgggtgccttgctagggatgagcagggggactcttatagtgggggctggggttcctccagg

SEQ ID NO: 30767 - DNA, 486 bp, Macaca Mulatta
ggccgggcccaggtgcgcggcgaagagcctttgaggaataaaaagccattctacgagctcagacagagcggtgagtcccgtcggggcttcggcatccactggggccgcgcaaggggcagcagaggcgccaagtgcgcttccagggtgggtgcagttccggggcctaccacaagatggcgcggagacaccggggcgcggttctaggaggctcgagggtgcctgaccgtgggcgccggagccgcaggagcaagcgcaccgtgcgggcggcgggggctggttttgtgctgggagcagagcgagagggtgtggggggcgtttcctgaccttgccaccgccctaacggacttccgaaaccattctgctcactgtggctttgagttcttccaatacagccccaaaaccctgtccccaaaccattttgccccatgtccctgggcgcccccaacacaataccgaccgcctcccatctcagcttagccacgctcc

SEQ ID NO: 30768 - DNA, 620 bp, Macaca Mulatta
  misc_feature (1)...(620): n = A,T,C or G
agcaacccttcattgatgaagatcctgataaggaaaagaaaataaaggaacttgagttgctgcttatgtcagctgagaatgaagttagaagaaagcgaattccatcnnnnnnnnnnnnnnnnnnnnnnnnnnnnnnnnnnnnnnnnnnnnnnnnnnnnnnnnnnnnnnnnnnnnnnnnnnnnnnnnnnnnnnnnnnnnnnnnnnnnnnnnnnnnnnnnnnnnnnnnnnnnnnnnnnnnnnnnnnnnnnnnnnnnnnnnnnnnnnnnnnnnnnnnnnnnnnnnnnnnnnnnnnnnnnnnnnnnnnnnnnnnnnnnnnnnnnnnnnnnnnnnnnnnnnnnnngatcctgtagcatggagtgatgttaccagttttgatatttctgatgctgctgcttctcctatcaaatccaccccagttaaattaatgagaattcagcacaatgaaggatccatggaatgccaatttaacgtcagtcttgtacttgaagggaaaaaaaacacttgtaatggtggcaacagtgaagctgttcctttaacatccccaaatgtagccaagtttagcactccaccagccatactcagaaagaagagaaaaatgcgagtgggcctttccccaggca

SEQ ID NO: 30769 - DNA, 130 bp, Macaca Mulatta
ttattattcatttgcgatataattgatgttaccgagtagtgagcttggaagtagaggagagaaagcgctatcccaaagcatatgtttcagttagagttgatgaagtggacctgaacgaagttaggacacg

SEQ ID NO: 30770 - DNA, 342 bp, Macaca Mulatta
  misc_feature (1)...(342): n = A,T,C or G
gggaaaaccaaaatgctacacatttctacctatgatccttttcttaatgatgctggtcttggtcttgtttgnnnnnnnnnnnnnnnnnnnnnnnnnnnnnnnnnnnnnnnnnnnnnnnnnnnnnnnnnnnnnnnnnnnnnnnnnnnnnnnnnnnnnnnnnnnnnnnnnnnnnnnnnnnnnnnnnnnnnnnnnnnnnnnnnnnnnnnnnnnnnnnnnnnnnnnnnnnnnnnnnnnnnnnnnnnnnnnnnnnnnnnnnnnnnnnnnnnnnnnnnnnnnnnnnnnnnntcaacgagcagttcaggctccagaacaccaccatcgggttaactgtgtttgccatca

SEQ ID NO: 30771 - DNA, 1648 bp, Macaca Mulatta
  misc_feature (1)...(1648): n = A,T,C or G
ggggggaagtgacgcgaggcgtagcggaagttactgcagccgcggtgttgtgctgtggggaagggagacggatttgtaaatcccggagcgaggttctgcctacccgaggccgctgctgtgcggagacccccgggtgaagccaccgtcatcatgtctgaccaggaggcaaaaccttcaactgaggacttgggggataagaaggaaggtgaatatattaaactcaaagtcattggacaggatagcagtgagattcacttcaaagtgaaaatgacaacacatctcaagaaactcaaagaatcatactgtcaaagacagggcgttccaatgaattcactcaggtttctctttgagggtcagagaattgctgataatcatactccaaaagaactgggaatggaggaagaagatgtgattgaagtttatcaggaacaaacggggggtcattcaacagtttagatatnnnnnnnnnnnnnnnnnnnnnccctcaatcnnnnnnnnnnnnnnnnnnnnnttcttttgtaatgtggtgttcaaaacggaattgaaaactggcacccatctctttgaaacatctggtaatttgaattctagtgctcattattcattattgtttgttttcattgtgctgatttttggtgatcaagcctcagtccccttcatattaccctctcctttttaaaaattacgtgtgcacagagaggccaccttttttccagacattgcattttcaggctttgtggtgataaataagatcgacccatgcaagtgtttcataatgactttccaattggccctgatgttctagcatgtgattgcttcactcctggactgtgactttcagtgggagatggaagtttttcagagaactgaactgtggaaaaatgacctttccttaacttgaagctacttttaaaatttgagggtctggaccaaaagaagaggaatatcaggttgaagtcaagatgacacataaggtgagagtaatgaccaactccaaagatggcttcactgaagaaaaaggcattttaagattttttaaaaatccttgtccgaaagatcccagaaaaaggttcctaatttttccattaagccaatttaattaaaggctattacattgccactaaaatatggaatttccaaccggaaaacttcttggcatccttttttttgtgaatgtttttaatattttgaataaacatttgtttttttggggcgccttggggggagaatataatagggctgatgtnctttttataacaaatgatggtaacacattattgtgtttctcgtggtccaactcacagaccccttttttcattttttattagacaataaaagaaacccaaaactaacttgtttggttataaaaagaaaatacccgatgagacgtcaataacaggccccttaagaattttattaaatatgagtaaaaaattgtggtggttggtgggaaacttttaaaatacagatggtaaattaattgctctctctaaaaataagtaaagggggtttttgtgaactagtgccaaattaaatttatctttgggtgaaaatattgaccacccacatatggtaaactaaaaatatatttttttcctatacaatttataagtggttacctagcgagtgttgatatggtttaacatga

SEQ ID NO: 30772 - DNA, 682 bp, Macaca Mulatta
gctgcgctgctacagatgctaccacttctgtggctgctaccccactcctgggccgtcccggaagctcctactccagtgtggcgagatgacctgcaaaaccacacgttcctgcacacagtgtactgccaggatgggagtcccagtatgggactctctgaggcctacgacgaggaccagcttttcttcttcgacttttcccagaacactcgggtgcctcgcctgcctgaatttgctgattgggctcaggaacagggagatgctcctgccattttatttgacaaagcattctgcgagatgatgatccagcaaatagggccacaacttgatgggaaaatcccggtgtccagagggtttcctatcgctgaggtgttcacgctgaagcccctggagtttggcaaacccaacacgttggtctgttttgtcagtaatctcttcccacccatgctgacagtgaactggcagcatcattccgtccctgtggaaggatctgggcctacttttgtctcagctgtcgatggactcagcttccaggccttttcttacttaaacatcacaccggaaccttctgacattttctcctgcattgtgactcacgaaattgaccgctacacagcaattgcctattgggtgccccagaacgcactaccctcagatctgctggagaatgtgctgtgtggcgtgg

SEQ ID NO: 30773 - DNA, 193 bp, Macaca Mulatta
agcccagtacaacatcagcgctctagtcacgattgccaccaagaccttcctccgttatgatcggctacgggctctcatcaccagtatccgccgcttctacccaacggttaccgtggtcatcgccgacgacagtgacaagccagagcgcgttagtggcccctacgtggaacactatctcatgcccttcggcaag

SEQ ID NO: 30774 - DNA, 409 bp, Macaca Mulatta
accagctggacaacttcttctgtgatgtcccacaggtcatcaagctggcctgcaccaacacgtttgtggtagagcttctgatggtcttcaacagcggcctgatgacacttctgtgctttctggggcttctggcctcctatgcagtcattctttgtcgcatacgagggtcttcttctgaggcgaaaaacaaggccatgtccacatgcaccacccatatcattgttatattcttcatgtttggacctggcatcttcatctacacgcgccccttcagggctttcccagctgacaaggtggtttctctcttccatacagtgatttttcctttgttgaatcctgtcatttacactcttcgcaaccaggaagtgaaagcttccatgaaaaaggtgtttaataagcacatagcctg

SEQ ID NO: 30775 - DNA, 199 bp, Macaca Mulatta
ggtgttcatgcgcgccctcttccactacaaccctcgcgaggaccgggccatcccttgtcaggaggcgggcctgcccttccagcgcaggcaggtcctggaagtggtgagccaggacgaccccacgtggtggcaggccaagcgagtcggggacaccaaccttcgagccggcctcatcccctccaagcggttccaggagagg

SEQ ID NO: 30776 - DNA, 557 bp, Macaca Mulatta
ccgggccatggacacatggaattatcgtgtttcccttcactttggttcatgtttgaaatttccaaaactaaaaaacagtgacttgttcagtaaattccagtatgaataaattgcatgttttgtaataaatacttctctacagagtcacactctcagttgataaatcaaaacttgttggataaaacaaagtaaatttctcctcacatttaaacattgactgtaaactcattacaaacacttctaaatatttaatgaaaactacaagcttaacatatctgatccaaaaatgccttaaatacctcagcccagacacccacacactgaggatgattccctcaaactggttctgaaagtagtagcctgcttttctctagcccgttcttattctttctcagacgtgctcttagcaccctcctggggattagcatccgacccacatcactcgggaaaagccctggccggcggctgccaggcgggggcaccacactgaggccaagtgccgctgcccagtgagcctgactgccccctcgagctctttcctttcacatttacttatt

SEQ ID NO: 30777 - DNA, 716 bp, Macaca Mulatta
  misc_feature (1)...(716): n = A,T,C or G
cccctcggactggcacagggntcctacagagtcagaggaggcctcgagatttcanaatggacagtaaatggcctcttctgccagccacaggcaggaagctcctgtaaccacggcatccaccagtggcagtacagggtgggcttacaggagggctgcaagtgcagacagcagctggggccaaagaggtgttaagctgaaaggctgcgaagagaataggctactggaaaaccaaacccagcagaattaatgtccaaaaatccacgttctccatcgcttctcagcctttggctaagattaaatannnnnnnnnnnnnnnnnnnnnnnnnnnnnnnnnnnnnnnnnnnnnnnnnnnnnnnnnnnnnnnnnnnnnnnnnnnnnnnnnnnnnnnnnnnnnnnnnnnnnnnnnnnnnnnnnnnnnnnnnnnnnnnnnnnnnnnnnnnnnnnnnnnnnnnnnnnnnnnnnnnnnnnnnnnnnnnnnnnnnnnnnnnnnnnnnnnnnnnnnnnnnnnnnnnnnnnnnnnnnnnnnnnnnnnnnnnnnnnnnnnnnnnnnnnnnnnnnnnnnnnnnnnnnnnnnnnnnnnnnnnnnnnnnnnnnnnnnnnnnnnnnnnnnnnnnnnnnnnnnnnnnnnnnnnnnnnnnnnnnnnnnnnnnnnnnnnnnnnnnnnnnnnnnnnnnnnnnnnnnnnnnnnnnnnnnnnnnnnnnnnnnnnnnnnnnnn

SEQ ID NO: 30778 - DNA, 615 bp, Macaca Mulatta
gttactccctggttactttgggagtcttatttggaactcctgaagtccctgtgtctggggccagcactgatccacacagctaagtttgcactcgtcttccctctcatgtatcatacctagaatgggatctgacatttgatgtgggactaggaaaaggcctgaagattccccagctataccagtgtggagtggttgtccttgttcttactgtgttgtcctctatggggctggcagccacgtgaagaacggaggttcccagcatcatcttcctacacattattacattcacccatctttctgtttgtcattcttatctccagcctgggaaaagttctccttatttgtttagatccttttgtgctttcagatccccttggagcagtagagtaccttgtagaccataatagtggaaaagggtctagttttccccttgtttctaaagatggggtggctgcaaaactcccctttttttgccctcagcttgcctactctctgcctagaagcagttattctgtctccatattgggctttgattgtgctgaggatcagcttttggctccttcttctggagacactggaaacaatgccagctctgtggcttgtgccctgcggact

SEQ ID NO: 30779 - DNA, 613 bp, Macaca Mulatta
  misc_feature (1)...(613): n = A,T,C or G
agacgtcatcccttttatgccatcgtagacttcatattggagagaaaccttacaagtgtaatgagtgtggtaagaccttccgtcacaattcaggccgtgtaattcatcaggcaannnnnnnnnnnnnnnnnnnnnnnaagtgtaatgaatgtggcaaggtttttaatcaacaagcaacccttgcacgtcatcatagacnnnnnnnnnnnnnnnnnnnnnnnaaatgtgaagaatgtgacaaagtttttggtcgcaaatcactccttgaaacacataagagaattcatactggagagaaatcttacaagtgtaatcagtgtggcaaagcctttagtgggcagtcaacacttattcaccatcaagcaatccgtggtatagggaaactttacaaacgtaatgattgtcacaaagtcttcagtaacactacaaccattgcaaataattggaaaattcataataaagagagatcttacaagtgtaataaatgtggcaaatttgtcagacatcattcaaatcttgcagttcatcagcaaattcatactggagggaaacccttaccagtgtaatgagtgtggcaagacctttcagtcagacgtcatcccttgtatgccat

SEQ ID NO: 30780 - DNA, 94 bp, Macaca Mulatta
ggaccctgtggatttagacatataccaaagctcccacatggtcgactatcaaccctacgggaagcacaaatactccagggtcacgccgcaagag

SEQ ID NO: 30781 - DNA, 583 bp, Macaca Mulatta
ccagcctggccacccccgccctgctctccgcacagactacagacagccatacggtgccctcccctcggccggcagggcctgaccactgcccgttgggtacagccagatcggtagatgggcacagcctgggcaggggctgtgtcctgcccccagagaccttgtcatccccagggacccagagctctcgacggccactcgcctcccagccccaccttggcctccatcacctcctccccatctcttttttgggaagcttaaattctctctatttttttaaatgtcctctctgtgtccatggccctccatgcaagccccaggacaatggcgtcatgaggcagtgacctgagaagcgtgtgtacctgtgccccagcaagggcaggggtggcctctgcgggcaggcccactgcctggtaccgcacccccccagcctgaatctggagcagcagtggggaggggcctgagggggaggcactgtccggaggcgggctcggggcctgagcctaggcaggcacaaagggagagagccacgtgcagacacatgcagactcacagacaaacccgggaaaacacacacacagctgtg

SEQ ID NO: 30782 - DNA, 681 bp, Macaca Mulatta
  misc_feature (1)...(681): n = A,T,C or G
gttttgggttttggccacgcccaaagtcttacagaaagaggacaatcaagtcgacgnttcgcttctttggccaccaccaccagagggcctggattccttctgaaaacattcaagatatcacagtcaacattcatcggctgcacgtgaagcgcagtatgggttggaaaaaggcctgtgatgagctggagctgcatcagcgtttcctacgagaagggagattctggaaatctaagaatgaggaccgaggtgaggaagaggcagaatccagtatctcctccaccagtaacgagcagctaaaggtcactcaagaaccaagagcaaagaaaggacgacgtaatcaaagtgtggagcccaaaaaggaagaaccagagcctgaaacagaagcagtaagttctagccaggaaatacccacgatgcctcagccaatcgaaaaagtctccgtgtcaactcagaccaagaagttaagtgcctcttcaccaagaatgctgcatcggagcacccagaccaccagtgatggcgtgtgtcagagcatgtgccatgacaaatacacgaagatcttcaatgacttcaaagaccggatgaagtcggaccacaagcgggagacagagcgtgttgtccgagaagctctggagaagctgcgttctgagatggaagaagaacagagacaagctgtaaataaag

SEQ ID NO: 30783 - DNA, 771 bp, Macaca Mulatta
ccgacgctttgatccagcccggtgtatggaatacacactgggacttgccccttaaaggcactgaccccccagggaggccgccggcccctcctttaaaaagtacagctgctccggccgctgagccgggtggagatcttgcctgtgccctatgtcactgaggcctcacgtctcactgtgctcctgcctctagctgcggctgagcgtgacctggcccctggcttcctggaggcctttgccactgcagcactggagcctggtgatgctgcggcagccctgaccctgctgctactgtatgagccgcgccaggcccagcgcgcagcgcacgcagatgtcttcgcacctgtcaaggcccacgtggcagagctggagcggcgtttccccgttttttgggtgccatggctcagtgttcagacagtcgcaccctcaccactgcgcctcatggatctactctccaagaagcacccactggacacactgttcctgctggccgggacagacacggtgctcacgcctgacttcctgaaccgctgccgcatgcatgccatctccggctggcaggccttctttcccatgcacttccaagccttccacccagctgtggccccaccacaagggcctgggcccccagagctgggccgtgacactggccgctttgatcgccaggcagccatcgaggcctgcttctacaactctgactacgtggcagcccgagttcccctggcggcagtctcagaacttcaagaggacctgctggagagcctgcacgtgtac

SEQ ID NO: 30784 - DNA, 1811 bp, Macaca Mulatta
  misc_feature (1)...(1811): n = A,T,C or G
gcaaggcccgggcgagccagttgatgccgggggacagcctgccacggcgcgggctgggggagaccgggatcgggacggctgcggcagggccgggggtggagcgcgctggggccgccaaggcgtcgcgctggcgcgggcggcagaaccgcgagaaacgcttcacgttcgtgctggccgtggtcatcggagtgttcgtggtgtgctggttccccttcttcttcacctacacgctcacagccgtcgggtgctcagtgccgcgcacgctcttcaagttcttcttctggttcggctactgcaacagctcgctgaacccggtcatctacaccatcttcaaccacgacttccgccgcgccttcaagaagatcctctgccgcggggacaggaagcggatcgtgtgaggtttccgccggcgcccgcgtagactcacgccgactgcaggcagcaaggcaccaaggagtgctcagccccagggcactcagaaacccgggccctgtctgctctgcgtttcctcctctggggtggctctgcagcctcctgcgggcgggcgtctgctgctcctacaagggaagcgttcttgctgccagacccacgcatccccagttgttggtttggccactcttgacctggagccatcttcccggtgggccaccccaacaagtattgcttcctgaagtaattttcaccttcttcccctggtatagccctcacagctcttcagagcaagcactggactnnnnnnnnnnnnnnnnnnnnnnnnnnnnnnnnnnnnnnnnnnnnnnnnnnnnnnnnnnnnnnnnnnnnnnnnnnnnnnnnnnnnnnnnnnnnnnnnnnnnnnnnnnnnnnnnnnnnnnnnnnnnnnnnnnnnnnnnnnnnnnnnnnnnnnnnnnnnnnnnnnnnnnnnnnnnnnnnnnnnnnnnnnnnnnnnnnnnnnnnnnnnnnnnnnnnnnnnnnnnnnnnnnnnnnnnnnnnnnnnnnnnnnnnnnnnnnnnnnnnnnnnnnnnnnnnnnnnnnnnnnnnnnnnnnnnnnnnnnnnnnnnnnnnnnnnnnnnnnnnnnnnnnnnnnnnnnnnnnnnnnnnnnnnnnnnnnnnnnnnnnnnnnnnnnnnnnnnnnnnnnnnnnnnnnnnnnnnnnnnnnnnnnnnnnnnnnnnnnnnnnnnnnnnnnnnnnnnnnnnnnnnnnnnnnnnnnnnnnnnnnnnnnnnnnnnnnnnnnnnnnnnnnnnnnnnnnnnnnnnnnnnnnnnnnnnnnnnnnnnnnnnnnnnnnnnnnnnnnnnnnnnnnnnnnnnnnnnnnnnnntttccagtgtccctctctccctgcagggccactgcttgaagaagaatatgtatgtttctatcttgtatgtatgtgcgcccctcctgcccccaaagtgctgactatgggaaaatcttttagctgctgtttttagacaccaaggagtggaaatnatgtggaagaagcaaacctgatacaatttgcccaaggtaaacagtttgaaaagacaaatgggcctgccaaactgtacagttcctgccccaagagctgttaggtatcaaagtgtggtcctttcccccctccctgcttttctggttgagatcatgtcattgatgaactgccaaagtcaggggaggagggcggagaccttgtgtttacatctgcgtttctacatgttttagacagagacaatttaaggcctgcactcttatttcactaaagaaaaactaatgtcagcacatgttgctaatgacagtggattttttttaaataaaaaagtttacagatcaaatgtgaaataaatatgaatgaagtggt

SEQ ID NO: 30785 - DNA, 3671 bp, Macaca Mulatta
  misc_feature (1)...(3671): n = A,T,C or G
ngcctggcgcagttggtgattcctgcctccaatccccagggcttctgggccctgcctgaaaacctggcagtggtgaagggggcctcggtggagctgcggtgtggggtcagcaccccggcagtgcggtgcaatgggccaaagatgggctgctcctgggcccccaccccaggatcccaggcttcccgaggtaccgcctggaaggggaccctgctagaggnnnaggtgaattccacctgcacatcgaggcctgtgacatcagcgatgacgcggagtatgagtgccaggtcggccgctccgagatggggccagagctcgtgtctcccagagtgatcctctccgtcctgnnnnnnnnnnnnnnnnnnnnnnnnnnnnnnnnnnnnnnnnnnnnnnnnnnnnnnnnnnnnnnnnnnnnnnnnnnnnnnnnnnnnnnnnnnnnnnnnnnnnnnnnnnnnnnnnnnnnnnnnnnnnnnnnngtggacagacaatatccgacatctctgcaaacatgaacgagggctcccagcagaagctcttcactgtggaggccacagccagnnnnnnnnnnnnnnnnnnnnnnnnnnnnnnnnnnnnnnnnnnnnnnnnnnnnnnnnnnnnnnnnnnnnnnnnnnnnnnnnnnnnnnnnnnnnnnnnnnnnnnnnnnnnnnnnnnnnnnnnnnnnnnnnnnnnnnnnnnnnnnnnnnnnnnnnnnnnnnnnnnnnnnnnnnnnnnnnnnnnnnnnnnnnnnnnnnnnnnnnnnnnnnnnnnnnnnnnnnnnnnnnnnnnnnnnnnnnnnnnnnnnnnnnnnnnnnnnnnnnnnnnnnnnnnnnnnnnnnnnnnnnnnnnnnnnnnnnnnnnnnnnnnnnnnnnnnnnnnnnnnnnnnnnnnnnnnnnnnnnnnnnnnnnnnnnnnnnnnnnnnnnnnnnnnnnnnnnnnnnnnnnnnnnnnnnnnnnnnnnnnnnnnnnnnnnnnnnnnnnnnnnnnnnnnnnnnnnnnnnnnnnnnnnnnnnnnnnnnnnnnnnnnnnnnnnnnnnnnnnnnnnnnnnnnnnnnnnnnnnnnnnnnnnnnnnnnnnnnnnnnnnnnnnnnnnnnnnnnnnnnnnnnnnnnnnnnnnnnnnnnnnnnnnnnnnnnnnnnnnnnnnnnnnnnnnnnnnnnnnnnnnnnnnnnnnnnnnnnnnnnnnnnnnnnnnnnnnnnnnnnnnnnnnnnnnnnnnnnnnnnnnnnnnnnnnnnnnnnnnnnnnnnnnnnnnnnnnnnnnnnnnnnnnnnnnnnnnnnnnnnnnnnnnnnnnnnnnnnnnnnnnnnnnnnnnnnnnnnnnnnnnnnnnnnnnnnnnnnnnnnnnnnnnnnnnnnnnnnnnnnnnnnnnnnnnnnnnnnnnnnnnnnnnnggactcgcgcactgtgactgagtcgctgctgccgcaggagccgcggtgcatgcagctcggcaacgtggagaaatctgggagcaccttctcccgagagctggtgctggtcacagggccgtgggacaaccaggccaagttcatgtgcaaggctggccagctcagcgcgtccacgtagctggcggtgcagtnnnnnnnnnnnnnnnnnnnnnnnnnnnnnnnnnnnnnnnnnnnnnnnnnnnnnnnnnnnnnnnnnnnnnnnnnnnnnnnnnnnnnnnnnnnnnnnnnnnnnnnnnnnnnnnnnnnnnnnnnnnnnnnnnnnnnnnnnnnnnnnnnnnnnnnnnnnnnnnnnnnnnnnnnnnnnnnnnnnnnnnnnnnnnnnnnnnnnnnnnnnnnnnnnnnnnnnnnnnnnnnnnnnnnnnnnnnnnnnnnnnnnnnnnnnnnnnnnnnnnnnnnnnnnnnnnnnnnnnnnnnnnnnnnnnnnnnnnnnnnnnnnnnnnnnnnnnnnnnnnnnnnnnnnnnnnnnnnnnnnnnnnnnnnnnnnnnnnnnnnnnnnnnnnnnnnnnnnnnnnnnnnnnnnnnnnnnnnnnnnnnnnnnnnnnnnnnnnnnnnnnnnnnnnnnnnnnnnnnnnnnnnnnnnnnnnnnnnnnnnnnnnnnnnnnnnnnnnnnnnnnnnnnnnnnnnnnnnnnnnnnnnnnnnnnnnnnnnnnnnnnnnnnnnnnnnnnnnnnnnnnnnnnnnnnnnnnnnnnnnnnnnnnnnnnnnnnnnnnnnnnnnatgctcccaccatccgtgccctccaggaccccactgaggtgaatgttgggggttctgtggatacagtctgcacggttgatgccaatcccattctcccaggcatgttcagctgggagagactgggagaagatgaggaggaccagagcctggatgacatggagaagatatccaagggacccacggggcgcctgcggattcaccaggccaaactggcccaggctggtgcttaccagtgcatcgtggacaacggggtggcgcctccagcacgagggctggtccgtcttgttgtcagatnttgccccccaggtggaacaccccactcccctaactaaggtggctgcagctggagacagcaccagttctgccaccctccactgccgtgcccgaggtgtccccaacatcgttttcacttggaccaaaaatggggtccttctggatctccaagatcccaggnnggtacacagagcacacataccaccagggtggtgtccacagcagcctcctgaccattgccaatgtgtctgcagcccaggattacgccctcttcacacgcacagccactaacccctaggctcgaaccaagccaacattcaattcgtcagcatcagnnnnnnnnnnnnnnnnnnnnnnnnnnnnnnnnnnnnnnnnnnnnnnnnnnnnnnnnnnnnnnnnnnnnnnnnnnnnnnnnnnnnnnnnnnnnnnnnnnnnnnnnnnnncaggtatgaggccctggggactccagggttccactatatggatgtcctaccaccccaggccaccaccttcacactgactgctctgcagccttctacacgatacaaggtctggctgctggccagcaatgccttgggagacagtggactggctgactaggggacccagcttcccatcactaccccaggtnnnnnnnnnnnnnnnnnnnnnnnnnnnnnnnnnnnnnnnnnnnnnnnnnnnnnnnnnnnncctcggggctgcccctgctgcctgtgctgcttggtcttgggggacttctgctcctctccaatgcctcctgtgtcnnnnnnncctctggcagcggagactcaggcttcttgnnnnnnnnnnnnnnnnnnnnnnnnnnnnnnnnnnnnnnnnnnnnnnnnnnnnnnnnnnnnnnnnnnnnnnnnnnnnnnnnnnnnnnnnnnnnnnnnnnnnnnnnnnnnnnnnnnnnnnnnnnnnnnnnnnnnnnnnnnnnnnnnnnnnnnnnnnnnnnnnnnnnnnnnnnnnnnnnnnnnnnnnnnnnnnnnnnnnnnnaggtttcacaggtgaagatgaggatatggccttccctgggcacttgtatgatgaggcagaaagaacgtaccccctgtctggagccggggaccnnnnnnnnnnnnnnnnnnnnnnnnnntggaacctccgctggcctgaagacgcatatcaggatccaagaggaatctatgaccgggtggcaggagacttggacactctggaacctgattctctgcccttcgagctgaggggacatctggtgt

SEQ ID NO: 30786 - DNA, 2417 bp, Macaca Mulatta
  misc_feature (1)...(2417): n = A,T,C or G
cagcattgttgcaaaacataaggagttagaggggaccagccaggcttcagctgaataccaagttttgcagattgtgtcggcaatggaaaactatggcatagaatggcattctgtgagggatagcgaagggcagaaactgctcattggggttggacctgaaggaatctcaatttgtaaagatgactttagcccaattaatagnnnnnnnnnnnnnnnnnnnnnnnnnnnnnnnnnnnnnnnnnnnnnnnnnnnnnnnnnnnnnnnnnnnnnnnnnnnnnnnnnnnnnnnnnnnnnnnnnnnnnnnnnnnnnnnnnnnnnnnnnnnnnnnnnnnnnnnnnnnnnnnnnnnnnnnnnnnnnnnnnnnnnnnnnnnnnnnnnnnnnnnnnnnnnnnnnnnnnnnnnnnnnncaggtgtgacacagtgaccagcgctgtcatgatgcagtatagccgtgacttgaagggccacttggcatctctgtttctgaatgaaaacattaaccttggcaagaaatatgtctttgatattaaaagaacatcaaaggaggtgtatgaccatgccaggagggctctgtacaatgctggcgttgtggacctcgtttcaagaagcaaccagagcccttcacactcgcctctgaagtcctcagaaagcagcatgaactgcagcagctgtgagggcctcagctgccagcagacccgggcgctgcaggagaagctgcgcaagctgaaggannnnnnnnnnnnnnnnnnnnnnnnnnnnnnnnnnnnnnnnnnnnnnnnnnnnnnnnnnnnnnnnnnnnnnnnnnnnnnnnnnnnnnnnnnnnnnnnnnnnnnnnnnnnnnnnnnnnnnnnnnnnnnnnnnnnnnnnnnnnnnnnnnnnnnnnnnnnnnnnnnnnnnnnnnnnnnnnnnnnnnnnnnnnnnnnnnnnnnnnnnnnnnnnnnnnnnnnnnnnnnnnnnnnnnnnnnnnnnnnnnnnnnnnnnnnnnnnnnnnnnnnnnnnnnnnnnnnnnnnnnnnnnnnnnnnnnnnnnnnnnnnnnnnnnnnnnnnnnnnnnnnnnnnnnnnnnnnnnnnnnnnnnnnnnnnnnnnnnnnnnnnnnnnnnnnnnnnnnnnnnnnnnnnnnnnnnnnnnnnnnnnnnnnnnnnnnnnnnnnnnnnnnnnnnnnnnnnnnnnnnnnnnnnnnnnnnnnnnnnnnnnnnnnnnnnnnnnnnnnnnnnnnnnnnnnnnnnnnnnnnnnnnnnnnnnnnnnnnnnnnnnnnnnnnnnnnnnnnnnnnnnnnnnnnnnnnnnnnnnnnnnnnnnnnnnnnnnnnnnnnnnnnnnnnnnnnnnnnnnnnnnnnnnnnnnnnnnnnnnnnnnnnnnnnnnnnnnnnnnnnnnnnnnnnnnnnnnnnnnnnnnnnnnnnnnnnnnnnnnnnnnnnnnnnnnnnnnnnnnnnnnnnnnnnnnnnnnnnnnnnnnnnnnnnnnnnnnnnnnnnnnnnnnnnnnnnnnnnnnnnnnnnnnnnnnnnnnnnnnnnnnnnnnnnnnnnnnnnnnnnnnnnnnnnnnnnnnnnnnnnnnnnnnnnnnnnnnnnnnnnnnnnnnnnnnnnnnnnnnnnnnnnnnnnnnnnnnnnnnnnnnnnnnnnnnnnnnnnnnnnnnnnnnnnnnnnnnnnnnnnnnnnnnnnnnnnnnnnnnnnnnnnnnnnnnnnnnnnnnnnnnnnnnnnnnnnnnnnnnnnnnnnnnnnnnnnnnnnnnnnnnnnnnnnnnnnnnnnnnnnnnnnnnnnnnnnnnnnnnnnnnnnnnnnnnnnnnnnnnnnnnnnnnnnnnnnnnnagcactcgatccagcttcaccccactggtgttgctttccttgaactgtcaagccttttatagccttaccataagtatttagatattgtgtccttttctgnnnnnnnnnnnnnnnnnnnnnnnnnnnnnntaaagtaactgcttaagtattaactttgggttgtcccctctgtatgtttcaaaggggttttggttctttttgcttctgtattcttaaacatgttttccactcccacttgggcattttggaagctggtcagctagcaggttttctgggatgtcgggagacctagatgaccttatcgggtgcaatactagctgaggtaaagctagaaacctacactgtcactttactgagatttctgagtatacttttcatattgccttaatgtagcagtaatgtgtgtatgcatttgtttctttgcacagacattttgtcaaatattaaaactctacttttttatggcacatattagcatataagcctttattccaagaggtatttattttttcacttgtaaaaaaataatgtttccacgtaaagaactctgttatatcctagaggactctgtctttttatattcaggataataaagactttaaagcaaac

SEQ ID NO: 30787 - DNA, 616 bp, Macaca Mulatta
ctgtcctcttttttcttgggactgagggggtggggaagttccccaacacataatcccaagactgtacccctcacccgcatcttcagatccatttttctgtgtacctgctccagccccacccccacagagataacttgtttttttggggctggggtgagggccggtgaacacatggtgaaagccattcttagttgtgtctctgcaatgctgtgggcacaaaagacagagccccagagtccctgtgcaaacacctagactcgcttcatggattccaaagctctcagcttcattttattagttacgttaggtaagggagctcaaggtcatggtcctcatcacacacatgtcatcggggccctctgcactccacatgatgaggtcagacccacactgtgcaaatctttgggtcagtgagctggagacgagaggagacatgtcaggaatagattaggcaccctctcccttgatgaaatgtggcagtcctctcaggggtaccccacctgcttagggatctgagttcttcagttcctcacccatagctcagcttgggctccctgagttggtcttcaatccactattcattccatccccacccttttcttcttgatcttcctcc

SEQ ID NO: 30788 - DNA, 772 bp, Macaca Mulatta
  misc_feature (1)...(772): n = A,T,C or G
ggtacctctctcacttgccactcacctgtgagttcagcatctgtgaactggctttgcaacctcctgtggtctctaaggaaaccctagagatgttctcagatgacattgagaagaggaaacgtcagcgccaaaagaaggctcgggaggaacgccgccgagagcgcaggattgaaatagaggagaacaagaaacagggcaagtacccagaagtccacattcccctcgagaatctacagcagtttcctgccttcaattcctatacctgctcctccgattctgctttgggtcccaccagcaccgagggccacggggccctctccctttctcctctcagcagaagtccaggttcccatgcagactttctgctgacccctctgtcacccactgccagtcagggcagtccctcattctgcgttgggagtctggaagaagactctcccttcccttcctttgcccagatgctgagggttggaaaagcaaaagcagatgtgtggcccaaaactgctccaaagaaagatgagaacagcttagttcctcctgcccctgtggagagtgatggggagagtgataattcagaccgtgttcctgtgcccagttttcaaaattccttcagccaagctattgaagcagccttcatgaaactggacacaccagctactgcagatcccctctctgaagagaaagggnnnnnnnnnnnnnnnnnnnnagaaaccgaagctcctgttcagcacctcagtcggtcacaccaagtggacacttactggccccaggc

SEQ ID NO: 30789 - DNA, 777 bp, Macaca Mulatta
  misc_feature (1)...(777): n = A,T,C or G
agaaaggccttatgagtgcagagagtgtgggaaagcctttagccacaagcatatccttgtcgagcaccagaaaatccacagtggagaaagaccttatgagtgcagcgaatgccagaaggcctttattagaaagtctcacctggttcatcaccagaaaatccacagtgaagagaggcttgtgtgctccatgagtgtggggaattctttagctaaaactccagcctcattaaacgtcagagatttcacaatggagaaagtttaccattgactattgtaattgggtagtaatgttatataaattccacatttttatgcaactaatctccagaacatttttcctcttgcaaaaaaagtaaaatgctggacccatgaacaacaactcattccccttccctacttccccagaaatgtctcaactatatttctatactctatnnnnnnnnnnnnnnnnnnnnnnnnnntctatgaatttcatatctattggtacctcatataagtggattcatacagtatttatcttttgagactggcttatttcacttaggataaggtcttcacggttcacccacattgtataatgtgtcagaatatccttcctttattaggtgaaaaaatattctgtgctatttatatactacatttatttatccattcatctgttaatggatgcttgggttacttctacctttagcctattgaaataatgctgctatgaagatgagtatacaattgtctattcaagataatactttcaattcttgttgggtatatactcag

SEQ ID NO: 30790 - DNA, 3209 bp, Macaca Mulatta
  misc_feature (1)...(3209): n = A,T,C or G
gacacaagtgagatcagagcctagtaacatgcagttttccttgatgaagacagatgaccgaacctctgctgctgaaagcatggtaagnnnnnnnnnnnnnnnnnnnnnnnnnnnnnnnnnnnnnnnnnnnnnnnnnnnnnnnnnnnnnnnnnnnnnnnnnnnnnnnnnnnnnnnnnnnnnnnnnnnnnnnnnnnnnnnnnnnnnnnnnnnnnnnnnnnnnnnnnnnnnnnnnnnnnnnnnnnnnnnnnnnnnnnnnnnnnnnnnnnnnnnnnnnnnnnnnnnnnnnnnnnnnnnnnnnnnnnnnnnnnnnnnnnnnnnnnnnnnnnnnnnnnnnnnnnnnnnnnnnnnnnnnnnnnnnnnnnnnnnnnnnnnnnnnnnnnnnnnnnnnnnnnnnnnnnnnnnnnnnnnnnnnnnnnnnnnnnnnnnnnnnnnnnnnnnnnnnnnnnnnnnnnnnnnnnnnnnnnnnnnnnnnnnnnnnnnnnnnnnnnnnnnnnnnnnnnnnnnnnnnnnnnnnnnnnnnnnnnnnnnnnnnnnnnnnnnnnnnnnnnnnnnnnnnnnnnnnnnnnnnnnnnnnnnnnnnnnnnnnnnnnnnnnnnnnnnnnnnnnnnnnnnnnnnnnnnnnnnnnnnnnnnnnnnnnnnnnnnnnnnnnnnnnnnnnnnnnnnnnnnnnnnnnnnnnnnnnnnnnnnnnnnnnnnnnnnnnnnnnnnnnnnnnnnnnnnnnnnnnnnnnnnnnnnnnnnnnnnctgtgaaaaaattgaaagatatggagtatctgggaacagtagccagtatttgccttcattctgactatgctgctgcactttttgaaggcaaagtccagttacatttgatagaaagtgaaatattggatgctcaagaagaacgtgagactcggcttttcccagcagtggatgataagtgccgtatcttatgccatgccttaactagtgatttcctcatctatggtacagactggtgtcgttcagtatttctacattgaagactggcaattcgttaatgattatcgacatcctgtcagtgtgaaaaagatttttcccgacccaaatggtaccagattagttttcattgatgaaaaaagtgatggatttgtttactgtccagtnnnnnnnnnnnnnnnnnnnnnnnnnnnnnnnnnnnnnnnnnnnnnnnnnnnnnnnnnnnnnnnnnnnnnnnnnnnnnnnnnnnnnnnnnnnnnnnnnnnnnnnnnnnnnnnnnnnnnnnnnnnnnnnnnnnnnnnnnnnnnnnnnnnnnnnnnnnnnnnnnnnnnnnnnnnnnnnnnnnnnnnnnnnnnnnnnnnnnnnnnnnnnnnnnnnnnnnnnnnnnnnnnnnnnnnnnnnnnnnnnnnnnnnnnnnnnnnnnnnnnnnnnnnnnnnnnnnnnnnnnnnnnnnnnnnnnnnnnnnnnnnnnnnnnnnnnnnnnnnnnnnnnnnnnnnnnnnnnnnnnnnnnnnnnnnnnnnnnnnnnnnnnnnnnnnnnnnnnnnnnnnnnnnnnnnnnnnnnnnnnnnnnnnnnnnnnnnnnnnnnnnnnnnnnnnnnnnnnnnnnnnnnnnnnnnnnnnnnnnnnnnnnnnnnnnnnnnnnnnnnnnnnnnnnnnnnnnnnnnnnnnnnnnnnnnnnnnnnnnnnnnnnnnnnnnnnnnnnnnnnnnnnnnnnnnnnnnnnnnnnnnnnnnnnnnnnnnnnnnnnnnnnnnnnnnnnnnnnnnnnnnnnnnnnnnnnnnnnnnnnnnnnnnnnnnnnnnnnnnnnnnnnnnnnnnnnnnnnnnnnnnnnnnnnnnnnnnnnnnnnnnnnnnnnnnnnnnnnnnnnnnnnnnnnnnnnnnnnnnnnnnnnnnnnnnnnnnnnnnnnnnnnnnnnnnnnnnnnnnnnnnnnnnnnnnnnnnnnnnnnnnnnnnnnnnnnnnnnnnnnnnnnnnnnnnnnnnnnnnnnnnnnnnnnnnnnnnnnnnnnnnnnnnnnnnnnnnnnnnnnnnnnnnnnnnnnnnnnnnnnnnnnnnnnnnnnnnnnnnnnnnnnnnnnnnnnnnnnnnnnnnnnnnnnnnnnnnnnnnnnnnnnnnnnnnnnnnnnnnnnnnnnnnnnnnnnnnnnnnnnnnnnnnnnnnnnnnnnnnnnnnnnnnnnnnnnnnnnnnnnnnnnnnnnnnnnnnnnnnnnnnnnnnnnnnnnnnnnnnnnnnnnnnnnnnnnnnnnnnnnnnnnnnnnnnnnnnnnnnnnnnnnnnnnnnnnnnnnnnnnnnnnnnnnnnnnnnnnnnnnnnnnnnnnnnnnnnnnnnnnnnnnnnnnnnnnnnnnnnnnnnnnnnnnnnnnnnnnnnnnnnnnnnnnnnnnnnnnnnnnnnnnnnnnnnnnnnnnnnnnnnnnnnnnnnnnnnnnnnnnnnnnnnnnnnnnnnnnnnnnnnnnnnnnnnnnnnnnnnnnnnnnnnnnnnnnnnnnnnnnnnnnnnnnnnnnnnnnnnnnnnnnnnnnnnnnnnnnnnnnnnnnnnnnnnnnnnnnnnnnnnnnnnnnnnnnnnnnnnnnnnnnnnnnnnnnnnnnnnnnnnnnnnnnnnnnnnnnnnnnnnnnnnnnnnnnnnnnnnnnnnnnnnnnnnnnnnnnnnnnnnnnnnnnnnnnnnnnnnnnnnnnnnnnnnnnnnnnnnnnnnnnnnnnnnnnnnnnnnnnnnnnnnnnnnnttggtcaggccaaagatgaactgctgaccaatcagctgatagaccacctcttgggggaaaacgatggcatgcctaaggnnnnnnnnnnnnnnnnnnnnnnnnnnnnnnnnnnnnnnnnnnnnnnnnnnnnnnnnnnnnnnnnnnnnnnnnnnnnnnnnnnnnnnnnnnnnnnnnnnnnnnnnnnnnnnnnnnnnnnnnnnnnnnnnnnnnnnnnnnnnnnnnnnnnnnnnnnnnnnnnnnnnnnnnnnnnnnnnnnnnnnnnnnnnnnnnnnnnnnnnnnnnnnnnnnnnnnnnnnnnnnnnnnnnnnnnnnnnnnnnnnnnnnnnnnnnnnnnnnnnnnnnnnnnnnnnnnnnnnnnnnnnnnnnnnnnnnnnnnnnnnncattgtaccaatcctgacgtcaactgtgattgagtgccacagggcaggcctgaagaactctgctttcagcttcgcagctatgttgatgaggcctgaataccgcagcaaaatagatgccaaatacaaaaagaagatcgagggaatggtcaggn

SEQ ID NO: 30791 - DNA, 7115 bp, Macaca Mulatta
  misc_feature (1)...(7115): n = A,T,C or G
tgagagtccgtctatcttctgggtgcttccagatggctccatcctgaaagcgcccatggatgacccagacagcaagttctccattctcagcagtggctggctaaggatcaagtccatggagccatctgactcgggcttgtaccagtgcattgctcaagtgagggatgaaatggaccgcatggtatatagggtacttgtgcagtctccctccactcagccagccgagaaagacacagtgacaattggcaagaacccaggagagccggtgatgttgccttgcaatgctttagcaatacccgaagcccaccttagctggattcttccaaacagaaggataattaatgatttgactaacacatcacatgtatacatgctgccaaatggaactctttccatcccaaaggtccaagtcagcgatagtggttactacagatgtgtggctgtcaaccagcaaggggcagaccattttaccgtgggaatcacagtgaccaagaaagggtctggctcgccatccaaaagaggccgacgcccaggtgcannnnnnnnnnnnnnnnnnnnnnnnnnnnnnnnnnnnnnnnnnnnnnnnnnnnnnnnnnnnnnnnnnnnnnnnnnnnnnnnnnnnnnnnnnnnnnnnnnnnnnnnnnnnnnnnnnnnnnnnnnnnnnnnnnnnnnnnnnnnnnnnnnnnnnnnnnnnnnnnnnnnnnnnnnnnnnnnnnnnnnnnnnnnnnnnnnnnnnnnnnnnnnnnnnnnnnnnnnnnnnnnnnnnnnnnnnnnnnnnnnnnnnnnnnnnnnnnnnnnnnnnnnnnnnnnnnnnnnnnnnnnnnnnnnnnnnnnnnnnnnnnnnnnnnnnnnnnnnnnnnnnnnnnnnnnnnnnnnnnnnnnnnnnnnnnnnnnnnnnnnnnnnnnnnnnnnnnnnnnnnnnnnnnnnnnnnnnnnnnnnnnnnnnnnnnnnnnnnnnnnnnnnnnnnnnnnnnnnnnnnnnnnnnnnnnnnnnnnnnnnnnnnnnnnnnnnnnnnnnnnnnnnnnnnnnnnnnnnnnnnnnnnnnnnnnnnnnnnnnnnnnnnnnnnnnnnnnnnnnnnnnnnnnnnnnnnnnnnnnnnnnnnnnnnnnnnnnnnnnnnnnnnnnnnnnnnnnnnnnnnnnnnnnnnnnnnnnnnnnnnnnnnnnnnnnnnnnnnnnnnnnnnnnnnnnnnnnnnnnnnnnnnnnnnnnnnnnnnnnnnnnnnnnnnnnnnnnnnnnnnnnnnnnnnnnnnnnnnnnnnnnnnnnnnnnnnnnnnnnnnnnnnnnnnnnnnnnnnnnnnnnnnnnnnnnnnnnnnnnnnnnnnnnnnnnnnnnnnnnnnnnnnnnnnnnnnnnnnnnnnnnnnnnnnnnnnnnnnnnnnnnnnnnnnnnnnnnnnnnnnnnnnnnnnnnnnnnnnnnnnnnnnnnnnnnnnnnnnnnnnnnnnnnnnnnnnnnnnnnnnnnnnnnnnnnnnnnnnnnnnnnnnnnnnnnnnnnnnnnnnnnnnnnnnnnnnnnnnnnnnnnnnnnnnnnnnnnnnnnnnnnnnnnnnnnnnnnnnnnnnnnnnnnnnnnnnnnnnnnnnnnnnnnnnnnnnnnnnnnnnnnnnnnnnnnnnnnnnnnnnnnnnnnnnnnnnnnnnnnnnnnnnnnnnnnnnnnnnnnnnnnnnnnnnnnnnnnnnnnnnnnnnnnnnnnnnnnnnnnnnnnnnnnnnnnnnnnnnnnnnnnnnngttctgagagtgaaggccaacagagcaaatccatcactttgcctgactccacactgggtataatgagcagtgtgtctccagttaagaagcctgcagaaaccacagttggcaccctgctagacaaagacaccacaacagcaacaacaactccaaggcaaaaagttgcttcgtcatccaccatgaccactcaccctcctcgaaggagacccaatgggagaaagagattacgcccccacaaattccgccaccgacacaagcaaaccccacccacaacttttgccccatcagagactttttctactcaaccaactcaagcacttgaaattaagatttcaaatcaagtggagagttctccggttcctacagcttgggtggataacacagttaatacccccaaacagttggaaatggagaagaatgcagaacccatatccaagggaacgccacggagaaaacacgggaagaggccaaacaaacatcgatataccccttctacagtgagctcaagagcttccggatctaagcccagcccttctccagaaaataaacatagaaacattgttactcccagttcagaaactatacttttgcctacaactgtttctctgaaaactgagggcccttatgattccttagattacatgacaaccaccagaaaaatacattcatcttaccataaagtccaagagacacttccagtcacatataaacccacaacagatggaaaagaaattaaggatgatgatgccacaaatgtcgacaaacataaaagtgacactttagtcactggtgactcaattactaatgtcataccaacttcttgctccttggtctccactaagggggaatttaaggaagaatcctctcctgtaggctttccaggaactccaacctggaatccctcagggacagcccagccnnnnnnnnnnnnnnnnnnnnnnnnnnnnnnnnnnnnnnnnnnnnnnnnnnnnnnnnnnnnnnnnnnnnnnnnnnnnnnnnnnnnnnnnnnnnnnnnnnnnnnnnnnnnnnnnnnnnnnnnnnnnnnnnnnnnnnnnnnnnnnnnnnnnnnnnnnnnnnnnnnnnnnnnnnnnnnnnnnnnnnnnnnnnnnnnnnnnnnnnnnnnnnnnnnnnnnnnnnnnnnnnnnnnnnnnnnnnnnnnnnnnnnnnnnnnnnnnnnnnnnnnnnnnnnnnnnnnnnnnnnnnnnnnnnnnnnnnnnnnnnnnnnnnnnnnnnnnnnnnnnnnnnnnnnnnnnnnnnnnnnnnnnnnnnnnnnnnnnnnnnnnnnnnnnnnnnnnnnnnnnnnnnnnnnnnnnnnnnnnnnnnnnnnnnnnnnnnnnnnnnnnnnnnnnnnnnnnnnnnnnnnnnnnnnnnnnnnnnnnnnnnnnnnnnnnnnnnnnnnnnnnnnnnnnnnnnnnnnnnnnnnnnnnnnnnnnnnnnnnnnnnnnnnnnnnnnnnnnnnnnnnnnnnnnnnnnnnnnnnnnnnnnnnnnnnnnnnnnnnnnnnnnnnnnnnnnnnnnnnnnnnnnnnnnnnnnnnnnnnnnnnnnnnnnnnnnnnnnnnnnnnnnnnnnnnnnnnnnnnnnnnnnnnnnnnnnnnnnnnnnnnnnnnnnnnnnnnnnnnnnnnnnnnnnnnnnnnnnnnnnnnnnnnnnnnnnnnnnnnnnnnnnnnnnnnnnnnnnnnnnnnnnnnnnnnnnnnnnnnnnnnnnnnnnnnnnnnnnnnnnnnnnnnnnnnnnnnnnnnnnnnnnnnnnnnnnnnnnnnnnnnnnnnnnnnnnnnnnnnnnnnnnnnnnnnnnnnnnnnnnnnnnnnnnnnnnnnnnnnnnnnnnnnnnnnnnnnnnnnnnnnnnnnnnnnnnnnnnnnnnnnnnnnnnnnnnnnnnnnnnnnnnnnnnnnnnnnnnnnnnnnnnnnnnnnnnnnnnnnnnnnnnnnnnnnnnnnnnnnnnnnnnnnnnnnnnnnnnnnnnnnnnnnnnnnnnnnnnnnnnnnnnnnnnnnnnnnnnnnnnnnnnnnnnnnnnnnnnnnnnnnnnnnnnnnnnnnnnnnnnnnnnnnnnnnnnnnnnnnnnnnnnnnnnnnnnnnnnnnnnnnnnnnnnnnnnnnnnnnnnnnnnnnnnnnnnnnnnnnnnnnnnnnnnnnnnnnnnnnnnnnnnnnnnnnnnnnnnnnnnnnnnnnnnnnnnnnnnnnnnnnnnnnnnnnnnnnnnnnnnnnnnnnnnnnnnnnnnnnnnnnnnnnnnnnnnnnnnnnnnnnnnnnnnnnnnnnnnnnnnnnnnnnnnnnnnnnnnnnnnnnnnnnnnnnnnnnnnnnnnnnnnnnnnnnnnnnnnnnnnnnnnnnnnnnnnnnnnnnnnnnnnnnnnnnnnnnnnnnnnnnnnnnnnnnnnnnnnnnnnnnnnnnnnnnnnnnnnnnnnnnnnnnnnnnnnnnnnnnnnnnnnnnnnnnnnnnnnnnnnnnnnnnnnnnnnnnnnnnnnnnnnnnnnnnnnnnnnnnnnnnnnnnnnnnnnnnnnnnnnnnnnnnnnnnnnnnnnnnnnnnnnnnnnnnnnnnnnnnnnnnnnnnnnnnnnnnnnnnnnnnnnnnnnnnnnnnnnnnnnnnnnnnnnnnnnnnnnnnnnnnnnnnnnnnnnnnnnnnnnnnnnnnnnnnnnnnnnnnnnnnnnnnnnnnnnnnnnnnnnnnnnnnnnnnnnnnnnnnnnnnnnnnnnnnnnnnnnnnnnnnnnnnnnnnnnnnnnnnnnnnnnnnnnnnnnnnnnnnnnnnnnnnnnnnnnnnnnnnnnnnnnnnnnnnnnnnnnnnnnnnnnnnnnnncaaggaggcgtccttctcagacagaggcgtctataagtgcgtggccagcaatgcagccggggcggacagcctggccatccgcctgcatgtggcggcactgcccccggttatccaccaggagaagctggagaacatctcgctgccccctgggctcagcattcacattcactgcactgccaaggctgcgcccctgcccagcgtgcgctgggtgctcggggacggtacccagatccgcccctcgcagttcctccacgggaacttgttcgttttccccaacgggacgctctacatccgcaacctcgcgcccaaggacagcgggcgctatgagtgcgtggccgccaacctggtgggctccgcgcgcaggacagtgcagctgaacgtgcagcgtgcagcagccaacgcgcgcatcacgggcacctctccgcggaggacggacgtcaggtacggagggaccctcaagctggactgcagcgcctcgggggacccctggccgcgcatcctttggaggctgccctccaagaggatgatcgacgcgctcttcannnnnnnnnnnnnnnnnnnnnnnnnnnnnnnnnnnnnnnnnnnnnnnnnnnnnnnnnnnnnnnnnnnnnnnnnnnnnnnnnnnnnnnnnnnnnnnnnnnnnnnnnnnnnnnnnnnnnnnnnnnnnnnnnnnnnnnnnnnnnnnnnnnnnnnnnnnnnnnnnnnnnnnnnnnnnnnnnnnnnnnnnnnnnnnnnnnnnnnnnnnnnnnnnnnnnnnnnnnnnnnnnnnnnnnnnnnnnnnnnnnnnnnnnnnnnnnnnnnnnnnnnnnnnnnnnnnnnnnnnnnnnnnnnnnnnnnnnnnnnnnnnnnnnnnnnnnnnnnnnnnnnnnnnnnnnnnnnnnnnnnnnnnnnnnnnnnnnnnnnnnnnnnnnnnnnnnnnnnnnnnnnnnnnnnnnnnnnnnnnnnnnnnnnnnnnnnnnnnnnnnnnnnnnnnnnnnnnnnnnnnnnnnnnnnnnnnnnnnnnnnnnnnnnnnnnnnnnnnnnnnnnnnnnnnnnnnnnnnnnnnnnnnnnnnnnnnnnnnnnnnnnnnnnnnnnnnnnnnnnnnnnnnnnnnnnnnnnnnnnnnnnnnnnnnnnnnnnnnnnnnnnnnnnnnnnnnnnnnnnnnnnnnnnnnnnnnnnnnnnnnnnnnnnnnnnnnnnnnnnnnnnnnnnnnnnnnnnnnnnnnnnnnnnnnnnnnnnnnnnnnnnnnnnnnnnnnnnnnnnnnnnnnnnnnnnnnnnnnnnnnnnnnnnnnnnnnnnnnnnnnnnnnnnnnnnnnnnnnnnnnnnnnnnnnnnnnnnnnnnnnnnnnnnnnnnnnnnnnnnnnnnnnnnnnnnnnnnnnnnnnnnnnnnnnnnnnnnnnnnnnnnnnnnnnnnnnnnnnnnnnnnnnnnnnnnnnnnnnnnnnnnnnnnnnnnnnnnnnnnnnnnnnnnnnnnnnnnnnnnnnnnnnnnnnnnnnnnnnnnnnnnnnnnnnnnnnnnnnnnnnnnnnnnnnnnnnnnnnnnnnnnnnnnnnnnnnnnnnnnnnnnnnnnnnnnnnnnnnnnnnnnnnnnnnnnnnnnnnnnnnnnnnnnnnnnnnnnnnnnnnnnnnnnnnnnnnnnnnnnnnnnnnnnnnnnnnnnnnnnnnnnnnnnnnnnnnnnnnnnnnnnnnnnnnnnnnnnnnnnnnnnnnnnnnnnnnnnnnnnnnnnnnnnnnnnnnnnnnnnnnnnnnnnnnnnnnnnnnnnnnnnnnnnnnnnnnnnnnnnnnnnnnnnnnnnnnnnnnnnnntcggtggatgccggggcctaccgctgcgtggcccgcaacgccgctggccacacggagaggctggtctccctgaaggtggggctgaaaccagaagcaaacaagcagtatcataacctggtcagcatcatcaacggtgagaccctgaagctcccctgcacccctcccggggctgggcagggacgtttctcctggacgctccccaacagcatgcgtctggagggcccccaagccctggggcgcatttcccttctggacaatggcaccctcgaggttcgtgaggcctcggtgtttgacaggggtacctatgtatgcaggatggagacggagtacggcccttcggtcaccagcatccccgtgattgtgatcgcctatcctccccggatcaccagcgagcccacccccgtcatctacacccggcccgggaacaccgtgaaactgaactgcatggctatggggattccaaaagctgacatcacgtgggagttgccggataagtcgcatctgaaggcaggggttcaggctcgtctgtatggaaacagatttcttcacccccagggatcactgaccatccagcatgccacacagagagacgccggcttctacaagtgcatggcaaaaaacattctcggcagtgactccaaaacaacttacatccatgtcttctgaaatgtggattccagaatgattgcttaggaactgacaacaaagcgcggtttgtacgggaagtcaggctggggaatcggagctcttaaataatgtgtcatagtgcatggtggccccctgtgggtttcaagttgaggttgaacttgatcta

SEQ ID NO: 30792 - DNA, 690 bp, Macaca Mulatta
agctgacgaaaagttgttcgaagatgatgattccaatgagaagttgtttgatgaggaggaagattccaatgagaagttgtttgatgattctgatgagagggggactttgggtggttttgggagtgttgaagaagggcccctatccactggcagcagctttattctcagtagcgatgatgatgatgatatttaatcccttaaacttgctttttagggagagtcctccatctacatttgcctgtgcttcagggtaattactagtagtgttacatgaacatgtgcatagtggtaggatgccatcagattaaagcattgaagtttttcattgttacctgtacctaatggttttaaatatatgttaattgattgtttagttaaaatgtcatagttacaatgcaagtaaactggatacttgttcttttgtcagatttgttaaatgcatgcagaataatatttttaaaagcattgattgaagtttgtgatattcatcaataaaaagttgataatacgcagaaactgaaaattggacttgaggtaaattgcattgtaaattcttgataccgctttatttatactgacggttggcttttctgaggacttgaagaatccctttgtagtctccttgcttcccgctggtagtagcacatatgtctccatttcctctctataaaccagaacatttcctaaact

SEQ ID NO: 30793 - DNA, 622 bp, Macaca Mulatta
ttctctgcgcctgttcactagtaacctaaagaggctatatcattctttatgcaatgagggtatttgagtgaattttaactgctctgaactaagtataagctcatgggcctgcgaaggtgcacacagtttctcctttgcacctgggaggaactttggctgtgagaatggggggacgtatcccccatgcagttcgcagtcgggcaaccctctgccccggcacactctgcaggcggagttttcagagcatgcaattttggaccccgaattttgatgtaccttaaacttccacatcactgcaccctgaaacagagcatgccttccagaaagtcacactctcagatctgtgtcaagttcagtgtgagccctggcaaggctggcatattaacacccgccttctggcttctgaaagtgagatttctatatgggctgcactcacgcatatgcaagttcgtttatctttgtgtccatgactataacccagtgatgctgaggtcatgtgctgggatgctgtatttggaccacacatttcaaagttgccctatggaaatgaatcccacttagtgacacgtcatcagatgtttgtcacatgtgatgaagaacaatctgtatacctggcatagag

SEQ ID NO: 30794 - DNA, 124 bp, Macaca Mulatta
  misc_feature (1)...(124): n = A,T,C or G
tggcgcccatcgcgccgggcctcttccgagtggactggccctgcttcacgcgcgccatcgaggattggtcccacttcgtgtcctcggccggggagttcaagctgccttgcctgagcaagcgagn

SEQ ID NO: 30795 - DNA, 616 bp, Macaca Mulatta
atcaatgtataaactgttactaaatgagaatcttttaaaatacacattacacaagtctttaatttggaatgatgtatttgagagtattttgttaaagatcattaaccatatgtagaaaccatctttaacaatgaatttgttttttgtttgcagtgtttcctctcttaaggctttctcctaccccggcagatgactacaactttaatttagatgataatgaaggagtttgtgatctgtttgatgtccagatactaaattattagattccatggaaacttgggactgttatctacctctaactgtgtaacattttagacttcttaataacctaagtatttaaaataatgaatgtaacaccttttttagttcactgattctgaagtgttcttccctaatactttctttacttcacaaaacttcaaccataaaaacaaagggctctgattgctttaggggataagtgatttaatatccacaaacctccccactcccaaaagtaactatattctggatttcaacttttcttctaattgtgaatccttctgttttttcttcttataagaggaaagttaaaggacactacaggtcatcaaaaacaagtggccaagggctcatt

SEQ ID NO: 30796 - DNA, 481 bp, Macaca Mulatta
ctgcaggttacctacctgggcaaagtctccaccactggcatgcaatttttgtcaggctgcacagaaaagccggtcattgagctctggaagaagcacacgctagcccgagaggatgtctttccagccaatgccctcctggaaatccggccattccaagtgtggctccatcacctcgaccacaaaggggaggccacagtgcacatggataccttccaggtggcccgcatcgcctactgcaccgccgaccacaacgtgagccccaacatcttcgcctgggtgtacagggagatcaatgacgacctgtcctaccagatggactgccacgccgtggagtgcgagagcaagctcgaggccaagaaactggcccacgcaaagatggaggccttcaggaagactttccctgtatgaagagtgacgggcggatccacagcaacagctccttcgaagaggtttcccaggaattggaatccgatgacggctg

SEQ ID NO: 30797 - DNA, 511 bp, Macaca Mulatta
  misc_feature (1)...(511): n = A,T,C or G
aggtagcagatcaaccttacgttcagcagacattcagccttttactggcnacagttgggatttttcattcaaactctagatcctaaactgatagttcagnnnnnnnnnnnnnnnnnnnnnnnnnnnnnnnnnnnnnnnnnnnnnnnnnnnnnnnnnnnnnnnnnnnnnnnnnnnnnnnnnnnnnnnnnnnnnnnnnnnnnnnnnnnnnnnnnnnnnnnnnnnnnnnnnnnnnnnnnnnnnnnnnnnnnnnnnnnnnnnnnnnnnnnnnnnnnnnnnnnnnnnnnnnnnnnnnnnnnnnnnnnnnnnnnnnnnnnnnnnnnnnnnnnnnnnnnnnnnnnnnnnnnnnnnnnnnnnnnnnnnnnnnnnnnnnnnnnnnnnnnnnnnnnnnnnnnnnnnagactgggtttgtagatgaaactgaagctgccaaagtggaacgtgtgaaacaggaaaaaggtattttctggaaaccctttgctaatgtgaatgtagaagaagcaaagaggtcatc

SEQ ID NO: 30798 - DNA, 2831 bp, Macaca Mulatta
  misc_feature (1)...(2831): n = A,T,C or G
atgcgcgcatgcgcagagtctaggcgggaagctggaagaggtgnnnnnnnnnnnnnnnnnnnnnnnnnnnnnnnnnnnnnnnnnnnnnnnnnnnnnnnnnnnnnnnnnnnnnnnnnnnnnnnnnnnnnnnnnnnnnnnnnnnnnnnnnnnnnnnnnnnnnnnnnnnnnnnnnnnnnnnnnnnnnnnnnnnnnnnnnnnnnnnnnnnnnnnnnnnnnnnnnnnnnnnnnnnnnnnnnnnnnnnnnnnnnnnnnnnnnnnnnnnnnnnnnnnnnnnnnnnnnnnnnnnnnnnnnnnnnnnnnnnnnnnnnnnnnnnnnnnnnnnnnnnnnnnnnngacttgacaactgcagttggaaaaaaagatccaacttcaaagcagagcatttttgatgaagaaccagctaatggagtgaagatagaaaggcttacaagggatgatccttggttatcttcatgtgaagaagttggtgattataaagaccagttggagaagcaacaggaaaaacaagagatacttttgcaggaagtggcattcactcaaaggaatgcagttattcatgagagagtctgcaaaagtgatgaacctggggagaagagtggtctgaattccagtctattttcgtccccaattatatccataagaaaccattttcataaacatgtatcacatgctaaaaaatggcatcttaattctgctgtaaacagtcatcagaagattaatgagaatgagactctatatgaaaataatgaatgtggaaaaccccctcagagcattcaccttattcagtttacaagaactcaaacaaaagacaaatcctatggatttagtgacagtattcaatctttttgccatggtacacccctacatatacatgaaaaaattcatggaggaggaaaaacctttgattttaaagaatgtagggcaaagttttgaaccccaacacatatcccataatgaacaacagnnnnnnnnnnnnnnnnnnnnnnnnnnnnnnnnnnnnnnnnnnnnnnnnnnnnnnnnnnnnnnnnnnnnnnnnnnnnnnnnnnnnnnnnnnnnnnnnnnnnnnnnnnnnnnnnnnnnnnnnnnnnnnnnnnnnnnnnnnnnnnnnnnnnnnnnnnnnnnnnnnnnnnnnnnnnnnnnnnnnnnnnnnnnnnnnnnnnnnnnnnnnnnnnnnnnnnnnnnnnnnnnnnnnnnnnnnnnnnnnnnnnnnnnnnnnnnnnnnnnnnnnnnnnnnnnnnnnnnnnnnnnnnnnnnnnnnnnnnnnnnnnnnnnnnnnnnnnnnnnnnnnnnnnnnnnnnnnnnnnnnnnnnnnnnnnnnnnnnnnnnnnnnnnnnnnnnnnnnnnnnnnnnnnnnnnnnnnnnnnnnnnnnnnnnnnnnnnnnnnnnnnnnnnnnnnnnnnnnnnnnnnnnnnnnnnnnnnnnnnnnnnnnnnnnnnnnnnnnnnnnnnnnnnnnnnnnnnnnnnnnnnnnnnnnnnnnnnnnnnnnnnnnnnnnnnnnnnnnnnnnnnnnnnnnnnnnnnnnnnnnnnnnnnnnnnnnnnnnnnnnnnnnnnnnnnnnnnnnnnnnnnnnnnnnnnnnnnnnnnnnnnnnnnnnnnnnnnnnnnnnnnnnnnnnnnnnnnnnnnnnnnnnnnnnnnnnnnnnnnnnnnnnnnnnnnnnnnnnnnnnnnnnnnnnnnnnnnnnnnnnnnnnnnnnnnnnnnnnnnnnnnnnnnnnnnnnnnnnnnnnnnnnnnnnnnnnnnnnnnnnnnnnnnnnnnnnnnnnnnnnnnnnnnnnnnnnnnnnnnnnnnnnnnnnnnnnnnnnnnnnnnnnnnnnnnnnnnnnnnnnnnnnnnnnnnnnnnnnnnnnnnnnnnnnnnnnnnnnnnnnnnnnnnnnnnnnnnnnnnnnnnnnnnnnnnnnnnnnnnnnnnnnnnnnnnnnnnnnnnnnnnnnnnnnnnnnnnnnnnnnnnnnnnnnnnnnnnnnnnnnnnnnnnnnnnnnnnnnnnnnnnnnnnnnnnnnnnnnnnnnnnnnnnnnnnnnnnnnnnnnnnnnnnnnnnnnnnnnnnnnnnnnnnnnnnnnnnnnnnnnnnnnnnnnnnnnnnnnnnnnnnnnnnnnnnnnnnnnnnnnnnnnnnnnnnnnnattcttttaaaaagtttatttaagggtagtacatgttgtgggaagaactactgtaaaaaacaatatatgtgagaaaacttccagtcctctgttaattgtgcgtctgaaatttgttctggaaaagaaagggggaaaatctatgaatgacttttcaacctagcaattccatatacaacattaaacttgattcttatgacatattcctacgaaaataataaatattggcacttttccttgcagaaagcactctgacctgaatcagagaaaatcatatgccaaagccagctgccagtgtgttagacctttttccataaagagtaaatggaatactaacactaatggacttactgcgaagattgaaaggttgctgtagtgtttaaacttaggctggaaaaccatattttagtgcttaattttactacatgatcttccaatgagatagcttgtaatctgttccttacagcacttgctgttttatgtgaagattttgtaaattttaggaatgtgtctacgatacgtagtgaaaaatgtggaaaaataatatagaaataatattgacttatataaccattatgataaaatatttgtgtatggattagaatagaaagggattatggatatatctattcagttttttggtttatgtttggcctttttggaacgtatgctgttgtgctatgataaatgatataacgagtaaaacttattcaaa

SEQ ID NO: 30799 - DNA, 228 bp, Macaca Mulatta
  misc_feature (1)...(228): n = A,T,C or G
ggtaatgacgaaagatgggcagtggtttacagactgggacaccgttcctcacagcagacatacccagannnnnnnnnnnnnnnnnnnnnnnnnnnnnnnnnnnnnnnnnnnnnnnnnnnnnnnnnnnnnnngccttaggatattaccgcatcatcagaatactggagggttttttgtggcagtattggtgaaaaaatcttcaatgccgtggaataaacgtcagccaaa

SEQ ID NO: 30800 - DNA, 340 bp, Macaca Mulatta
  misc_feature (1)...(340): n = A,T,C or G
ggagcagcagctcctggcggctgggagctctgtggtcagttgcctgctggagggccctgtccggctgggtcccgggagtgtcctgcagcactgccatctgcncagggccctattcacataggcgctggctgcatggtgnnnnnnnnnnnnnnnnnnnnnnnnnnnnnnnnnnnnnnnnnnnnnnnnnnnnnnnnnnnnnnnnnnnnnnnnnnnnnnnnnnnnnnnnnnnnnnnnnnnnnnnnnnnnnnnnnnnnnnnnnnnnnnnnnnnnnnnnagagacagggggcaggcacatatctcaacgtaccctggagtgaattcttcaagaggacaggtgttc

SEQ ID NO: 30801 - DNA, 536 bp, Macaca Mulatta
cagggatgcccgccgtctgcagccccggcatggtgcccgtggccctgcccccggccgccgtgaacgcccagccccgctgtagcgaggaggacctgaaagccatccaggacatgttccccaacatggaccaggaggtgatccgctcggtgctggaagcccagcgagggaacaaggaagccgccatcaactccctgctgcagatgggggaggagccgtagagcccccgcctcgctgccgtgtcaccccagctcttcggacacccggccgggcgctccccaaggaatgctgtcccaacaagatccccgtgacacggcccctgtcgcccctcccatggacgtctgggctgccccgcccacgcccgctctgggtgcatgggggttttcggttcctggcggcccaggacggggcgggggctcccttcgcctcttgtgctgggaggtctcggcgcattctcctgcccccaggacgtgcaagtccccttctcatgctgttctggaaaatgttcttgcgtaaagagcagctgcttctgccagggt

SEQ ID NO: 30802 - DNA, 998 bp, Macaca Mulatta
  misc_feature (1)...(998): n = A,T,C or G
gtgagtgccgctgacagaagtcaagaaaccggctgggacggggttggggcaacaacgggccgggggacaccccgacgggccagagccctttggggaggagcgacggctagaggcgcgaggnnnnnnnnnnnnnnnnnnnnnnnnnnnnnnnnnnnnnnnnnnnnnnnnnnnnnnnnnnnnnnnnnnnnnnnnnnnnnnnnnnnnnnnnnnnnnnnnnnnnnnnnnnnnnnnnnnnnnnnnnnnnnnnnnnnnnnnnnnnnnnnnnnnnnnnnnnnnnnnnnnnnnnnnnnnnnnnnnnnnnnnnnnnnnnnnnnnnnnnnnnnnnnnnnnnnnnnnnnnnnnnnnnnnnnnnnnnnnnnnnnnnnnnnnnnnnnnnnnnnnnnnnnnnnnnnnnnnnnnnnnnnnnnnnnnnnnnnnnnnnnnnnnnnnnnnnnnnnnnnnnnnnnnnnnnnnnnnnnnnnnnnnnnnnnnnnnnnnnnnnnnnnnnnnnnnnnnnnnnnnnnnnnnnnnnnnnnnnnnnnnnnnnnnnnnnnnnnnnnnnnnnnnnnnnnnnnnnnnnnnnnnnnnnnnnnnnnaactccattttctccacctccacctgctgatgtcacctgctttcctgtggaagaggcctcagcacctgccactttgccggcctccccagcagggaggctggagcctggccttagcagccccttttcagacctactgggccccctgggtgcccaggcagatgaagcaggctgcagtgcccagccttcgccagagcggcagccctcccctctcgagccacggccagtctccccctcagcctatatgctgcgcctgcccccacccgctggagcctacatccagaatgaacacagctaccaggtgggcagcgccttactctggaagcgacgagctgaggcagcccttgatgcccttgacaaggcccagcgccagctgcaggcctgcaagcggcgggagcaaaggctgcggctgagactaaccaagct

SEQ ID NO: 30803 - DNA, 1674 bp, Macaca Mulatta
  misc_feature (1)...(1674): n = A,T,C or G
ttcgccctccagccgctgcagctagccggacagtgagcgtgacgagcggcttcagcagctagcggagcggtggctgcggcccccctcaggagaccaccagattcccctcttcccacggcctcgccatggcgacctacggacagacttgcgcgcggccaatgtgtattcctccatcatatgctgaccttggcaaagctgccagagatatttcaacaaaggatttggttttgggttggtgaaactggatgtgaaaacaaagtcttgcagcggcgtggaattttcaacgtctggttcatctaatacagacactggtaaagttactgggaccttggagaccaaatacaagtggtgtgagtatggtctgactttcacagaaaagtggaacactgataacactctgggaacagaaatcgcaattgaagaccagatttgtcaaggtttgaaactgacatttgatactaccttctcaccaaacacaggaaagaaaagtggtaaaatcaagtcctcttacaagagggagtgtataaaccttggttgtgatgttgactttgattttgctggacctgcaatccatggttcagctgtctttggttatgagggctggcttgctgggtaccagatgaccttcgacagtgccaaatcaaagctgacaaggaataactttgcagtgggctacaggactggggacttccagctacacactaatgtgaatgatgggacggaatttggagggtcaatttatcagaaagtatgtgaagatcttgacacttcagtaaaccttgcttggacatcaggtaccaactgcactcgttttggcattgcagctaaatatcagttggatcctactgcttccatttctgcaaaagtcaacaactctagcttaattggagtaggctacactcagactctgaggcctggtgtgaagcttacactctctgctctggtagacggaaagagcattaatgctggaggtcacaagcttgggctcgccctggagttggaggcttaatccagctgaaagatacctttggggaatggatatcagaagatttggccttaatatatttccattgtgaccagcagcaggcttttttttcccccaagaagatgatcaaaacaaagaatgatctcaacaagagctgtattttaagtatttagacagttcctttgttagctggttttctaagttgaattggttatctagttaccaaatgctgcagtcctgcagtcacctatacattatttaaaatgtatttaaactgttaaatgcgctaccccacccataatgaaaatagaccttttatgaaaaactgnnnnnnnnnnnnnnnnnnnnnnnnnnnnnnnnnnnnnnntgggccgccctccggcccctccaagaaacttttctgaaaccatttcgtttggggcccgcggggccccgttagggttaaaggaaaaaaggggcccataacctggtttccccaaggaaaaatcccggggcccagaacaaaagggccttgggaatccccccccnnnnnnnnnnnnnnnnnnnggggggggaaaccgaagcggtttttggaaaaaaaatcccaaaatgggaggttcctgaagggccatttacctgggattcatacaaaccgggaagttccaaagcggagactccgatattaaaaattatccccccccccccccggc

SEQ ID NO: 30804 - DNA, 593 bp, Macaca Mulatta
tggagtttttcctggctctgctgctctgcccattgcccagcctctggctgttgccagctctgcccaggccacctgatcttctgttcacctccctcccaacagagggctgctatttttggggccctctccctcagatggctcctcctgtgtctctcatccaggctctgggtgatcaggaaaacgtgtggggctgtacatgaggatgaccctgatcagagcagtgatggctggggaaggtatcagggagggatgctggagaaggctgggttttgggtgtcaaggatcctggactacgacgggctgcaagagcagcatttctcacttctcaatctctgtcttgcagaagtggccgatgcgatctcgtctctatgctggaggcctggggtactctgatcttgactccaccacagcaagcacccccagccaaagaacaagagacgtagaggtgggatcccaagtccctggagaggcagatgctctcttttctgccatgccactctcaccagctcttggtgacaaataattatcacacttgccttttctcctagactgtgattcatgcttagggacctggattttctgccagcccccac

SEQ ID NO: 30805 - DNA, 708 bp, Macaca Mulatta
ttggcaatgccatcctaaggaaagcctcaagtggtttccagtagagagtgtcctgggatgagcttggagatggaaatggtccctgggctgggatgtgatggagtttgggggcctggaagtggggcagagatagtcccagaggctcccagatgagttttgctctgggtgtggcaagaagggccctggggtggggcaagtcccctttctcaccacagtgcagggggcagataggacacatctgagatgcctgaggcttggctgggggagtttcctagaccagtgaggacgctgtgtgactgagtctactgcggctgcacaggtcccaggtggagttggggaggcacactctaggagtgtgtccctgcattcagggatgagggcctttttgttggaatggtggtctgaggagctggcagctgtaccaacacgtgaaccagggggtgctcagtaatggggcggggtgtctctgcagcctcagcataatgactcattcggcacttccacgggatcccagcctggatctcagccccatcagagaagatgactaattgaattactgtccatcgtctgcattagtgttttcaggcaggagggaagagggtaaggagggtaaatgctgtttccggatgatgccacatcattcagcctctctaggcctagtccgagctgggcaagtccacctctagctcctgggggagagatcttgac

SEQ ID NO: 30806 - DNA, 507 bp, Macaca Mulatta
tgctgttgctcattccatgcatctttggcagctcttttcttctgctcagacccttccctgtgctcagacagtgcgccgctgtcccatcaaaagaaacctgtcaggaatgcaagcttctgggtatgtttcgtttcccattgctgtagcatttcttagcccctgagagctgatgattattgaggacagaaggctcagaaacagtttgtgacagaaaatgcagtgtttcatttttcagggataaatgctaagataaaattgcttttccaggtcatttttttttgtggtaagaataactagtggagaataatgaaacaccctggggcttggggatgctaacaacttgtggctttaactgacaggagaaattaaaaagagcaagagggctctgcattggcatagcttagggaagggttgatggtgtcgccagaggtcagctcctgatccttgccgacttgatgttgctgtaccagggcttcctccccagaagtgcagcttgcgttttgaggg

SEQ ID NO: 30807 - DNA, 2267 bp, Macaca Mulatta
  misc_feature (1)...(2267): n = A,T,C or G
agagcttctcgaaacaagtctgagaagaagcgtcgggaccagttcaatgttctcatcaaagagctcagttccatgctgcctggtaacacgcggaaaatggacaaaaccaccgtgttggaaaaggtcatcggatttttgcagaaacacaatgnnnnnnnnnnnnnnnnnnnnnnnnnnnnnnnnnnnnnnnnnnnnnnnnnnnnnnnnnnnnnnnnnnnnnnnnnnnnnnnnnnnnnnnnnnnnnnnnnnnnnnnnnnnnnnnnnnnnnnnnnnnnnnnnnnnnnnnnnnnnnnnnnnnnnnnnnnnnnnnnnnnnnnnnnnnnnnnnnnnnngtcggatgtcatggatcagaatttgttaaatttcctcccagaacaagaacattcagaagtttataaaatcctttcttcccatatgcttgtgacggattccccctccccagaatacttaaaatnnnnnnnnnnnnnnnnnnnnnnnnnnnnnnnnnnnnnnnnnnnnnnnnnnnnnnnnnnnnnnnnnnnnnnnnnnnnnnnnnnnnnnnnnnnnnnnnnnnnnnnnnnnnnnnnngtgcctagcccctcctgtaacggttttgacaacaccctttcaagaccttgccgggtgccactaggaaaggaggtttgcttcattgccaccgttcgtctggcaacaccacaattcttaaaggcaannnnnnnnnnnnnnnnnnnnnnnnnnnnnnnnnnnnnnnnnnnnnnnnnnnnnnnnnnnnnnnnnnnnnnnnnnnnnnnnnnnnnnnnnnnnnnnnnnnnnnnnnnnnnnnnnnnnnnnnnnnnnnnnnnnnnnnnnnnnnnnnnnnnnnnnnnnnnnnnnnnnnnnnnnnnnnnnnnnnnnnnnnnnnnnnnnnnnnnnnnnnnnnnnnnnnnnnnnnnnnnnnnnnnnnnnnnnnnnnnnnnnnnnnnnnnnnnnnnnnnnnnnnnnnnnnnnnnnnnnnnnnnnnnnnnnnnnnnnnnnnnnnnnnnnnnnnnnnnnnnnnnnnnnnnnnnnnnnnnnnnnnnnnnnnnnnnnnnnnnnnnnnnnnnnnnnnnnnnnnnnnnnnnnnnnnnnnnnnnnnnnnnnnnnnnnnnnnnnnnnnnnnnnnnnnnnnnnnnnnnnnnnnnnnnnnnnnnnnnnnnnnnnnnnnnnnnnnnnnnnnnnnnnnnnnnnnnnnnnnnnnnnnnnnnnnnnnnnnnnnnnnnnnnnnnnnnnnnnnnnnnnnnnnnnnnnnnnnnnnnnnnnnnnnnnnnnnnnnnnnnnnnnnnnnnnnnnnnnnnnnnnnnnnnnnnnnnnnnnnnnnnnnnnnnnnnnnnnnnnnnnnnnnnnnnnnnnnnnnnnnnnnnnnnnnnnnnnnnnnnnnnnnnnnnnnnnnnnnnnnnnnnnnnnnnnnnnnnnnnnnnnnnnnnnnnnnnnnnnnnnnnnnnnnnnnnnnnnnnnnnnnnnnnnnnnnnnnnnnnnnnnnnnnnnnnnnnnnnnnnnnnnnnnnnnnnnnnnnnnnnnnnnnnnnnnnnnnnnnnnnnnnnnnnnnnnnnnnnnnnnnnnnnnnnnnnnnnnnnnnnnnnnnnnnnnnnnnnnnnnnnnnnnnnnnnnnnnnnnnnnnnnnnnnnnnnnnnnnnnnnnnnnnnnnnnnnnnnnnnnnnnnnnnnnnnnnnnnnnnnnnnnnnnnnnnnnnnnnnnnnnnnnnnnnnnnnnnnnnnnnnnnnnnnnnnnnnnnnnnnnnnnnnnnnnnnnnnnnnnnnnnnnnnnnnnnnnnnnnnnnnnnnnnnnnnnnnnnnnnnnnnnnnnnnnnnnnnnnnnnnnnnnnnnnnnnnnnnnnnnnnnnnnnnnnnnnnnnnnnnnnnnnnnnnnnnnnnnnnnnnnnnnnnnnnnnnnnnnnnnnnnnnnnnnnnnnnnnnnnnnnnnnnnnnnnnnnnnnnnnnnnnnnnnnnnnnnnnnnnnnnnnnnnnnnnnnnnnnnnnnnnnnnnnnnnnnnnnnnnnnnnnnnnnnnnnnnnnnnnnnnnnnnnnnnnnnnnnnnnnnnnnnnnnnnnnnnnnnnnnnnnnnnnnnnnnnnnnnnnnnnnnnnnnnnngtacgcacagagccagaccgtgtttccaaatccagatgcacaccctgtcaacagcagcagcaccccgatgcccgtcctgctgatggggcaggcagtgctccaccccagcttccccgcctcccaaccgtcacccctgcagcccgcacaggcccggcagcagccaccacagcactacctgcaggt

SEQ ID NO: 30808 - DNA, 267 bp, Macaca Mulatta
tctgtcgcccaagctggagtacagtggtatggttttggctcactgtaacctccgcctcctggtcttgggttcaagcaattctcctgcctcagcctcccgagtagctgggattacaggcacgcatcaccaccacgggtaatttttgtacttttagtagagacggggtttcaccatgttggccaggccagtcttgaacccctgacctcaggtgatctgtccgcctgggtctcccaaacagctaggattataggcgtgagccaccgtgcc

SEQ ID NO: 30809 - DNA, 1627 bp, Macaca Mulatta
  misc_feature (1)...(1627): n = A,T,C or G
gggatttctagtcgttttcaaagcgcctcgcgctgattctcacgggcccggccgccggcccccgctctgccctggattggtagcttatgtcgatcttgatgaaagagcaattgatgctctcagggaatttaatgaagaaggagctctgtctgtactacagcagttcaaggaaagtgacttatcacatgttcagaacaaaagtgcatttttatgtggagttatgaagacctacaggcagagagagaaacaggggagcaaggtgcaagagtccacaaagggacctgatgaagcaaagatcaaggccttgcttgagagaactggttatactctggatgtaaccacaggacagaggaagtatggtggtcctccaccagacagtgtgtactctggcgtgcaacctggaattggaacggaggtgtttgtaggcaaaataccaagagatttatatgaggatgagttggtgccccttttcgagaaggctggacccatttgggatctgcgtcttatgatggatccactgtctggtcagaatagagggtatgcatttatcaccttctgtggaaaggaagctgcacaggaaagccgtgaaactgtgtgacagctatgaaattcgcccctggtaaacaccttggagtgtgcatttctgtgggaaacaacagacttttttgttgggatccatttccgaaggaataagacttaaggaaaacattttgtggaagaattcaggtaaaagtcacaggtttaacagagggtttggtgggaccgtttatttctctatcatcaacccgatgacaaaaagaagaatcgggggttctgcttccttgaatatgaggatcacaagtcagcagcacaagccagacgccggctgatgagtggaaaagtaaaagtgtggggaaatgtagttacagttgaatgggctgaccctgtggaagaaccagatccagaagtcatggctaaggtaaaagttttgtttgtgagaaacttggctactacagtgacagaagaaatattggaaaagtcattttctgaatttggaaaactcgaaagagtaaagaagttgaaagattatgcatttgttcatctttgaagacagaggagcagctgttaaggctatggatgaaatgaatggcaaagaaatagaaggggaagaaattgaaatagtcttagccaagccaccagacaagaaaaggaaagagcgccaagctgctagacaggcctccagaagcactgcgtatgaagattattactaccaccctcctcctcgaatgccacctccaattagaggtcggggtcgtggtggggggagaggtggatatggctaccctccagattactatggctatgaagattactatgatgattactatggttatgattatcacgactatcgtggaggctatgaagatccctactacggctatgatgatggctatgcagtnnnnnnnnnnnnnnnnnnnnngggagggcgaggtgctccaacancaccaagggggaggggagcaccacctccaagaggtagagctggctattcacagaggggggcacctttgggaccaccaagaggctctaggggtggcagagggggtcctgctcaacagcagagaggccgtggttcccgtggatctcg

SEQ ID NO: 30810 - DNA, 547 bp, Macaca Mulatta
gcataattcaatccgaagacaactcaacttgtcaaacccggacttcaatatccagcagcttcaaaaacaggaacagttgactggaattggtagaattaaaccagagttatataagcagaggtcattggataatgatgacgggagacagagtaacagcaaggcttgtgggaaactgaacttcattttaaaatatgactgtgacttagaacagctcatagtgaagattcacaaagctgtcaatttgcccgccaaggacttttctgggacttcagatccttatgtcaagatctatttgcttcctgatcggaaaacaaaacaccagactaaagttcacagaaagaccctgaaccctgtgttcgatgaagtgtttttatttccggtttcctacaatgaccttgaagcacggaagcttcacttctctgtgtacgactttgacaggttctctcgtcatgacttaatcggccaagtggtggtggatcacttcttagacttggctgatttccccagggagtgcatcctttggaaggatatcgaatatgtcaccaat

SEQ ID NO: 30811 - DNA, 447 bp, Macaca Mulatta
  misc_feature (1)...(447): n = A,T,C or G
gaggttggaggtttgcaatgtccactcaagttgcaatgcaaaactctggctcatattcaatttctcagtttcaatccagaatgatcaggnnnnnnnnnnnnnnnnnnnnnnnnnnnnnnnnnnnnnnnnnnnnnnnnnnnnnnnnnnnnnnnnnnnnnnnnnnnnnnnnnnnnnnnnnnnnnnnnnnnnnnnnnnnnnnnnnnnnnnnnnnnnnnnnnnnnnnnnnnnnnnnnnnnnnnnnnnnnnnnnnnnnnnnnnnnnnnnnnnnnnnnnnngggtggcacactgtgtttttcaaaacttgattatgcagtcgcctggttcatccgcgaatccatgacaatatacatttttttgtctgcattatgggacccaactataagctggagaactggtcgctacagattacgctgtgggggtacagcagaggaaatcctagatgtataa

SEQ ID NO: 30812 - DNA, 883 bp, Macaca Mulatta
  misc_feature (1)...(883): n = A,T,C or G
ggggcagggaaacggagcagtgacaggtaccccggagggtgctgctgaggcgatgatggcagagggacccaaggaagccagaggctgccctcccggggcaccacgagggcataggggaccacgagctcttcccttccctgagtggttctcctgccgccgccatcccatgcccnnnnnnnnnnnnnnnnnnnnnnnnnnnnnnnnnnnnnnnnnnnnnnnnnnnnnnnnnnnnnnnnnnnnnnnnnnnnnnnnnnnnnnnnnnnnnnnnnnnnnnnnnnnnnnnnnnnnnnnnnnnnnnnnnnnnnnnnnnnnnnnnnnnnnnnnnnnnnnnnnnnnnnnnnnnnnnnnnnnnnnnnnnnnnnnnnnnnnnnnnnnnnnnnnnnnnnnnnnnnntcccggcaagaggacgagtggctacagcagtcctgttgtggctacctcacctggcacagtggcccggccaccttccccacctgctgcagcccccaaaccccacagagcttcccttcatgtggcgctgctgtcccctaggccatggtgccgccattcccgtggctgggctattgcaatcccttctacttcctgagccctgggctgtggggcctgaccccggggcagctgctggcatcagcacccctgctccagtcgtgggcctgggaccccgggatcctcatgtacaggcataagtctgggccactccannnnnnnnnnnnnnnnnnnnnnnnnnnnnnnnnnnnnnnnnnnnnnnnnnnnnnnnnncaggcagagaatatgttattccatccttggcccacagatttatggcagagatggtggatttctttattctcttctttataaaagcaaccattgtcttaagcattatgcacgtcagtgggataaa

SEQ ID NO: 30813 - DNA, 823 bp, Macaca Mulatta
gttaggaatcaaagagaaaaatgttgcatactcccaccttctaacctaggtaataaagttcttcactcaaaatcaagtccacgtgttgtaacgggacacaaaaagtattatgaaggtattgcctttcccaccccaccctggagctctgagcatccaaccctgtcacagccttcacatttcttccccatgccaggccccctagcacacaacactgcctacactctatgagaaaaagagactttattaggcacagaggacaactggtaggcagttacaaaatggctactaggcttcctcccaagctggagagtagtaccccaggggaaggaagggcagaggagcgtgtgttttctctgccttctcccttcaaggctgcatacgaatggccccatccagccggatgacctctccattgaggaatgggttctcgatgatggcctgtaccaggtgagcatactcagcagggtcacccagtcggctagggaagggcacttggctggccaagaagttgcgcactttctctgggaggctggtcagcagtggggtcccaaacagacctaaacaatatagccaaattcagagactcacccttgctttcatatttacctcgttcttcctcactttagccctacttcttggtgcttccctggggcccaaagataaaaggctgctgttgcttaggtggtgaataccttctcctctcaactgtccatggatcccacccaatcccaggtgtgacggagagaggggatatgtctacctggagcaatggtcatcacccggatgcctatgggagccagatcccgagcaatgggcagtgtca

SEQ ID NO: 30814 - DNA, 720 bp, Macaca Mulatta
gcgctgtgatgctgtgaagcgctgggcccagaccacgcagggctcacgcctgtcccttcccttgcagccgccagagcagccgccctacccgcaccaccagggcggcccaccccactgccccccctggaacaacagccacgaaggcatgtggggcgagcagcgtggtgaccctggctggaacggccagcgcgacgcgccctggaacaaccagcctgacccggcctggaacagccagttcgagggcccctggaacagccagcacgagcagccgccctggggcgggggccagcgcgagccgcccttccgcatgcagcggcccccacacttccgggggcccttcccgccccaccagcagcacccgcagttcaaccagcctccacacccccacaacttcaaccgcttcccgccccgcttcatgcaggacgacttcccgccgcggcaccccttcgagcggccgccctatccccaccgcttcgactacccccagggggacttccctgccggtgagtgtgcgggcgcccgggtagggcctggcggaggcacccacggctggcctgccgagcaggctggtagcactgcttgtggttctggtatgctcccgagtgcacagtgacacaggcacagggtcatggaacgtccgaagagcccggcccgggttctcaggaagtggggacacagactgtgccttgccgccctgattaggccaggctggctgcagag

SEQ ID NO: 30815 - DNA, 1668 bp, Macaca Mulatta
  misc_feature (1)...(1668): n = A,T,C or G
gagagcctgaattcactgtcagctttaacactgaacacgaggactgttacctgtttcgggcaaacatgaagtcaggcctctggtatttctttctcttctgcttgcacatgaaagttttaacaggnnnnnnnnnnnnnnnnnnnnnnnnnnnnnnnnnnnnnnnnnnnnnnnnnnnnnnnnnnnnnnnnnnnnnnnnnnnnnnnnnnnnnnnnnnnnnnnnnnnnnnnnnnnnnnnnnnnnnnnnnnnnnnnnnnnnnnnnnnnnnnnnnnnnnnnnnnnnnnnnnnnnnnnnnnnnnnnnnnnnnnnnnnnnnnnnnnnnnnnnnnnnnnnnnnnnnnnnnnnnnnnnnnnnnnnnnnnnnnnnnnnnnnnnnnnnnnnnnnnnnnnnnnnnnnnnnnnnnnnnnnnnnnnnnnnnnnnnnnnnnnnnnnnnnnnnnnnnnnnnnnnnnnnnnnnnnngaatcacaactttgttgccaactgaagttctggttacccataggatgtgcaacctttgttgttgtctgcatttttggatgcatacttatttgttggcttacaaaaaagnnnnnnnnnnnnnnnnnnnnnnnnnnnnnnnnnnnnnnnnnnnnnnnnnnnnnnnnnnnnnnnnnnnnnnnnnnnnnnnnnnnnnnnnnnnnnnnnnnnnnnnnnnnnnnnnnnnnnnnnnnnnnnnnnnnnnnnnnnnnnnnnnnnnnnnnnnnnnnnnnnnnnnnnnnnnnnnnnnnnnnnnnnnnnnnnnnnnnnnnnnnnnnnnnnnnnnttaactacatacatcttctgctggtgttttgttcaatctggacgagtgactgtatcagtcaatggggattttaacagactgccttggtactgccgagtcctctcaaaacaaacaccctcttgaaaccagctttagagaaagcccagctcctgtgtgctcanctcactgggagtggaatccctgtctccacatctgctcctagcagtgcaccagccagtaaaacaaatacatttacaaaaatatgttttaaagatgccaggggtactgaatctgcaaagcaaacgagcagccaaggaccagcatctgtccgcatttcactatcatactacctcttctttctgtagggatgagaattcctcttttaatcacacagtcaagggagatgctacaaagctggagctattttatttctgagatgttgatgtgaactgtacattagtacatacgcagtactcttcttcaattgctgaaccccagttgaccattttaccaagactttagatgctttcttgtgccctcagttttctttttaaaaatacttctacatgactgcttgacagcccaacagccgctctcaatagagagctatgtcttacattctttcctgtgctgctcaatagttnnnnnnnnnnnnnnnnnnnnnnnnnnnnnnnnnnnnnnnnnaaattcataatgaatatatttgcctgtcttctccctacaagaatatttttgctccagaaagacatattcttttctcaaattcagttaaaatggtttactttttcatgtaagtggtgggaaacattgcccagaattgaaaacaaatttattttattatcctattttctaccattatctatgttttcatggtgctattaattataagtttagctctttttgtagatc

SEQ ID NO: 30816 - DNA, 4962 bp, Macaca Mulatta
  misc_feature (1)...(4962): n = A,T,C or G
gaagatacttcgagaaaaagaaagtgctttagaagcaaaataccaagcaatggagagagcggcaacatttgaacatgacagagataaagttaaaaggcaattcaaggtaaattccttacatttttnnnnnnnnnnnnnnnnnnnnnnnnnnnnnnnnnnnnnnnnnnnnnnnnnnnnnnnnnnnnnnnnnnnnnnnnnnnnnnnnnnnnnnnnnnnnnnnnnnnnnnnnnnnnnnnnnnnnnnnnnnnnnnnnnnnnnnnnnnnnnnnnnnnnnnnnnnnnnnnnnnnnnnnnnnnnnnnnnnnnnnnnnnnnnnnnnnnnnnnnnnnnnnnnnnnnnnnnnnnnnnnnnnnnnnnnnnnnnnnnnnnnnnnnnnnnnnnnnnnnnnnnnnnnnnnnnnnnnnnnnnnnnnnnnnnnnnnnnnnnnnnnnnnnnnnnnnnnnnnnnnnnnnnnnnnnnnnnnnnnnnnnnnnnnnnnnnnnnnnnnnnnnnnnnnnnnnnnnnnnnnnnnnnnnnnnnnnnnnnnnnnnnnnnnnnnnnnnnnnnnnnnnnnnnnnnnnnnnnnnnnnnnnnnnnnnnnnnnnnnnnnnnnnnnnnnnnnnnnnnnnnnnnnnnnnnnnnnnnnnnnnnnnnnnnnnnnnnnnnnnnnnnnnnnnnnnnnnnnnnnnnnnnnnnnnnnnnnnnnnnnnnnnnnnnnnnnnnnnnnnnnnnnnnnnnnnnnnnnnnnnnnnnnnnnnnnnnnnnnnnnnnnnnnnnnnnnnnnnnnnnnnnnnnnnnnnnnnnnnnnnnnnnnnnnnnnnnnnnnnnnnnnnnnnnnnnnnnnnnnnnnnnnnnnnnnnnnnnnnnnnnnnnnnnnnnnnnnnnnnnnnnnnnnnnnnnnnnnnnnnnnnnnnnnnnnnnnnnnnnnnnnnnnnnnnnnnnnnnnnnnnnnnnnnnnnnnnnnnnnnnnnnnnnnnnnnnnnnnnnnnnnnnnnnnnnnnnnnnnnnnnnnnnnnnnnnnnnnnnnnnnnnnnnnnnnnnnnnnnnnnnnnnnnnnnnnnnnnnnnnnnnnnnnnnnnnnnnnnnnnnnnnnnnnnnnnnnnnnnnnnnnnnnnnnnnnnnnnnnnnnnnnnnnnnnnnnnnnnnnnnnnnnnnnnnnnnnnnnnnnnnnnnnnnnnnnnnnnnnnnnnnnnnnnnnnnnnnnnnnnnnnnnnnnnnnnnnnnnnnnnnnnnnnnnnnnnnnnnnnnnnnnnnnaattcccccaacacactgattctttcccattttgtgggaaggcccatgtcaaccagctcagagtcctccttgattattaaacgactaactctaaaggtatagtattccatcttttnnnnnnnnnnnnnnnnnnnnnnnnnnnnnnnnnnnnnnnnnnnnnnnnnnnnnnnnnnnnnnnnnnnnnnnnnnnnnnnnnnnnnnnnnnnnnnnnnnnnnnnnnnnnnnnnnnnnnnnnnnnnnnnnnnnnnnnnnnnnnnnnnnnnnnnnnnnnnnnnnnnnnnnnnnnnnnnnnnnnnnnnnnnnnnnnnnnnnnnnnnnnnnnnnnnnnnnnnnnnnnnnnnnnnnnnnnnnnnnnnnnnnnctgtcgttctgctacaacctgcaatgccctttatgtcacccttttcggcaaaatgatcgcgcggtaagtgttggttattttacnnnnnnnnnnnnnnnnnnnnnnnnnnnnnnnnnnnnnnnnnnnnnnnnnnnnnnnnnnnnnnnnnnnnnnnnnnnnnnnnnnnnnnnnnnnnnnnnnnnnnnnnnnnnnnnnnnnnnnnnnnnnnnnnnnnnnnnnnnnnnnnnnnnnnnnnnnnnnnnnntcagaactgatggaactctatcctgagatgtcctggactttcttgacctcccttattcacagtttatacaaaatgtgtttgttgacttacggttgtggcttgctcaggtttcaacatctgcaggtaatgttattttaggcatnnnnnnnnnnnnnnnnnnnnnnnnnnnnnnnnnnnnnnnnnnnnnnnnnnnnnnnnnnnnnnnnnnnnnnnnnnnnnnnnnnnnnnnnnnnnnnnnnnnnnnnnnnnnnnnnnnnnnnnnnnnnnnnnnnnnnnnnnnnnnnnnnnnnnnnnnnnnnnnnnnnnnnnnnnnnnnnnnnnnnnnnnnnnnnnnnnnnnnnnnnnnnnnnnnnnnnnnnnnnnnnnnnnnnnnnnnnnnnnnnnnnnnnnnnnnnnnnnnnnnnnnnnnnnnnnnnnnnnnnnnnnnnnnnnnnnnnnnnnnnnnnnnnnnnnnnnnnnnnnnnnnnnnnnnnnnnnnnnnnnnnnnnnnnnnnnnnnnnnnnnnnnnnnnnnnnnnnnnnnnnnnnnnnnnnnnnnnnnnnnnnnnnnnnnnnnnnnnnnnnnnnnnnnnnnnnnnnnnnnnnnnnnnnnnnnnnnnnnnnnnnnnnnnnnnnnnnnnnnnnnnnnnnnnnnnnnnnnnnnnnnnnnnnnnnnnnnnnnnnnnnnnnnnnnnnnnnnnnnnnnnnnnnnnnnnnnnnnnnnnnnnnnnnnnnnnnnnnnnnnnnnnnnnnnnnnnnnnnnnnnnnnnnnnnnnnnnnnnnnnnnnnnnnnnnnnnnnnnnnnnnnnnnnnnnnnnnnnnnnnnnnnnnnnnnnnnnnnnnnnnnnnnnnnnnnnnnnnnnnnnnnnnnnnnnnnnnnnnnnnnnnnnnnnnnnnnnnnnnnnnnnnnnnnnnnnnnnnnnnnnnnnnnnnnnnnnnnnnnnnnnnnnnnnnnnnnnnnnnnnnnnnnnnnnnnnnnnnnnnnnnnnnnnnnnnnnnnnnnnnnnnnnnnnnnnnnnnnnnnnnnnnnnnnnnnnnnnnnnnnnnnnnnnnnnnnnnnnnnnnnnnnnnnnnnnnnnnnnnnnnnnnnnnnnnnnnnnnnnnnnnnnnnnnnnnnnnnnnnnnnnnnnnnnnnnnnnnnnnnnnnnnnnnnnnnnnnnnnnnnnnnnnnnnnnnnnnnnnnnnnnnnnnnnnnnnnnnnnnnnnnnnnnnnnnnnnnnnnnnnnnnnnnnnnnnnnnnnnnnnnnnnnnnnnnnnnnnnnnnnnnnnnnnnnnnnnnnnnnnnnnnnnnnnnnnnnnnnnnnnnnnnnnnnnnnnnnnnnnnnnnnnnnnnnnnnnnnnnnnnnnnnnnnnnnnnnnnnnnnnnnnnnnnnnnnnnnnnnnnnnnnnnnnnnnnnnnnnnnnnnnnnnnnnnnnnnnnnnnnnnnnnnnnnnnnnnnnnnnnnnnnnnnnnnnnnnnnnnnnnnnnnnnnnnnnnnnnnnnnnnnnnnnnnnnnnnnnnnnnnnnnnnnnnnnnnnnnnnnnnnnnnnnnnnnnnnnnnnnnnnnnnnnnnnnnnnnnnnnnnnnnnnnnnnnnnnnnnnnnnnnnnnnnnnnnnnnnnnnnnnnnnnnnnnnnnnnnnnnnnnnnnnnnnnnnnnnnnnnnnnnnnnnnnnnnnnnnnnnnnnnnnnnnnnnnnttatctccagaagggctntcaaacatatgtgctcaggaaaaaaccaccaggttcacttcttcctaaagcacataaggtatagtatacaaatgtaannnnnnnnnnnnnnnnnnnnnnnnnnnnnnnnnnnnnnnnnnnnnnnnnnnnnnnnnnnnnnnnnnnnnnnnnnnnnnnnnnnnnnnnnnnnnnnnnnnnnnnnnnnnnnnnnnnnnnnnnnnnnnnnnnnnnnnnnnnnnnnnnnnnnnnnnnnnnnnnnnnnnnnnnnnnnnnnnnnnnnnnnnnnnnnnnnnnnnnnnnnnnnnnnnnnnnnnnnnnnnnnnnnnnnnnnnnnnnnnnnnnnnnnnnnnnnnnnnnnnnnnnnnnnnnnnnnnnnnnnnnnnnnnnnnnnnnnnnnnnnnnnnnnnnnnnnnnnnnnnnnnnnnnnnnnnnnnnnnnnnnnnnnnnnnnnnnnnnnnnnnnnnnnnnnnnnnnnnnnnnnnnnnnnnnnnnnnnnnnnnnnnnnnnnnnnnnnnnnnnnnnnnnnnnnnnnnnnnnnnnnnnnnnnnnnngattgggagctttcaaccattggtcatcctttgtcagacttagctcatctttccctcttctacttttggccaagaacagttccaatgataaatcaaggttctcgtattcaagaaaactcaggtatgagaacataatgttgtcnnnnnnnnnnnnnnnnnnnnnnnnnnnnnnnnnnnnnnnnnnnnnnnnnnnnnnnnnnnnnnnnnnnnnnnnnnnnnnnnnnnnnnnnnnnnnnnnnnnnnnnnnnnnnnnnnnnnnnnnnnnnnnnnnnnnnnnnnnnnnnnnnnnnnnnnnnnnnnnnnnnnnnnnnnnnnnnnnnnnnnnnnnnnnnnnnnnnnnnnnnnnnnnnnnnnnnnnnnnnnnnnnnnnnnnnnnnnnnnnnnnnnnnnnnnnnnnnnnnnnnnnnnnnnnnnnnnnnnnnnnnnnnnnnnnnnnnnnnnnnnnnnnnnnnnnnnnnnnnnnnnnnnnnnnnnnnnnnnnnnnnnnnnnnnnnnaggaggtaattgagttctatgttcaaaatgaaaattcagagaacaagtggggaagacctttagggattgataaactcaaggnnnnnnnnnnnnnnnnnnnnnnnnnnnnnnnnnnnnnnnnnnnnnnnnnnnnnnnnnnnnnnnnnnnnnnnnnnnnnnnnnnnnnnnnnnnnnnnnnnnnnnnnnnnnnnnnnnnnnnnnnnnnnnnnnnnnnnnnnnnnnnnnnnnnnnnnnnnnnnnnnnnnnnnnnnnnnnnnnnnnnnnnnnnnnnnnnnnnnnnnnnnnnnnnnnnnnnnnnnnnnnnnnnnnnnnnnnnnnnnnnnnngaacctgatgtagcttcaagtgatgccacaaatattgaatgcagcatccaacgagatgaagatagctatgtaattaatggcaagaaatggtggagcagtgg

SEQ ID NO: 30817 - DNA, 2950 bp, Macaca Mulatta
  misc_feature (1)...(2950): n = A,T,C or G
gggtctgcttggtgagctcattctcttacaacaacaaattcaagagcatgaagaggaagcgcgcagagccgctggccaatatagcacgagctatgcccaacagaagcgcaaggtgnnnnnnnnnnnnnnnnnnnnnnnnnnnnnnnnnnnnnnnnnnnnnnnnagttaaagtatcagagaatcttggaacgattagaaaaggagaacaaagaattgagaaaattagtattgcagaaagatgacaaaggcattcatcatagaaagcttaagnnnnnnnnnnnnnnnnnnnnnnnnnnnnnnnnnnnnnnnnnnnnnnnnnnnnnnnnnnnnnnnnnnnnnnnnnnnnnnnnnnnnnnggttgttgtggttggagatcagagcgctgggaagactagtgtgttggaaatgattgcccaagctcgaatattcccgagaggatcgggggagatgatgacgcgttctccagttaaggnnnnnnnnnnnnnnnnnnnnnnnnnnnnnnnnnnnnnnnnnnnnnnnnnnnnnnnnnnnnnnnnnnnnnnnnnnnnnnnnnnnnnnnnnnnnnnnnnnnnnnnnnnnnnnnnnnnnnnnnnnnnnnnnnnnnnnnnnnnnnnnnnnnnnnnnnnnnnnnnnnnnnnnnnnnnnnnnnnnnnnnnnnnnnnnnnnnnnnnnnnnnnnnnnnnnnnnnnnnnnnnnnnnnnnnnnnnnnnnnnnnnnnnnnnnnnnnnnnnnnnnnnnnnnnnnnnnnnnnnnnnnnnnnnnnnnnnnnnnnnnnnnnnnnnnnnnnnnnnnnnnnnnnnnnnnnnnnnnnnnnnnnnnnnnnnnnnnnnnnnnnnnnnnnnnnnnnnnnnnnnnnnnnnnnnnnnnnnnnnnnnnnnnnnnnnnnnnnnnnnnnnnnnnnnnnnnnnnnnnnnnnnnnnnnnnnnnnnnnnnnnnnnnnnnnnnnnnnnnnnnnnnnnnnnnnnnnnnnnnnnnnnnnnnnnnnnnnnnnnnnnnnnnnnnnnnnnnnnnnnnnnnnnnnnnnnnnnnnnnnnnnnnnnnnnnnnnnnnnnnnnnnnnnnnnnnnnnnnnnnnnnnnnnnnnnnnnnnnnnnnnnnnnnnnnnnnnnnnnnnnnnnnnnnnnnnnnnnnnnnnnnnnnnnnnnnnnnnnnnnnnnnnnnnnnnnnnnnnnnnnnnnnnnnnnnnnnnnnnnnnnnnnnnnnnnnnnnnnnnnnnnnnnnnnnnnnnnnnnnnnnnnnnnnnnnnnnnnnnnnnnnnnnnnnnnnnnnnnnnnnnnnnnnnnnnnnnnnnnnnnnnnnnnnnnnnnnnnnnnnnnnnnnnnnnnnnnnnnnnnnnnnnnnnnnnnnnnnnnnnnnnnnnnnnnnnnnnnnnnnnnnnnnnnnnnnnnnnnnnnnnnnnnnnnnnnnnnnnnnnnnnnnnnnnnnnnnnnnnnnnnnnnnnnnnnnnnnnnnnnnnnnnnnnnnnnnnnnnnnnnnnnnnnnnnnnnnnnnnnnnnnnnnnnnnnnnnnnnnnnnnnnnnnnnnnnnnnnnnnnnnnnnnnnnnnnnnnnnnnnnnnnnnnnnnnnnnnnnnnnnnnnnnnnnnnnnnnnnnnnnnnnnnnnnnnnnnnnnnnnnnnnnnnnnnnnnnnnnnnnnnnnnnnnnnnnnnnnnnnnnnnnnnnnnnnnnnnnnnnnnnnnnnnnnnnnnnnnnnnnnnnnnnnnnnnnnnnnnnnnnnnnnnnnnnnnnnnnnnnnnnnnnnnnnnnnnnnnnnnnnnnnnnnnnnnnnnnnnnnnnnnnnnnnnnnnnnnnnnnnnnnnnnnnnnnnnnnnnnnnnnnnnnnnnnnnnnnnnnnnnnnnnnnnnnnnnnnnnnnnnnnnnnnnnnnnnnnnnnnnnnnnnnnnnnnnnnnnnnnnnnnnnnnnnnnnnnnnnnnnnnnnnnnnnnnnnnnnnnnnnnnnnnnnnnnnnnnnnnnnnnnnnnnnnnnnnnnnnnnnnnnnnnnnnnnnnnnnnnnnnnnnnnnnnnnnnnnnnnnnnnnnnnnnnnnnnnnnnnnnnnnnnnnnnnnnnnnnnnnnnnnnnnnnnnnnnnnnnnnnnnnnnnnnnnnnnnnnnnnnnnnnnnnnnnnnnnnnnnnnnnnnnnnnnnnnnnnnnnnnnnnnnnnnnnnnnnnnnnnnnnnnnnnnnnnnnnnnnnnnnnnnnnnnnnnnnnnnnnnnnnnnnnnnnnnnnnnnnnnnnnnnnnnnnnnnnnnnnnnnnnnnnnnnnnnnnnnnnnnnnnnnnnnnnnnnnnnnnnnnnnnnnnnnnnnnnnnnnnnnnnnnnnnnnnnnnnnnnnnnnnnnnnnnnnnnnnnnnnnnnnnnnnnnnnnnnnnnnnnnnnnnnnnnnnnnnnnnnnnnnnnnnnnnnnnnnnnnnnnnnnnnnnnnnnnnnnnnnnnnnnnnnnnnnnnnnnnnnnnnnnnnnnnnnnnnnnnnnnnnnctgttccacctttctaaacatacaataaagtcatgggataaaacaattgatgtgtggtacgggcgttttcaccgtcagctgcctttcgaatggaagaacagtggtaatggattaacatcgtactttgctgtactaaagtgacaaatgggaataatagacttggtgtggccattaggttcagtccttgaagataagaaacttgctctctgttggttgtcttatctgtggtggccctagtttaccgcgttaactgaggttactcagtgtcaatttcttctccagaaatacaatgctaggtgttttgaaataaaacttatatagcaatttttttaaagttatcaattgtatataaaatcacgatagcctgctaaatcattgtgtgtgtctgtagtattctattcccagaaactatctgaccatgataattcagtttatattcaccacatgaaagaaaagtaacagaagaacccctaaaacaggttaatttggattgtaa

SEQ ID NO: 30818 - DNA, 1245 bp, Macaca Mulatta
  misc_feature (1)...(1245): n = A,T,C or G
ttgaacagttgcatttataaggggggaaatgtggtttaatggtgcctgatatctcaaagtcttttgtacataannnnnnnnnnnnnnnnnnnntnnnnnnnnnnnnnaatatgaatatatctcattgcagccagtgatttagatttacagattactctggggttatttctctgtctagagcattgttgtccttcactgcagtcccagtgggattattccaaaagctttttgagtcttgaacttgggctgtggcccttccgtgatcatatcttgagcacgacgaagcaaccttatttctgaggaagcttgagttctgactcactgaaatgcatgttggcttgaagatatcttttttctttcctgcctcatccctttgtctccaacctccatttctgttcactttgtggagagggcattacttattgttatagacatggacattaagagatattcaaaactcagaagcatcagcagtgtttctcttttcttagttcattctgcagaatggaaacccatgcctattagaaatggcagtacttattaattgagtccctaaggaaaattcagcccactacatagatagctatattcacatatttaataaggacacctctttccaaacagtgccatcaaatatgttcttatctcagacttagattgttttaaaagtttggtaagatatacatctttcatacccctcttaggcaggatggctttcatatcacctcagccaactgtggctcttaatttattgcataatgatattcacatcccctcagttgcagtgaattgtgagcaaaagatcttgaaagcaaaaagcactaattagtttaaaatgtcacttttttggtttttattatacaaaaaccatgaagtactttttttatttgctaaatcagattgttcctttttagtgattcatgtttatgaagagagttgagtttaacaatcctagcttttaaaagaaactatttaatgtaaaatattctacatgtcattcagatattatgtatatcttctagcctttattctgtacttttaatgtacatatttctgtcttgcgtgatttgtatatttcactggtttaaaaaacaaacatcgaaaggcttatgccaaatggaagatagaatataaaataaaacgttacttgtatatttggtaagtggtttcaattgtccttcagataattgatgtnnnnnnnnnnnnnnnnnnnnnnnnnnnnnnnnnnnnnnnnnnnnnnnnnng

SEQ ID NO: 30819 - DNA, 848 bp, Macaca Mulatta
gggcctttcccttcggcgcgccactgaagatcctggtgtcgccatgggccgccgccccgcccgttgttaccggtattgtaagaacaagccgtacccaaagtctcgcttctgccgaggtgtccctgatgccaagattcgcatctttgacctggggcggaagaaggcaaaagtggatgagtttccgctctgtggccacatggtgtcagatgaatatgagcagctgtcctctgaagccctggaggctgcccgaatttgtgccaataagtacatggtaaaaagttgtggcaaggatggcttccatatccgggtgcggctccaccccttccacgtcatccgcatcaacaaagatgttgtcctgtgctggggccgacaggctccaaaacggcatgcgaggtgcctttggaaaaccccagggcactgtggccaaggttcacattggccaaattatcatgtccatcccgcaccaagctgcagaaaaagggagcatgtgattgaagccctgcccaaggccaaatttcagtttcctgggccgccagaaaaatcccatcttcaaaaaaggggggcttcacccaatttcattgctggaataaatttacagaacatggttggctgaaaaagcgggctcaaacccaatatgggctttgggggttccagttaaatcccccaaatcgggggtccccctgggaaaaaaatgggggagtcccttgcactactcatgaagagccttccaattaatacctgaccccctcattataatccttcccccaattaaaagttctacagtttccgggctagaatacgaacataaagtaaaaaatgtaaaaaaataaatctggttcctgccgccc

SEQ ID NO: 30820 - DNA, 242 bp, Macaca Mulatta
ggacaatgccatccttcatattcctccaaccaaagtaagcacagcacatgggagaagggcatttggcgtctgctgcccccagggtcttcctcatccaccacttctggttcctttcatctggaaagaagacctcttccatcttccacgcagctagcagtcaccaggggagacaccctgcggggctttgagtctacagatctttctcaaaggaagcttaggacccgtgggaatagcaaaacagt

SEQ ID NO: 30821 - DNA, 555 bp, Macaca Mulatta
atctctaattcccctctgtctccatccagcggcttcttccgcttcattctctaccataccacttgtgcatgcatgtaatgttctaatacgaggtgaagaactgctgtaggtacctccctaataagatttctaaacccatagttagtgtgatcatgactttgtcaaaggcaagtctccacccataactgttctcttgtatccctgttgcttgagctacattaagtagaatgtgcatgttgtagtcctatgatgatgtaaacttggtactacataatgacttgctccacacatgcagtaaactacataatgatgtactggtaaactagaaacaaagaatgcagcaggatctgtctagcatattaaagatgaaactgaattggaaaaatagctccattttttggtgcttgggaagcacagtgaccaaaaaagctgtatggctgcttattcattagtctttcctactaatgtcaaacccatggtacctagagttaaataaaattccattgcccttactctttaacctatggtttctcctttgtcctttgtagactattg

SEQ ID NO: 30822 - DNA, 815 bp, Macaca Mulatta
  misc_feature (1)...(815): n = A,T,C or G
ataccaaggtgaatttctgcacatttgaagaatgtgaaaaagcttttaaccaatcttcaaaccttatctaaacataaaagaatttatacttgtgagaaactctacagatgtcaagaatgtgacaaaacttttaaccatttctcaaaccttactgaatataaaaaagattatactcgagagaagccatataaatgtgaagaatgtggcaaagcctttaaccagtcctcacaccttactacacataagataattcatacaggagagaaaccctacaaatgtgaagaatgtggcaaagcctttaaccagttctcaaatcttactacacataaaaaaattcatactggagagcaaccctacatatgtgaagaatgtggcaaggcttttacccaatcctcaacccttactacacataagagaattcatactggagagaaaccctacaaatgtgaagaatgtggaaaagcttttaaccgatcctcaaaacttacggaacataaaaacattcatactggagagcaaccctacaaatgtgaagaatgtggcaaagcttttaaccgatcctcaaatcttacagaacataggaaaattcatactgaagagaaaccctacaaatgtaaagaatgtggcaaagcttttaaacactcctcagcccttactacacataagagaattcacactggagagaagccctacaaatgtgaagaatgtggcanagcttttaaccgatcctcanaacttactgaacataagaaacttcatactggaaagaaaccctacaaatgtgaagaatgtggcaaagcttttatccaatcctc

SEQ ID NO: 30823 - DNA, 1123 bp, Macaca Mulatta
gtatacgtagaagtggcgttacagcaagacagaccgctaggaagtgtatgcgatgtgcagggtcagcgcccgccgcatccggcaccggaagggtggggacaaaagcgaccaaaagacaggggggacgtaccctgccggtgggcgagagaccccgcgcgatgcatgcgtccggtgccatcgccggagcaaaaagaggggggatggggagatggcgagtcatgcgatacggccgagtgcacgacatgacagcgaaaagaggtgccaggccgcagcgggtgtcgggtactgcggaagggtagaggtataatgcgtccggaccggggggcgaaacgcctcctatcctttgttcgaaccttcccgctgcgtgtttcccggataagagtgccacggcagtaggcatgggagcttggcccatagaacgcaggccagaacggagtaagggaaaggcacacgctctcgggcaagacgcgcgcggaaaaaaggggggtgattccgcgaaacaatgagaataactatatgggggaccgtggagaaatggagcatgccgaacaccctattaccagcaggtgaccagctgagatgaggaggctccaacagaatgagctgcagccagagcaacagagtgagggacacagccgaagcaacagagttaggggacacagccggagcaacagagttaggggacacagccggaacaacagagggggaggatgccaccatttcaactctctccctgagcagcgagtaatttcacggcaagcccagagacctaggatccatctgagaagtctgtagaggtctgacccagagaactcaacaacagggtacgccccatggtgatgaaaataaaatgaatcttgcattcaccgttgtattcctcaagacttagagttaaaaacccgatgaaaagtggttaatctccataatgggtgttagcgccatcgttttccaacgttagagataaccgaatgtgacctcaccccgtttagttccggaggcggtggacgcggcggcggaagttacggcggcggctacggaggaggaagctccggcggcggttacggaggaggaagctccggcggcggttacggcggcggccacggtggtagttccggcggccccc

SEQ ID NO: 30824 - DNA, 149 bp, Macaca Mulatta
gcccgtcgttcgcgccgccggcgggattatccgacctggccgcgcaccaccgccccctcttcggcctccctgcatttgcccaggttcagcacgcaataatggaggaggaggcggagaccgaggagcagcagcgattctcttaccaacag

SEQ ID NO: 30825 - DNA, 669 bp, Macaca Mulatta
aaccgtcactttcccctggcctggctccattggcccaccctctaagttgagcaggaaatcctccaccaagcttccagaactacagacagcacccagagcgagctggagtgggtccccgtgcctctccagcatgccctttccctttgtgagagggtggagtccctgggtcatgccctcccctgccagttctgggcttcagagataaggcattttccttgtgcagcctttatctggcaatcctgttttaagactctctgtgaaatgccttctgcaccttaatcccaatgagcatggaaaagaaagttaataaactataatacatggaagcaagaaagccactgcctcctctgagggagttttcccatgcatgtaaacaaaggggcccacagccctggctgcaggcatcatgacccatcttctaccaggcagatctttattacctgagcccctaaatcagtgtctcctcagctgggctgcttccaccgagacccccgacctgtcccctttccagtacacacacctgattcgtgtaagaatggtaggcaggcttttctcagcatcgaattaacaattcagtggctccttgggagtcaaatgggcatttgggacaccagaaggaaaataaatcatcatagtctaaggttcagttgtagatcagaaaatgcagcc

SEQ ID NO: 30826 - DNA, 215 bp, Macaca Mulatta
ccctgctcagcctactacatccacgcccagctctgactctgctgtcccctctagcatggcctcagctgggtttaccctgggaaggagagatgagaggcacgtgtggccaagggcttgggtgagctccagcccaggtcacaagtggccgaggcagaggaagcccgcttaaccccgtcgtgccttgaggtattcgagggtgtttgtcttccttggct

SEQ ID NO: 30827 - DNA, 1374 bp, Macaca Mulatta
  misc_feature (1)...(1374): n = A,T,C or G
ggacccaattcttcgaaggtctggaatgtatactgtagccatggcttattgtggctctggtaacaacaaagcaattcgacgcctgctacatgttgctgtaagtnnnnnnnnnnnnnnnnnnnnnnnnnnnnnnnnnnnnnnnnnnnnnnnnnnnnnnnnnnnnnnnnnnnnnnnnnnnnnnnnnnnnnnnnnnnnnnnnnnnnnnnnnnnnnnnnnnnnnnnnnnnnnnnnnnnnnnnnnnnnnnnnnnnnnnnnnnnnnnnnnnnnnnnnnnnnnnnnnnnnnnnnnnnnnnnnnnnnnnnnnnnnnnnnnnnnnnnnnnnnnnnnnnnnnnnnnnnnnnnnnnnnnnnnnnnnnnnnnnnnnnnnnnnnnnnnnnnnnnnnnnnnnnnnnnnnnnnnnnnnnnnnnnnnnnnnnnnnnnnnnnnnnnnnnnnnnnnnnnnnnnnnnnnnnnnnnnnnnnnnnnnnnnnnnnnnnnnnnnnnnnnnnnnnnnnnnnnnnnnnnnnnnnnnnnnnnnnnnnnnnnnnnnnnnnnnnnnnnnnnnnnnnnnnnnnnnnnnnnnnnnnnnnnnnnnnnnnnnnnnnnnnnnnnnnnnnnnnnnnnnnnnnnnnnnnnnnnnnnnnnnnnnnnnnnnnnnnnnnnnnnnnnnnnnnnnnnnnnnnnnnnnnnnnnnnnnnnnnnnnnnnnnnnnnnnnnnnnnnnnnnnnnnnnnnnnnnnnnnnnnnnnnnnnnnnnnnnnnnnnnnnnnnnnnnnnnnnnnnnnnnnnnnnnnnnnnnnnnnnnnnnnnnnnnnnnnnnnnnnnnnnnnnnnnnnnnnnnnnnnnnnnnnnnnnnnnnnnnnnnnnnnnnnnnnnnnnnnnnnnnnnnnnnnnnnnnnnnnnnnnnnnnnnnnnnnnnnnnnnnnnnnnnnnnnnnnnnnnnnnnnnnnnnnnnnnnnnnnnnnnnnnnnnnnnnnnnnnnnnnnnnnnnnnnnnnnnnnnnnnnnnnnnnnnnntctctattggaggcatcatcattctgaaggataccagtgaagacattgaggagctggtggaacctgtggcagcacatggtccaaaaatcgaggaggaggaacaagagccagaacccccagaaccatttgagtatattgatgattaaggaccagaggnnnnnnnnnnnnnnnnnngaagaagattgtccaggctcatattgggaatgcttatgaggaaattcgtgctgagacctgctattcaatgcatgtatcgttgcctctgcgctgacctgaagaaccctgtctccaagtctttggttgaagagaagatatatgactgtttagtgtgctctttcacagaacttggttttcaaataaatataagatctccagatggacaa

SEQ ID NO: 30828 - DNA, 1083 bp, Macaca Mulatta
  misc_feature (1)...(1083): n = A,T,C or G
ggcaggctgctgcgggaggcggtggcagtaggaagccggagacagcagggtgacagnnnnnnnnnnnnnnnnnnnnnnnnnnnnnnnnnnnnnnnnnnnnnnnnnnnnnnnnnnnnnnnnnnnnnnnnnnnnnnnnnnnnnnnnnnnnnnnnnnnnnnnnnnnnnnnnnnnnnnnnnnnnnnnnnnnnnnnnnnnnnnnnnnnnnnnnnnnnnnnnnnnnnnnnnnnnnnnnnnnnnnnnnnnnnnnnnnnnnnnnnnnnnnnnnnnnnnnnnnnnnnnnnnnnnnnnnnnnnnnnnnnnnnnnnnnnnnnnnnnnnnnnnnnnnnnnnnnnnnnnnnnnnnnnnnnnnnnnnnnnnnnnnnnnnnnnnnnnnnnnnnnnnnnnnnnnnnnnnnnnnnnnnnnnnnnnnnnnnnnnnnnnnnnnnnnnnnnnnnnnnnnnnnnnnnnnnnnnnnnnnnnnnnnnnnnnnnnnnnnnnnnnnnnnnnnnnnnnnnnnnnnnnnnnnnnnnnnnnnnnnnnnnnnnnnnnnnnnnnnnnnnnnnnnnnnnnnnnnnnnnnnnnnnnnnnnnnnnnnnnnnnnnnnnnnnnnnnnnnnnnnnnnnnnnnnnnnnnnnnnnnnnnnnnnnnnnnnnnnnnnnnnnnnnnnnnnnnnnnnnnnnnnnnnnnnnnnnnnnnnnnnnnnnnnnnnnnnnnnnnnnnnnnnnnnnnnnnnnnnnnnnnnnnnnnnnnnnnnnnnnnnnnnnnnnnnnnnnnnnnnnnnnnnnnnnnnnnnnnnnnnnnnnnnnnnnnnnnnnnnnnnnnnnnnnnnagggtttgtgtgagtgggtttccacggcaacatgaaaaacatggaaagaactctgtggtcgaatagtattggatcctgaattnnnnnnnnnnnnnnnnnnnnnnnnnnnnnnnnnnnnnnnnnnnnnnnnnnnnnnnnnnnnnnnnnnnnnnnnnnnnnnnnnnnnnnnnnnnnnnnnnnnnnnnnnnnnnnnnnnnnnnnnnngttgcccatgccatgaaaaactcattaccattttgatgctcctgattctacacaagaaggccagatagtcc

SEQ ID NO: 30829 - DNA, 462 bp, Macaca Mulatta
aggtcggcccaaggacaacccctcggtcactctgttcctgttgtcctctgaggagctccaagccaacaaggccacactggtgtgtctcatgagtgacttctatccaggaatcttgacggtgacctggaaggcagatggtacttccatcacccagggcatggagatgaccacgccctccaaacagagaacaacaagtacgcggccagcagctacctgagcctgacacctgagcagtggaggtcccacagaagctatggctaccaggtcacccatgaagggaacaccgtggttaagacagtgtcccctgcagaatgttcataggttcccaaccctcaccccacccacagggtcctggagctgcacgatcccaggggaggggtctctctttggatccgaagccatctagcccttctccctgtacccagtaaaccctcaataaatatcctcttggtcaaccagaaa

SEQ ID NO: 30830 - DNA, 2944 bp, Macaca Mulatta
  misc_feature (1)...(2944): n = A,T,C or G
gttatgcattagacccttcattagataatcatcaagtgtctgctaaatatattggttctgtagaagaagctgagaaaaatcaaggtnnnnnnnnnnnnnnnnnnnnnnnnnnnnnnnnnnnnnnnnnnnnnnnnnnnnnnnnnnnnnnnnnnnnnnnnnnnnnnnnnnnnnnnnnnnnnnnnnnnnnnnnnnnnnnnnnnnnnnnnnnnnnnnnnnnnnnnnnngaagaacaaaaagaattggatgaaatcacagcaaagaggcagacaaaaggaaagcaggaagaagagaaacctggggaggagaagacaatcttacatnnnnnnnnnnnnnnnnnnnnnnnnnnnnnnnnnnnnnnnnnnnnnnnnnnnnnnnnnnnnnnnnnnnnnnnnnnnnnnnnnnnnnnnnnnnnnnnnnnnnnnnnnnnnnnnnnnnnnnnnnnnnnnnnnnnnnnnnnnnnnnnnnnnnnnnnnnnnnnnnnnnnnnnnnnnnnnnnnnnnnnnnnnnnnnnnnnnnnnnnnnnnnnnnnnnnngctatgggaggtttatggagaccggcgctgtctgagaacatttattggtnnnnnnnnnnnnnnnnnnnnnnnnnnnnnnnnnnnnnnnnnnnnnnnnnnnnnnnnnnnnnnnnnnnnnnnnnnnnnnnnnnnnnnnnnnnnnnnnnnnnnnnnnnnnnnnnnnnnnnnnnnnnnnnnnnnnnnnnnnnnnnnnnnnnnnnnnnnnnnnnnnnnnnnnnnnnnnnnnnnnnnnnnnnnnnnnnnnnnnnnnnnnnnnnnnnnnnnnnnnnnnnnnnnnnnnnnnnnnnnnnnnnnnnnnnnnnnnnnnnnnnnnnnnnnnnnnnnnnnnnnnnnnnnnnnnnnnnnnnnnnnnnnnnnnnnnnnnnnnnnnnnnnnnnnnnnnnnnnnnnnnnnnnnnnnnnnnnnnnnnnnnnnnnnnnnnnnnnnnnnnnnnnnnnnnnnnnnnnnnnnnnnnnnnnnnnnnnnnnnnnnnnnnnnnnnnnnnnnnnnnnnnnnnnnnnnnnnnnnnnnnnnnnnnnnnnnnnnnnnnnnnnnnnnnnnnnnnnnnnnnnnnnnnnnnnnnnnnnnnnnnnnnnnnnnnnnnnnnnnnnnnnnnnnnnnnnnnnnnnnnnnnnnnnnnnnnnnnnnnnnnnnnnnnnnnnnnnnnnnnnnnnnnnnnnnnnnnnnnnnnnnnnnnnnnnnnnnnnnnnnnnnnnnnnnnnnnnnnnnnnnnnnnnnnnnnnnnnnnnnnnnnnnnnnnnnnnnnnnnnnnnnnnnnnnnnnnnnnnnnnnnnnnnnnnnnnnnnnnnnnnnnnnnnnnnnnnnnnnnnnnnnnnnnnnnnnnnnnnnnnnnnnnnnnnnnnnnnnnnnnnnnnnnnnnnnnnnnnnnnnnnnnnnnnnnnnnnnnnnnnnnnnnnnnnnnnnnnnnnnnnnnnnnnnnnnnnnnnnnnnnnnnnnnnnnnnnnnnnnnnnnnnnnnnnnnnnnnnnnnnnnnnnnnnnnnnnnnnnnnnnnnnnnnnnnnnnnnnnnnnnnnnnnnnnnnnnnnnnnnnnnnnnnnnnnnnnnnnnnnnnnnnnnnnnnnnnnnnnnnnnnnnnnnnnnnnnnnnnnnnnnnnnnnnnnnnnnnnnnnnnnnnnnnnnnnnnnnnnnnnnnnnnnnnnnnnnnnnnnnnnnnnnnnnnnnnnnnnnnnnnnnnnnnnnnnnnnnnnnnnnnnnnnnnnnnnnnnnnnnnnnnnnnnnnnnnnnnnnnnnnnnnnnnnnnnnnnnnnnnnnnnnnnnnnnnnnnnnnnnnnnnnnnnnnnnnnnnnnnnnnnnnnnnnnnnnnnnnnnnnnnnnnnnnnnnnnnnnnnnnnnnnnnnnnnnnnnnnnnnnnnnnnnnnnnnnnnnnnnnnnnnnnnnnnnnnnnnnnnnnnnnnnnnnnnnnnnnnnnnnnnnnnnnnnnnnnnnnnnnnnnnnnnnnnnnnnnnnnnnnnnnnnnnnnnnnnnnnnnnnnnnnnnnnnnnnnnnnnnnnnnnnnnnnnnnnnnnnnnnnnnnnnnnnnnnnnnnnnnnnnnnnnnnnnnnnnnnnnnnnnnnnnnnnnnnnnnnnnnnnnnnnnnnnnnnnnnnnnnnnnnnnnnnnnnnnnnnnnnnnnnnnnnnnnnnnnnnnnnnnnnnnnnnnnnnnnnnnnnnnnnnnnnnnnnnnnnnnnnnnnnnnnnnnnnnnnnnnnnnnnnnnnnnnnnnaaattattcctattttacctgtgaatatatacaacagaactttttaagattaaaaaattttttaaacgtctatgtctnnnnnnnnnntgacactcccggaagatggctagagttccccagtttgagaagtggtgaccatggtggaaaatagtttttaaacatcagattataaaatcaagataggccaggcgcagtggcacacgcctgtaatcccagcactttgggaggctgaggcaggtgaatcacctgaggtcaagagttcaagaccagcctggccaacataggaaaaccccatctctactaaaaatacaaaaattagtcaggcttggtggcgggcacctgtagtcccagctactcagaaggctgagaggcagggagaattgcttgaacccaggagcagaggttgcagtgagctgagatcatgcctctgcactccagcctaggcgacagagtgagactccnnnnnnnnnnnnnnntcaagataacctcttgaatgtagtagctcatagcactttaatttggcaagccatttttcctgttttattgtaagtctatattagatgtttgaatatagtttgaaatatttcactaccatgctgaaaaagattggttgatagctcttcggagtgcaaactggaagatcaaagtcatgtctcttgctgataacctaagagcattaaactaaaagtccagtgaggtcatagcagtgt

SEQ ID NO: 30831 - DNA, 638 bp, Macaca Mulatta
  misc_feature (1)...(638): n = A,T,C or G
taaccctgagatcacagatgcaggcattggatacctcttttcttttaggaaactaaactgcttagatatctctgggacagggctcaaggnaggatatcaaaaccgtcaagcacaagctccagacccacataggccttgttcactccaaagtgcctttgaaggaatttgatcatagtaactgcaagacagagggctgggctgaccagncagatcgttctgcagtgggagcgtgtgactgcggaagctgtgaagccacgggaaacctcagagcctagaacgacagctcagcgcttctnnnnnnnnnnnnnnnnnnnnnnnnnnnnnnnnnnnnnnnnnnnnnnnnnnnnnnnnnnnnnnnnnnnnnnnnnnnnnnnnnnnnnnnnnnnnnnnnnnnnnnnnnnnnnnnnnnnnnnnnnnnnnnnnnnnnnnnnnnnnnnnnnnnnnnnnnnnnnnnnnnnnnnnnnnnnnnnnnnnnnnnnnnnnnnnnnnnnnnnnnnnnnnnnnnnnnnnnnnnnnnnnnnnnnnatatttctacttttgtggtgggggaggggaatgctatggaagtatgtaataatttctaatgtatattttcaatacatagtaattttttcaaataaacatttttgctgtcctta

SEQ ID NO: 30832 - DNA, 343 bp, Macaca Mulatta
agcacactatgagccatataaacttcagactggcattgattgaaagaatgctggaagagcatcacaagccagggcagcaacaccttcgaggtcgtccgtgctctgatgatgtcacacctcttcgtctgtctggaagacatttccccaagagcataccaccaacgtcagggaaacagaatccaactggtcgctgcaaaatttgctgctcccaatacgacaaggatggcaaaaggatccggaaagaaacacgctatttttgtgctgaatgtgatgttccgctttgtgttgttccatgctttgaaatttaccacacgaaaaaaaattattaaataccgatcatcat

SEQ ID NO: 30833 - DNA, 965 bp, Macaca Mulatta
gagtgaggatggagtgtggctgcagccttcctgcgttaaaagtgttttgtgcacccgcaggttcagacagcctgctttcaactattacgactacaacacttttgaccagaatggtgtggtgggcccccacccactagttgtcaacattcactttgctactggcttcagtggtcacgggctccagcaggcccctggcgttgggcgagctgtggcagagatgatactggagggcagcttccagaccatcgacctgagccccttcctcttcaaccgcttttacttgggagagaagacccaggagaacaacatcatgtgagcatgtgtgctctgcactggctccactggcttgcatcctggctgtgttcacagccttctctgctgctccagtcttccccagcactgtgctgggccttctcccctccccagtgtcctctcctctcaggcgggccattgcatccacatggctgggcaggcacaggcactgaggcccaggccaacagcaagcgatgagcagaatcctaggactgatctgtagcccatgctggtgtcccccaccagggcaatccagctggaggcctgagcaccctggcccaggactggctccatcctggcactgaccaggaaagactgcctctgaccctcttagcagacagcccaggcatgggagcattctggggcagcctggctcaggtttcttgattgtctgtttaccctatccatcaatcaatacatgtgattaactccttccccccgtcttctgtctcttcttttcatggtacagcaggagctttttgaacacccattagccttgtatcaggacagggagctctttttacacaaacaaaacaaaaatgagcacaaacccacttttatagttaaattcttgaacgggacagtatcacacagaatatgtgtccgtaatccttaacagaaaaattgggaattttggcataaaccatgccacc

SEQ ID NO: 30834 - DNA, 785 bp, Macaca Mulatta
  misc_feature (1)...(785): n = A,T,C or G
ggnnnnnnnnnnnnnnnnnnnnntgcccgccaccacnnnnnnnnnnnnnnnnnnnnnnnnnnnnnnnnnnnnnnnnnnnnnnnnnnnnagccaggatggtcacaatctcctgaccttgtgatccannnnnnnnnnnnnnnnnnnnnactgggattacaagcgtgaaccaccgtgcctggccagatttttatttttaatatttttgagaaaactttttccgtagtacctgtgccattgtacattcccaccagcagtgcacaaggattacaatctatatatatcctcaccaacattgttcattttctatttctgttttttgggtttttttgttgtgccttttgttttgcatagcagctatcctgttggatgtgaggtggaatctcatagtgtctttcatttttattttgtgaatgattaatgatgttgaggatcttttcatgtgcttgttaggcatttgtgtatctggaaaaatattcaagtctctttttccatttttaatgggactctttgctttttgttgagttgtagaaattctttatagattctggatattaactccttaccaaatatatgcttttgacatattacctcccagtccataagttgctttttttgctcctgtgattgtgtccctttgatgaaattttaaattttgatgtactgtttgaactctctctggtccctggggtccttgtatttcatggattggaagccacccatgggatcaaaaagttatttgggaagcatcccatggaaattgccactggatcattaaatccaggaac

SEQ ID NO: 30835 - DNA, 650 bp, Macaca Mulatta
gctggaatacaggcttgagccacgcgcccggccagcaattagctcttgtcattgctagtagctagcaggttactctaagtaaattcagttgtgtgataaaaatgggtcaaatgtaatatgtattctacaaattacagaaaaaacatttcttagaaaaatttccaaagatgaatgactttagtattcagggatagtgcattgctctttgaaaactattaagtatttgggaatgtctggattatggtgggccaatgcttttgatcaactgccctgcacaaaaatgaaaaatgcttgagagagtgtgtgcgtatatgttcctggaggatttaatctatttaattatattgtgactaaaagtttcacgtctcaaaaaatttattagagattatgggctgtacttcataggttttaatatttctttcaattacaccagaatgtaaagctaacacatctcttttaaggataaagtagccaatatttggtgcagtttcaatgtctttctgaagataagggatattttgccacgtcacatccaattaatactgagcttttgttttacatttttgagcctgcttcctgcatgcataaaattaacacttcaggcctcttccaaaggactcagattgacactggttagctgtgcactatca

SEQ ID NO: 30836 - DNA, 270 bp, Macaca Mulatta
ggatgcccgggccaggctcacatcactgccctgaagtccttgggctgcttcctcttacttcacctggtttatatcgtggccagccccttctccatcacctccaagacttatcctcctgatctcaccagtgtcttcatctgggagacactcatggcggcctatccttctcttcattctctcatgttgatcatggggattcctagggtgaagcagacttgtcagaagatcctgtggaagacagtgtgtgcttggagatgctggggcccatga

SEQ ID NO: 30837 - DNA, 222 bp, Macaca Mulatta
cacccaactcaatgttcggccacaaggatggccccagtgtgcagaactttagcaaccctcacgaaccctggaaccggctgcaccgaacgcctccgtcgttcccgacccctccgccctggctgaagccaggggaggaggagcgcagcgcgtccgctgcagctcatgacagagatagagatgtagataaacgagactcatctgttaaaaggatgacaaagaaag

SEQ ID NO: 30838 - DNA, 971 bp, Macaca Mulatta
  misc_feature (1)...(971): n = A,T,C or G
ttctgggagggggaaaagaacatggtctgcgcggggaggaattacgcggaccacgtcagggagatgcgcagcgcgtttgaagcgagcccgtgctgatcctgaagccgtccacggcatacgcgcccgagggctcgcccatcttcatgcccgcgtacactcgcaacctgcaccacgagctggagctgggcgtggtgatgggcaaacgctgccgcgcggtccccgaggccgcggccatggactacgtgggcggttatgccctgtgcctagatatgaccgcccgggacgtgcaggacgagtgcaagaagaaggggctgccctggactctggccaagagcttcacggcgtcctgcccggtcagagaaaaagtgcccaaggagaagatccctgaccctcacaagctgaagctctggctcaaggtcaacggcgaactcagacaggagggtgagacagcctccatgattttttccatcccctacatcatcagctatgtttctaagatcataaccttggaagaaggagatattatcttgactgggacgccaaagggagttggtccgggtaaaaaaaacgatgagatcgaggctggcatacacgggctggtcagnnnnnnnnnnnnnnnnnnnnnnnnnnnnnnnnnnnnnnnnnnnnnnnnnnnnnnnnnnnnnnnnnnnnnnnnnnnnnnnnnnnnnnnnnnnnnnnnnnnnnnnnnnnnnnnnnnnnnnnnnnnnnnnnnnnnnnnnnnngtggctcacgcctataatcctagcactttgggaggccaagtgggggaccgatcatgaggtcaagagattgagaccatcctggctaacatggtgaaaccccatctctactaaaaatacaaaaaattagccaggcgtggtggcatgtgccgcctgtagttccagctaaagggaggctgaggcaggagaatcacttgaacccgggaggagagaggttgcagtgagctgaga

SEQ ID NO: 30839 - DNA, 1186 bp, Macaca Mulatta
  misc_feature (1)...(1186): n = A,T,C or G
gaccccgcgggcggacgcaaggactggaggaccgaggacagaaggattggtggaccggagcagcggccggcggggagggcgcttggcagcggcctgcggccatggccaccgtgatggcagcgacggcggcggagcgggccgtgctggnnnnnnnnnnnnnnnnnnnnnnnnnnnnnnnnnnnnnnnnnnnnnnnnnnnnnnnnnnnnnnnnnnnnnnnnnnnnnnnnnnnnnnnnnnnnnnnnnnnnnnnnnnnnnnnnnnnnnnnnnnnnnnnnnnnnnnnnnnnnnnnnnnnnnnnnnnnnnnnnnnnnnnnnnnnnnnnnnnnnnnnnnnnnnnnnnnnnnnnnnnnnnnnnnnnnnnnnnnnnnnnnnnnnnnnnnnnnnnnnnnnnnnnnnnnnnnnnnnnnnnnnnnnnnnnnnnnnnnnnnnnnnnnnnnnnnnnnnnnnnnnnnnnnnnnnnnnnnnnnnnnnnnnnnnnnnnnnnnnnnnnnnnnnnnnnnnnnnnnnnnnnnnnnnnnnnnnnnnnnnnnnnnnnnnnnnnnnnnnnnnnnnnnnnnnnnnnnnnnnnnnnnnnnnnnnnnnnnnnnnnnnnnnnnnnnnnnnnnnnnnnnnnnnnnnnnnnnnnnnnnnnnnnnnnnnnnnnnnnnnnnnnnnnnnnnnnnnnnnnnnnnnnnnnnnnnnnnnnnnnnnnnnnnnnnnnnnnnnnnnnnnnnnnnnnnnnnnnnnnnnnnnnnnnnnnnnnnnnnnnnnnnnnnnnnnnnnnnnnnnnnnnnnnnnnnnnnnnnnnnnnnnnnnnnnnnnnnnnnnnnnnnnnnnnnnnnnnnnnnnnnnnnnnnnnnnnnnnnnnnnnnnnnnnnnnnnnnnnnnnnnnnnnnnnnnnnnnnnnnnnnnnnnnnnnnnnnnnnnnnnnnnnnnnnnnnngatctccgtgttctccagctactggagctacgacccttctgatcacatgcacccatgcagcttgtctccaggaaggcagcccgtcccctcagacccgccccagagcaccagccagcaccaatgccaggctgctatttatctctctgtcctacccccgcccctgcctaacacatttgcactgctgggaatggacgctggaagcgccacgaggaagggaggctagtctggtagggtagtggggaggtccggaaggcggggccgaggg

SEQ ID NO: 30840 - DNA, 1435 bp, Macaca Mulatta
tggcaaagttcatgacacccggtgatccaggacaacccctccggctggggtccctgtgcggttcccgagcagtttcgggatatgccctaccagccgttcagcaaaggagatcggctaggaaaggttgcagactggacaggagccacgtaccaagataagaggtacacaaataagtactcctctcagtttggtggtggaagtcaatatgcttatttccacgaggaggatgaaagtagcttccagctggtggatacagcgcgcacacagaagacggcctaccagcggaatcggatgagatttgcccagaggaacctccgcagagacaaagatcgtcggaacatgttgcagttcaacctgcagatcctgcctaagagtgccaaacaaaaagagagagaacgcattcgactgcagaaaaagttccagaagcaatttggggttaggcagaaatgggatcagaaatcacagaaaccccgagactcttcagttgaagttcgtagtgactgggaggtgaaagaggaaatggattttcctcagttgatgaagatgcgctacttggaagtgtcagagccacaggacatcgagtgttgcggggccctggaatactacgacaaagcctttgaccgcatcaccacgaggagcgagaagccgctgcggagcatcaagcgcatcttccacactgtcaccaccacagacgaccctgtcatccgcaagctggcaaaaactcaggggaatgtgtttgccactgatgccatcctggccacgctgatgagctgtacccgctcagtgtattcctgggacattgtcgtccagagagttggatccaaactcttctttgacaagagagacaactctgactttgacctcctgacagtgagtgagactgccaatgagccccctcaagatgaaggtaattccttcaattcaccccgcaacctggccatggaggcaacctacatcaaccacaatttctcccagcagtgcttgagaatggggaaggaaagatacaacttccccaacccaaacccgtttgtagaggacgacatggataagaatgaaatcgcctctgttgcttaccgttaccgcaggtggaagcttggagacgatattgaccttattgtccgttgtgagcacgatggcgtcatgactggagccaacggggaagtgtccttcatcaacatcaagacactgaatgagtgggattccaggcactgtaacggcgttgactggcgtcagaagctggactctcagcgaggggccgtcattgccacggagctgaagaacaacagctacaagttggcccggtggacctgctgtgctttgctggctggatctgaatacctcaagcttggttatgtgtctcggtaccacgtgaaagactcctcacgccatgtcatcctggggcacccagcagttcaagcctaatgaatttgccagc

SEQ ID NO: 30841 - DNA, 428 bp, Macaca Mulatta
  misc_feature (1)...(428): n = A,T,C or G
aatcattcatgaggatggctattcagaggatgaatgtaaacaatataaagtagttgtctacagcaatactatacagtccatcattgcaatcataagagccatgggacggctaaagattgactttggggaagctgccagggcannnnnnnnnnnnnnnnnnnnnnnnnnnnnnnnnnnnnnnnnnnnnnnnnnnnnnnnnnnnnnnnnnnnnnnnnnnnnnnnnnnnnnnnnnnnnnnnnnnnnnnnnnnnnnnnnnnnnnnnnnnnnnnnnnnnnnnnnnnnnnnnnnnnnnnnnnnnntatctaaatgatctggatagaatatcccagtctaactacattccaactcagcaagatgttcttcggacgagagtgaagaccacaggcattgtagaaacgcatttcaccttcaaagacctatacttcaag

SEQ ID NO: 30842 - DNA, 2979 bp, Macaca Mulatta
  misc_feature (1)...(2979): n = A,T,C or G
tgctcagaatttcccatgggcatcgaccccaccgagacaggaccgcagtcagtggagaccatgggagaggtgtgtggagggcctctggcccttggcggattcgatccgttcccccagggaccatccacagatggcttcttccttcatgtagacagggctgatgaggacactgagggaaggttgtatgttagttgttcaaaaagccccaactcccacgattcagagccgtggactctcctcaggcaggattctgactcggatgtggtggacatagaggaagccgagcatgatttcctgggtgaggcccatcctgtggttctcagcagatacatcggggaggaagagtcggctaaactgcaggaggacatgaaggtgaaggaacatgaagacaaagatgacgccagtggccgctcgagcccctgcctgagcacagcgtctcagatgagcagcgtctctgtggcgagtgggagtgtgaagatgaccagctttgcagagaggaagctccagagactcaacagctgcgagaccaagtccagcaccagcagctcccaaaagaccacaccagatgcgtctgagagctgcccggcccctctgacgacatggaggcagaaaagggagcagagcccgggccggcatggcagggaccccgccagcctnnnnnnnnnnnnnnnnnnnnnnnnnnnnnnnnnnnnnnnnnnnnnnnnnnnnnnnnnnnnnnnnnnnnnnnnnnnnnnnnnnnnnnnnnnnnnnnnnnnnnnnnnnnnnnnnnnnnnnnnnnnnnnnnnnnnnnnnnnnnnnnnnnnnnnnnnnnnnnnnnnnnnnnnnnnnnnnnnnnnnnnnnnnnnnnnnnnnnnnnnnnnnnnnnnnnnnnnnnnnnnnnnnnnnnnnnnnnnnnnnnnnnnnnnnnnnnnnnnnnnnnnnnnnnnnnnnnnnnnnnnnnnnnnnnnnnnnnnnnnnnnnnnnnnnnnnnnnnnnnnnnnnnnnnnnnnnnnnnnnnnnnnnnnnnnnnnnnnnnnnnnnnnnnnnnnnnnnnnnnnnnnnnnnnnnnnnnnnnnnnnnnnnnnnnnnnnnnnnnnnnnnnnnnnnnnnnnnnnnnnnnnnnnnnnnnnnnnnnnnnnnnnnnnnnnnnnnnnnnnnnnnnnnnnnnnnnnnnnnnnnnnnnnnnnnnnnnnnnnnnnnnnnnnnnnnnnnnnnnnnnnnnnnnnnnnnnnnnnnnnnnnnnnnnnnnnnnnnnnnnnnnnnnnnnnnnnnnnnnnnnnnnnnnnnnnnnnnnnnnnnnnnnnnnnnnnnnnnnnnnnnnnnnnnnnnnnnnnnnnnnnnnnnnnnnnnnnnnnnnnnnnnnnnnnnnnnnnnnnnnnnnnnnnnnnnnnnnnnnnnnnnnnnnnnnnnnnnnnnnnnnnnnnnnnnnnnnnnnnnnnnnnnnnnnnnnnnnnnnnnnnnnnnnnnnnnnnnnnnnnnnnnnnnnnnnnnnnnnnnnnnnnnnnnnnnnnnnnnnnnnnnnnnnnnnnnnnnnnnnnnnnnnnnnnnnnnnnnnnnnnnnnnnnnnnnnnnnnnnnnnngcaaccagcggacacttactctgttctcttccaaagacaccaacattctttcggagcagatgagcctcaaagaagttctggatgcaagtgtgaaggaggcggggcccagctcctcagatgtctcgggaaaagaaagcatccccgtggaggagcctctgaggagcagggccagcctcattgaagtggacctctctgacctgaaggcccccgacgaggacggggagctggcaagcctcgacggctcggcggacctcatcagcgaaggcgaccagaagccgggggtcggcttcttcttcaaggnnnnnnnnnnnnnnnnnnnnnnnnnnnnnnnnnnnnnnnnnnnnnnnnnnnnnnnnnnnnnnnnnnnnnnnnnnnnnnnnnnnnnnnnnnnnnnnnnnnnnnnnnnnnnnnnnnnnnnnnnnnnnnnnnnnnnnnnnnnnnnnnnnnnnnnnnnnnnnnnnnnnnnnnnnnnnnnnnnnnnnnnnnnnnnnnnnnnnnnnnnnnnnnnnnnnnnnnnnnnnnnnnnnnnnnnnnnnnnnnnnnnnnnnnnnnnnnnnnnnnnnnnnnnnnnnnnnnnnnnnnnnnnnnnnnnnnnnnnnnnnnnnnnnnnnnnnnnnnnnnnnnnnnnnnnnnnnnnnnnnnnnnnnnnnnnnnnnnnnnnnnnnnnnnnnnnnnnnnnnnnnnnnnnnnnnnnnnnnnnnnnnnnnnnnnnnnnnnnnnnnnnnnnnnnnnnnnnnnnnnnnnnnnnnnnnnnnnnnnnnnnnnnnnnnnnnnnnnnnnnnnnnnnnnnnnnnnnnnnnnnnnnnnnnnnnnnnnnnnnnnnnnnnnnnnnnnnnnnnnnnnnnnnnnnnnnnnnnnnnnnnnnnnnnnnnnnnnnnnnnnnnnnnnnnnnnnnnnnnnnnnnnnnnnnnnnnnnnnnnnnnnnnnnnnnnnnnnnnnnnnnnnnnnnnnnnnnnnnnnnnnnnnnnnnnnnnnnnnnnnnnnnnnnnnnnnnnnnnnnnnnnnnnnnnnnnnnnnnnnnnnnnnnnnnnnnnnnnnnnnnnnnnnnnnnnnnnnnnnnnnnnnnnnnnnnnnnnnnnnnnnnnnnnnnnnnnnnnnnnnnnnnnnnnnnnnnnaggagctggagaagtgtgacgccaatcactacatcatactgtttcgtgatgctggctgccagttcagggcactttactgctactatcctgacactgaggaaatctacaaactcactggcacggggccaaagaacatcaccaagaaaatgatcgacaagctgtataaatacagctcagaccgaaaacagtttaacttgatcccagccaaaaccatgtctgtcagtgtggatgcactcacaatccacaaccacctgtggcagcccaagcggcccgcagtgccaaagaagggccagactcgtaaatga

SEQ ID NO: 30843 - DNA, 1958 bp, Macaca Mulatta
  misc_feature (1)...(1958): n = A,T,C or G
gactgtgttgtatgaatgttgtcctggttatacgagaatggaaggaatgaaaggctgcccagcannnnnnnnnnnnnnnnnnnnnnnnnnnnnnnnnnnnnnnnnnnnnnnnnnnnnnnnnnnnnnnnnnnnnnnnnnnnnnnnnnnnnnnnnnnnnnnnnnnnnnnnnnnnnnnnnnnnnnnnnnnnnnnnnnnnnnnnnnnnnnnnnnnnnnnnnnnnnngatatccgtagaggtttggagagcaacgtgaatgttgaattactgaatgctttacatagccacatgattaataagagaatgttgaccaaagacttaaaaaatggcatgattattccttcaatgtataacaatttggggcttttcattaaccattatcccaatggggnnnnnnnnnnnnnnnnnnnnnnnnnnnnnnnnnnnnnnnnnnnnnnnnnnnnnnnnnnnnnnnnnnnnnnnnnnnnnnnnnnnnnnnnnnnnnnnnnnnnnnnnnnnnnnnnnnnnnnnnnnnnnnnnnnnnnnnnnnnnnnnnnnnnnnnnnnnnnnnnnnnnnnnnnnnnnnnnnnnnnnnnnnnnnnnnnnnnnnnnnnnnnnnnnnnnnnnnnnnnnnnnnnnnnnnnnnnnnnnnnnnnnnnnnnnnnnnnnnnnnnnnnnnnnnnnnnnnnnnnnnnnnnnnnnnnnnnnnnnnnnnnnnnnnnnnnnnnnnnnnnnnnnnnnnnnnnnnnnnnnnnnnnnnnnnnnnnnnnnnnnnnnnnnnnnnnnnnnnnnnnnnnnnnnnnnnnnnnnnnnnnnnnnnnnnnnnnnnnnnnnnnnnnnnnnnnnnnnnnnnnnnnnnnnnnnnnnnnnnnnnnnnnnnnnnnnnnnnnnnnnnnnnnnnnnnnnnnnnnnnnnnnnnnnnnnnnnnnnnnnnnnnnnnnnnnnnnnnnnnnnnnnnnnnnnnnnnnnnnnnnnnnnnnnnnnnnnnnnnnnnnnnnnnnnnnnnnnnnnnnnnnnnnnnnnnnnnnnnnnnnnnnnnnnnnnnngatgatactctgaggatggatcagcgccttcttaaattaattttgcagaatcacatattgaaagtaaaagttggccttaatgagctttacaatggacaaatactggaaaccattggaggcaaacagctcagagtcttcgtatatcgtacannnnnnnnnnnnnnnnnnnnnnnnnnnnnnnnnnnnnnnnnnnnnnnnnnnnnnnnnnnnnnnnnnnnnnnnnnnnnnnnnnnnnnnnnnnnnnnnntccctccatgaaaagttaaaacaagataagcgctttantagcaccttcctcagcctactcgaagctgcagacttgaaagagctcctgacacaacctggagactggacattatttgtgccaaccaatgatgcttttaagggaatgactagtgaagannnnnnnnnnnnnnnnnggacaaaaatgctcttcaaaacatcattctttatcacctgacaccaggagttttcattggaaaaggatttgaacctggcgttactaacattttaaagaccacacaaggaagcaaaatctttctgaaagaagtaannnnnnnnnnnnnnnnnnnnnnnnnnnnnnnnnnnnnnnnnnnnnnnnnnnnnnnnnnnnnnnnnnnnnnnnnnnnnnnnnnnnnnnnnnnnnnnnnnnnnnnnnnnnnnnnnnnnnnnnnnnnnnnnnnnnnnnnnnnnnnnnnnnnnnnnnnnnnnnnnnnnnnnnnnnnnnnnnnnnnnnnnnnnnnnnnnnnnnnnnnnnnnnnnnnnnnnnnnnnnnnnnnnnnnnnnnnnnnnnnnnnnnnnnnnnnnnnnnnnnnnnnnnnnnnnnnnnnnnnnnnnnnnnnnnnggacccacaataacaaaagtcaaaattgaaggtgaacctgaattcagactgattaaagaaggtgaaacaataactgaagtgatccatggag

SEQ ID NO: 30844 - DNA, 409 bp, Macaca Mulatta
  misc_feature (1)...(409): n = A,T,C or G
ctcacaggccctgtggacagcgatgaccgccatggatctgtgctgagactcagccaggccctgggtaatgtgacgnnnnnnnnnnnnnnnnnnnnnnnnnnnnnnnnnnnnnnnnnnnnnnnnnnnnnnnnnnnnnnnnnnnnnnnnnnnnnnnnnnnnnnnnnnnnnnnnnnnnnnnnnnnnnnnnnnnnnnnnnnnnnnnnnnnnnnnnnnnnnnnnnnnnnnnnnnnnnnnnnnnnnngtccagccctctcctggtggctgcattcggcgcctgctctctcaccaggcagtgcaaccaccaagccttccagaagcacggtcgctccaccaccacctccgacaggatcgccgaggtgggggccgccttccgcaagctcttcgaaacctgagcccacgcagaccagaa

SEQ ID NO: 30845 - DNA, 561 bp, Macaca Mulatta
  misc_feature (1)...(561): n = A,T,C or G
cagtcctagtgggggcaggtagcaggagngaggctctcccccggtgacctctgatcttctcattcccagaccgctgacactggtgtgacatcgccgtgctggtgggggtgcttctcctcgttcttatcttacttttctctctctgaccccagccctccctggcaggctggtccgttaagcctggggagccaccaagcactttggagctggcctagccccctaggaggagagggtccctcctgggtagctggaaagtagaggttcctgcctggttttctgtccccacggctcccccccagagccagtggtacccttcatgaccctgggccgaaaccaccaccactggtcctgtctcaagtgcacttagggggtggtagaggcagcgtcacctcagacacacccctctccatttccagttccgggaccccaaagccattcacccctgtgccttacacatgtgccaacctggaaataaaacgtcagccttttttatacgtatttgtgtcgtgtggtgtgtgttgactgcaaatgacggactgaaacctgattgggaatcccata

SEQ ID NO: 30846 - DNA, 144 bp, Macaca Mulatta
  misc_feature (1)...(144): n = A,T,C or G
tgctgctgggggtganatctttgaccagtgtgttgcagacagagaggaagccttanaagaaaaagatgttcagagacttatgcgacagattctagaaggtgttcactttttacacactcatgatgtagttcatcttgatttgaa

SEQ ID NO: 30847 - DNA, 289 bp, Macaca Mulatta
tttgctttcccatcatctcaagtatttccaaaagaactgctcagatgaagagaatgggacagtgtcggtagctatcagatgtttgttcttattaatgctccattgagagtttgtgaatttcccatgtggaagggaatatgtggtgttactgatgacaaactgacaagaccatcctgtccacatttgaatcagattagattatgaaataaagatttcagggggatttatgtattcctgcacagaatagtggtttgaggatgacagacaattaaaccccattccaacttgt

SEQ ID NO: 30848 - DNA, 763 bp, Macaca Mulatta
  misc_feature (1)...(763): n = A,T,C or G
gggggagcaatcctttctatgtgattttcaatcatagcgagcaagaaaggctccagtttatcaaagtagttcagcgcttatggcatataaaatagtccatacttgagataaaaacctacccaagtgatggaatgtgaagcaatgtcttcaaaattagtagatatttctggacataaaacacagatgaggaagggactttaattagaagttacataatcaccatcagaatgttcatgtttggtaaattctgttactagaaatgtaggaaattcaagtatagctttgaatcccaattacacattggtcagtgggaaaactgagaaaggcctccaacaggcaaattcagggagaggtaggtttcagggaatataaatttacttaatattagtggtctttaagtataaacttgatgtaattggtttgggaggggcagtgataatgacttctgaaacaaaatttggatttccttttaggaaaagtagaaagcatagacttacaagtctaacaggagataggagagagtcactcataaaaaatgcaaattgatgaacatactattgtgaaacattagttgaatggatgaaacttttttaaagtttcagatgaattcccataatgatgaatttgtgatgagggataacctggaagtggtattcacacattatgctacaataaaaggttctaccgtgggagaggattttgacacattcagtaactaatggaaacacaccntcaacatgaaatttgcaccttacatgacaga

SEQ ID NO: 30849 - DNA, 2057 bp, Macaca Mulatta
  misc_feature (1)...(2057): n = A,T,C or G
ccggtctcgcccccgcgctaccgccctgttgcttcggggcggaagtagcggagcccgggctcggcccccttaaagggacagggactgctgcaacctaccgggtgtacttgggaacgagaggtgaagcggcccaggnnnnnnnnnnnnnnnnnnnnnnnnnnnnnnnnnnnnnnnnnnnnnnnnnnnnnnnnnnnnnnnnnnnnnnnnnnnnnnnnnnnnnnnnnnnnnnnnnnnnnnnnnnttgggccagggcttcccggatttcccgcccccagactttgctgtggaagcctttcagcatgctgtcagtggagacttcatgctcaaccagtacaccaaggcatttgggttacccaccgctgacgaaggtcctggcaagtttctttgggaagcttctgggtcaggagatggacccgctcaggaatgtgctcgtgactgtcggtggctatggggccctgttcacagccttccaggccctggtggacgaaggagatgaggnnnnnnnnnnnnnnnnnnnnnnnnnnnnnnnnnnnnnnnnnnnnnnnnnnnnnnnnnnnnnnnnnnnnnnnnnnnnnnnnnnnnnnnnnnnnnnnnnnnnnnnnnnnnnnnnnnnnnnnnnnnnnnnnnnnnnnnnnnnnnnnnnnnnnnnnnnnnnnnnnnnnnnnnnnnnnnnnnnnnnnnnnnnnnnnnnnnnnnnnnnnnnnnnnnnnnnnnnnnnnnnnnnnnnnnnnnnnnnnnnnnnnnnnnnnnnnnnnnnnnnnnnnnnnnnnnnnnnnnnnnnnnnnnnnnnnnnnnnnnnnnnnnnnnnnnnnnnnnnnnnnnnnnnnnnnnnnnnnnnnnnnnnnnnnnnnnnnnnnnnnnnnnnnnnnnnnnnnnnnnnnnnnnnnnnnnnnnnnnnnnnnnnnnnnnnnnnnnnnnnnnnnnnnnnnnnnnnnnnnnnnnnnnnnnnnnnnnnnnnnnnnnnnnnnnnnnnnnnnnnnnnnnnnnnnnnnnnnnnnggccgcagtagccgagagctttgagcgggagcagctgctcttcggccaacccagcagctactttgtgcagttcccgcaggccatgcagcgctgccgggaccacatggtacgcagcctacagtcagtgggcctgaagcccgtcgtcccccagggcagctacttcctcatcacagacatctcagacttcanagaggaagatgcctgatttgtctggagctgtggatgagccctatgnnnnnnnnnnnnnnnnnnnnnnnnnnnnnnnnnnnnnnnnnnnnnnnnnnnnnnnnnnnnnnnnnnnnnnnnnnnnnnnnnnnnnnnnnnnnnnnnnnnnnnnnnnnnnnnnnnnnnnnnaggatgaagccacgctccaggccatggacgagaagctgcggaagtggaaggcggagctctagccctgaagtcataccttggccctgacatccccacctgcccgcagagatactcttgggtgtctgtctttgtccaggtttcagacatttccgggtcggggaagatgctgttgggaaacctcttctctgtgacacagaatgttctgggtgggagccgcccttcttcatcttagagaaccaagtgcctcctgtctgaaaggtgagggcggcctgacctgggcctctctcggctcctctgtaggtggatttgtagggtcttgggttgcttctggtctctccaggcttggccgagaccaacagtagagtcccaccgtgtatcgatcacatcccagccctgcatgggccctgctaaggctcaggcataacctcacctttcctggctcatcttggccttggggatttgcctttagacttgagtgctcaagccactccttttcatccataataaaatgtttaagttattcaaatccttctgacatttcctctctgtttcacactcgagctgatggctgatctaacttggtaagaatgcctgggagaacctcagacacccccacaactttgtacaaatgatttctgtagtcacatagttagtggcacaaccaggcctagcacccaaggcccccaaatgaattccttactatta

SEQ ID NO: 30850 - DNA, 686 bp, Macaca Mulatta
gtgggagtaaggggcaagcaactgggaccagctatggagatgttagggatttgtaattaaataacaatgtatgtcttagttataaagtgcctaacaatttgtattgacctgaaagtgcacatacgcattttagaaaatgctttcattagtcaattcccaggcttaactttagagcagtaacttacctttgccattgttcattacatttcttaagcctttccctctgtgcccagcacagtgctgggagcatcagggtgactggatggggccttccccgtaaggctcacactgtgtgtatgcacaagtacacacctgcctctgcaagggctcagctctctcctgcttcctcacaggtttgcacagatgaagaatgaagcctagtagaatatggacttggaaaattctcttaatcactactgtatgtaatatttacgttaagactgtgctgagaagcagtataagcctttttaaccttccaagacttgagactggcacggttgacaagcgtcacttctcctgctgctcctgtttgtctgatgtggcaaaaggctctctggagggctggtggccacgaggttaaagaagctgcatgttaagtgccattactactgtacacggaccatcgcctctgtctcctccgtgtctcgcgtgactgagaaccgtgacattcgcgtagtgttttgacc

SEQ ID NO: 30851 - DNA, 1899 bp, Macaca Mulatta
  misc_feature (1)...(1899): n = A,T,C or G
gaaggtggaagcaggagcacctgtcacagctccctggaatctacaccctgctccgaatttcctggggacagtccccagtcgttgaacacagacttgctgtcaatgacctcaagtgtcctgggcagtagcatggatcagttaagtgcagagtctccagacnnnnnnnnnnnnnnnnnnnnnnnnnnnnnnnnnnnnnnnnnnnnnnnnnnnnnnnnnnnnnnnnnnnnnnnnnnnnnnnnnnnnnnnnnnnnnnnnnnnnnnnnnnnnnnnnnnnnnnnnnnnnnnnnnnnnnnnnnnnnnnnnnnnnnnnnnnnnnnnnnnnnnnnnnnnnnnnnnnnnnnnnnnnnnnnnnnnnnnnnnnnnnnnnnnnnnnnnnnnnnnnnnnnnnnnnnnnnnnnnnnnnnnnnnnnnnnnnnnnnnnnnnnnnnnnnnnnnnnnnnnnnnnnnnnnnnnnnnnnnnnnnnnnnnnnnnnnnnnnnnnnnnnnnnnnnnnnnnnnnnnnnnnnnnnnnnnnnnnnnnnnnnnnnnnnnnnnnnnnnnnnnnnnnnnnnnnnnnnnnnnnnnnnnnnnnnnnnnnnnnnnnnnnnnnnnnnnnnnnnnnnnnnnnnnnnnnnnnnnnnnnnnnnnnnnnnnnnnnnnnnnnnnnnnnnnnnnnnnnnnnnnnnnnnnnnnnnnnnnnnnnnnnnnnnnnnnnnnnnnnnnnnnnnnnnnnnnnnnnnnnnnnnnnnnnnnnnnnnnnnnnnnnnnnnnnnnnnnnnnnnnnnnnnnnnnnnnnnnnnnnnnnnnnnnnnnnnnnnnnnnnnnnnnnnnnnnnnnnnnnnnnnnnnnnnnnnnnnnnnnnnnnnnnnnnnnnnnnnnnnnnnnnnnnnnnnnnnnnnnnnnnnnnnnnnnnnnnnnnnnnnnnnnnnnnnnnnnnnnnnnnnnnnnnnnnnnnnnnnnntgggtgcagatgatgccgggctgctcaagccagatcannnnnnnnnnnnnnnnnnnnnnnnnnnnnnnnnnnnnnnnnnnnnnnnnnnnnnnnnnnnnnnnnnnnnnnnnnnnnnnnnnnnnnnnnnnnnnnnnnnnnnnnnnnnnnnnnnnnnnnnnnnnnnnnnnnnnnnnnnnnnnnnnnnnnnnnnnnnnnnnnnnnnnnnnnnnnnnnnnnnnnnnnnnnnnnnnnnnnnnnnnnnnnnnnnnnnnnnnnnnnnnnnnnnnnnnnnnnnnnnnnnnnnnnnnnnnnnnnnnnnnnnnnnnnnnnnnnnnnnnnnnnnnnnnnnnnnnnnnnnnnnnnnnnnnnnnnnnnnnnnnnnnnnnnnnnnnnnnnnnnnnnnnnnnnnnnnnnnnnnnnnnnnnnnnnnnnnnnnnnnnnnnnnnnnnnnnnnnnnnnnnnnnnnnnnnnnnnnnnnnnnnnnnnnnnnnnnnnnnnnnnnnnnnnnnnnnnnnnnnnnnnnnnnnnnnnnnnnnnnnnnnnnnnnnnnnnnnnnnnnnnnnnnnnnnnnnnnnnnnnnnnnnnnnnnnnnnnnnnnnnnnnnnnnnnnnnnnnnnnnnnnnnnnnnnnnnnnnnnnnnnnnnnnnnnnnnnnnnnnnnnnnnnnnnnnnnnnnnnnnnnnnnnnnnnnnnnnnnnnnnnnnnnnnnnnnnnnnnnnnnnnnnnnnnnnnnnnnnnnngtgagcatcacggactatgtggtgtttgaccagtgcagcttatttcagacgataatccatgccactcactcggtggccacagctgcccaagcccctgtagagaaggtggcagataagctgcgcatggcgttttggtcccagcagcttcagtgccagccaagccttctcggggtcaataacagtggcgtctggatctcctcgggcaagaatgaattccacgtcgctaagggaagtctcatag

SEQ ID NO: 30852 - DNA, 196 bp, Macaca Mulatta
atcattcagattaatttaattttgtattttctagctcagatgaacttaaagaagcatcaaacatttcttttttatgaaatgttaaatttaatagcatcacaggccggtaaaatatattcaagtaactgagaaattatcaaagtcttttggccacaataaactgaacactttatgaaagcatactcatcatggatct

SEQ ID NO: 30853 - DNA, 231 bp, Macaca Mulatta
ttctgacaaatacctggcatgacagaatggaattcattcctctttgagagattttgtatacatatagacctcttaatttatctatctgtaatatatataaaccggtacgccatggtttgaagaccaccttctagttcaggactcctgttcttcccagcgtggccactatttcgatgatggctgatgtgagtgagtgtgatggccctgaagggctgtgggatggaggttccc

SEQ ID NO: 30854 - DNA, 2326 bp, Macaca Mulatta
  misc_feature (1)...(2326): n = A,T,C or G
gatgctagctaaacagttggaagctcttggtttagctgaaaagcctcagttggtgactcgctttcaagaagtttttcggtcaatgtggtctgtgaatggtgattcaatcagtaagatatatgcaggaactggagctcttgaagggaaagcgaagnaagttaaaagatggtgctcggtctgtcacccggacaattcagaataacttctttgacagctccaagcaagaggccattgatgttttgctgctgggaaatactctgaatagtgatttagctgacaaagctcgagcacttttaactactggaagtttgcgtgngcatcttctaaagtactaaagagcatgtgtgagaatttctacaaatattcaaagcccaagaaaattcgagtatgtgtcggaacctggaatgtgaatggtgggaagcagtttcgcagcatagcttttaaaaatcagacactcactgactggcttcttgatgcacccaagttagctggcatccaggagtttcaagnnnnnnnnnnnnnnnnnnnnnnnnnnnnnnnnnnnnnnnnnnnnnnnnnnnnnnnnnnnnnnnnnnnnnnnnnnnnnnnnnnnnnnnnnnnnnnnnnnnnnnnnnnnnnnnnnnnnnnnnnnnnnnnnnnnnnnnnnnnnnnnnnnnnnnnnnnnnnnnnnnnnnnnnnnnnnnnnnnnnnnnnnnnnnnnnnnnnnnnnnnnnnnnnnnnnnnnnnnnnnnnnnnnnnnnnnnnnnnnnnnnnnnnnnnnnnnnnnnnnnnnnnnnnnnnnnnnnnnnnnnnnnnnnnnnnnnnnnnnnnnnnnnnnnnnnnnnnnnnnnnnnnnnnnnnnnnnnnnnnnnnnnnnnnnnnnnnnnnnnnnnnnnnnnnnnnnnnnnnnnnnnnnnnnnnnnnnnnnnnnnnnnnnnnnnnnnnnnnnngaaggatgctgttttcccatgactatgtattttggtgtggtgatttcaactatcgaattgatctccctaatgaagaagttaaagagctcataagacagcaaaattgggattctcttatagcaggagatcaacttatcaatcagaaaaatgctggacaggtnnnnnnnnnnnnnnnnnnnnnnnnnnnnnnnnnnnnnnnnnnnnnnnnnnnnnnnnnnnnnnnnnnnnnnnnnnnnnnnnnnnnnnnnnnnnnnnnnnnnnnnnnnnnnnnnnnnnnnnnnnnnnnnnnnnnnnnnnnnnnnnnnnnnnnnnnnnnnnnnnnnnnnnnnnnnnnnnnnnnnnnnnnnnnnnnnnnnnnnnnnnnnnnnnnnnnnnnnnnnnnnnnnnnnnnnnnnnnnnnnnnnnnnnnnnnnnnnnnnnnnnnnnnnnnnnnnnnnnnnnnnnnnnnnnnnnnnnnnnnnnnnnnnnnnnnnnnnnnnnnnnnnnnnnnnnnnnnnnnnnnnnnnnnnnnnnnnnnnnnnnnnnnnnnnnnnnnnnnnnnnnnnnnnnnnnnnnnnnnnnnnnnnnnnnnnnnnnnnnnnnnnnnnnnnnnnnnnnnnnnnnnnnnnnnnnnnnnnnnnnnnnnnnnnnnnnnnnnnnnnnnnnnnnnnnnnnnnnnnnnnnnnnnnnnnnnnnnnnnnnnnnnnnnnnnnnnnnnnnnnnnnnnnnnnnnnnnnnnnnnnnnnnnnnnnnnnnnnnnnnnnnnnnnnnnnnnnnnnnnnnnnnnnnnnnnnnnnnnnnnnnnnnnnnnnnnnnnnnnnnnnnnnnnnnnnnnnnnnnnnnnnnnnnnnnnnnnnnnnnnnnnnnnnnnnnnnnnnnnnnnnnnnnnnnnnnnnnnnnnnnnnnnnnnaggtgatgttgatgactatagtgccgaagtggaggaacttcttcctcagcatctccagccatcttcaagttccggccttggtacttcccccagctcttcaccgcgaactagtccctgccagtcacctacgatatcagagggtccggtaccttcccttcccatcagaccaagccgagcaccgtcaagaactcctgggccccccagtgcacagagnnnnnnnnnnnnnnnnnnnnnnnnnnnnnnnnnnnnnnnnnnnnnnnnnnnnnnnnnnnnnnnnnnnnnnnnnnnnnnnnnnnnnnnnnnnnnnnnnnnnnnnnnnnnnnnnnnnnnnnnnnnnnnnnnnnggacgcagtcagccttcacctcaaggaggacttgcaggcccaggacctgctgganngattcctcctcgtgctggagttatcagtgccccacagagccatgcgcgggcatctgctggaagactgactcctgaaagccaaagcaaaacatcagaaacgtcgaaagg

SEQ ID NO: 30855 - DNA, 390 bp, Macaca Mulatta
ttacgggaaatataagaacttcctcagaaagaacaggtccaaattcttcccatcgggtcactaatttcaaggttctatcttttttctcttggtgacccacatggctctgtgtgtttttaaaaattgtccaccaggaagcacttcgtgcccagaaagttcctgaagcatcaaccagggcagggaggcgtccactccaccagctggtgggtgtttgcgatcgtcaagcaccagttacaggtcatagccacgtcactcacagatgattgttggtcggtggagaataaactatgagcagcggattacgttaaacagttgttttgtgtggttggtgtgtcacagtacctgtcacgtttggcctggtaacgaggacgtggctaagggaataccaga

SEQ ID NO: 30856 - DNA, 1273 bp, Macaca Mulatta
  misc_feature (1)...(1273): n = A,T,C or G
gattccatcatgaaaaagaggaagctcaaactgaagtgagttaaaaacttcatctcctagagaagattgtggctcagcctgagttgannnnnnnnnnnnnnnnnnnnnnnnnnnnnnnnnnnnnnnnnnnnnnnnnnnnnnnnnnnnnnnnnnnnnnnnnnnnnnnnnnnnnnnnnnnnnnnnnnnnnnnnnnnnnnnnnnnnnnnnnnnnnnnnnnnnnnnnnnnnnnnnnnnnnnnnnnnnnnnnnnnnnnnnnnnnnnnnnnnnnnnnnnnnnnnnnnnnnnnnnnnnnnnnnnnnnnnnnnnnnnnnnnnnnnnnnnnnnnnnnnnnnnnnnnnnnnnnnnnnnnnnnnnnnnnnnnnnnnnnnnnnnnnnnnnnnnnnnnnnnnnnnnnnnnnnnnnnnnnnnnnnnnnnnnnnnnnnnnnnnnnnnnnnnnnnnnnnnnnnnnnnnnnnnnnnnnnnnnnnnnnnnnnnnnnnnnnnnnnnnnnnnnnnnnnnnnnnnnnnnnnnnnnnnnnnnnnnnnnnnnnnnnnnnnnnnnnnnnnnnnnnnnnnnnnnnnnnnnnnnnnnnnnnnnnnnnnnnnnnnnnnnnnnnnnnnnnnnnnnnnnnnnnnnnnnnnnnnnnnnnnnnnnnnnnnnnnnnnnnnnnnnnnnnnnnnnnnnnnnnnnnnnnnnnnnnnnnnnnnnnnnnnnnnnnnnnnnnnnnnnnnnnnnnnnnnnnnnnnnnnnnnnnnnnnnnnnnnnnnnnnnnnnnnnnnnnnnnnnnnnnnnnnnnnnnnnnnnnnnnnnnnnnnnnnnnnnnnnnnnnnnnnnnnnnnnnnnnnnnnnnnnnnnnnnnnnnnnnnnnnnnnnnnnnnnnnnnnnnnnnnnnnnnnnnnnnnnnnnnnnnnnnnnnnnnnnnnnnnnnnnnnnnnnnnnnnnnnnnnnnnnnnnnnnnnnnnnnnnnnnnnnnnnnnnnnnnnnnnnnnnnnnnnnnnnnnnnnnnnnnnnnnnnnnnnnnnnnnnnnnnnnnnnnnnnnnnaggaaaaattgaaaaacattctgaagcctgggtgtctacaagatacaaaaagtaagagtgagttgaaagaatcctcaaaacatgtcaccatctcaaacataacactgacttttgaaggtaaaagatattttcaaactaccttgactccagtagaaagtgaggcaaatacatccaaggagatggagaataagacctctgaagaaaagacacctgattttcagagtacggctctcgaggctgaagaatccagg

SEQ ID NO: 30857 - DNA, 854 bp, Macaca Mulatta
atgagtgactccaaggaaccaagggcgcagccgctgggcctcctggaagaggaagagctgataactagcagtatgaatttttttccaagagactttggattccgacagactcgaggctacaagagcttagcagggtgtctgggccacgcacccctggtgctgccgctcctcttcttcacactcttcactgggctgctggtggccatccttgtccaagtctccaagaaccccagctcccagaggctggatcagtccaagcaggacgagatctcccaggacctgtcccagctgaaggctgctgtggaacgcctgtgccgcccctgtccctgggagtggacattcttccaaggaaactgttacttcatatcgaactcccagcggaactggcatgactccatcaccgcctgccaggaggtgggggcccagctcgtcgtaatcaaaagtgctgaggagcagaacttcctacagctgcagtcttccagaagtaaccgcttcgcctggatgggactttcagatctaaatcaggaagacatgtggcaatgggtggacgactcacctctgtcaaccagcttcaagcaatattggaacagaggagagcccaacaatatcggggaggaagactgtgtggaatttaatggcaatggctggaatgacgacaaatgcagtgctgccaaattctggatctgcaaaaagtctgcagcctcctgctccagagatgaagggcagcttctctcctcagcctctgcatccccgattgcccatgcggcatagtggcacttcgccacttttaagccagggttccttctctccatccttggaccttcacaaaatctctgggactgttctctatcaga

SEQ ID NO: 30858 - DNA, 395 bp, Macaca Mulatta
ggagcgccgccgcagcgtacggccaccagcccatcatgaccagcaagccgtcctcgtcttcggcggttgcagccgctgctgccgcagccgccgcctcgtcggcctcgtccagctggaacacgcaccaaagcgtgaatgcagcctggagcgcaccgtccaacccctggggcggcctgcaggcgggccgggaccctcgccgggcggtcggtgtgggcgtgggtgtgggtgtcggggtgccttccccgctcaaccccatctcgccactcaaaaaacccttctccagcaacgtgatcgcgccgcccaagttccctcgcgcggccccgctcacttctaagtcctggatggaggataacgctttccggaccgataatggtaacaatctgttgccatttcag

SEQ ID NO: 30859 - DNA, 794 bp, Macaca Mulatta
gggtcctgggagttcagtggctgcaaagggcatcccggaacgtggtgccgctgggcgcacggacagcctcccgcatgaccaaggacatgttgccagggccctatcctaggaccccagaagaacgggccgccgccgccaagaagtataatatgcgtgtggaagactacgagccttacccggatgagggcatggggtatggcgactacccgaagctccctgaccgttcacagcatgagagggatccatggtatagctgggaccaaccggacctgaggttgaactggggtgaaccgatgcactggcacatagacatgtacaccaggaactgtgtggatacatcccccacacctgtttcttggaatgtcatgtgtatgcacctcttcggtttcctggctttcatgacattcatgttctgggtgggggacgtgtacccttcctacccgcctgtggaacaaagcagtatccgtacaataatctgtacctggaacgaagggaggaatccctccaaggaaccctgagctggtgggtcccctatgagatctgaaggaaggcttcagggggctgttagagtgccccttagcgaaggagcgccccttgtgcctacaaaaattaaaagcgtgagtggaaacccgcgcgagaagacgcacaagggccggggggccggtaacaggcggagaaggggggaggagcgggggggcggcgggtgatattggaaaacgcgcgggaagaggcgggagaagaaaagccgtgttatgcgcggacgcagatggaggaatttgggcgcgcgcctcggc

SEQ ID NO: 30860 - DNA, 144 bp, Macaca Mulatta
agtatttatggcagtgggagcttcaattgccgctcgcttaggaactcatcctgactggttgtttgtctgctcttttattgggatgtttgtgttttattgcgctcattggcagacctatgtttcaggcgtgttgagatttggaaa

SEQ ID NO: 30861 - DNA, 232 bp, Macaca Mulatta
aaatatgttacttcaacagcaactggatgacgctcgcaacaaagctgacaatcgagaaaaagcaatacttaatattcaagccagatgtgatgctagagtacaaaactttcaagctgagtgcagaaagcaccgtcttttactacaagaagacaataagaggttggtcaatgaattgaatcatttgaaagaaaaagaatgccaaaatgaaaaagagaaagcagaaagagaagta

SEQ ID NO: 30862 - DNA, 105 bp, Macaca Mulatta
gttgttttcttctggcacagtccagctcacaacaacctcaagagcagaatttggagactttgatattaaaactgtacttcaggagattaagcgaggaaaaagaat

SEQ ID NO: 30863 - DNA, 247 bp, Macaca Mulatta
agttaaacacatctgagtttctgtgtgcagaaaatatctgttggagggctaatatgtcctaaattatagtgaaaacttgtttattatgaaattatatgtaagtttttaagcatgccactttttgtgtgtttcagatacattattctacatgtggaatttacatttaccaagcaaaacataggaattgtttcgggaaagacttcagctttcataatttttaaaaatgttcccatagtaattgttgtga

SEQ ID NO: 30864 - DNA, 664 bp, Macaca Mulatta
  misc_feature (1)...(664): n = A,T,C or G
ccatgacttcctacagttatttccagtcgtcggctatgtcgtctgtcggaggcctgggcggcggctcggtgcgttttgggccgggggtcgcctttcgcgcgcccagcatgcacgggggctccggcggccgcggtgtgtccgtgtcctcttcccgcttcgtgtcttcgtcctcctccgggggctacggcggcggctactgcggcgtcctggccgcgaccgacgggctgcnnnnnnnnnnnnnnnnnnnnnnnnnnnnnnnnnnnnnnnnnnnnnnnnnnnnnnnnnnnnnnnnnnnnnnnnnnnnnnnnnnnnnnnnnnnnnnnnnnnnnnnnnnnnnnnnnnnnnnnnnnnnnnnnnnnnnnnnnnnnnnnnnnnnnnnnnnnnnnnnnnnnnnnnnnnnnnnnnnnnnnnnnnnnnnnnnnnnnnnnnnnnnaccattgagaactccaggattgtcctgcagatcgacaatgcccgtctagctgcagatgacttccgaaccaagnngtttgagaccgagcaagctctgcgtatgagcgtggaggccgacatcaacggcctgcgcagagtgctggatgagctgaccctggccaggactgacctggagatgcagattgaaggcctgaaggaagagctggcctacctgaagaagaaccatgaggag

SEQ ID NO: 30865 - DNA, 1281 bp, Macaca Mulatta
  misc_feature (1)...(1281): n = A,T,C or G
cccaggtcccgcctaagcacgtgtaccgcgtgctacagtgccaggaggaggagctcacgcagatggtctccaccatgtctgacggctggcgctttgagcannnnnnnnnnnnnnnnnnnnnnnnnnnnnnnnnnnnnnnnnnnnnnnnnnnnnnnnnnnnnnnnnnnnnnnnnnnnnnnnnnnnnnnnnnnnnnnnnnnnnnnnnnnnnnnnnnnnnnnnnnnnnnnnnnnnnnnnnnnnnnnnnnnnnnnnnnnnnnnnnnnnnnnnnnnnnnnnnnnnnnnnnnnnnnnnnnnnnnnnnnnnnnnnnnnnnnnnnnnnnnnnnnnnnnnnnnnnnnnnnnnnnnnnnnnnnnnnnnnnnnttgcagtgagggcttctcctcggcccctcgcccgcccccagagctgccatccctnnnnnnnnnnnnnnnnnnnnnnnnnnnnnnnnnnnnnnnnnnnnnnnnnnnnnnnnnnnnnnnnnnnnnnnnnnnnnnnnnnnnnnnnnnnnnnnnnnnnnnnnnnnnnnnnnnnnnnnnnnnnnnnnnnnnnnnnnnnnnnnnnnnnnnnnnnnnnnnnnnnnnnnnnnnnnnnnnnnnnnnnnnnnnnnnnnnnnnnnnnnnnnnnnnnnnnnnnnnnnnnnnnnnnnnnnnnnnnnnnnnnnnnnnnnnnnnnnnnnnnnnnnnnnnnnnnnnnnnnnnnnnnnnnnnnnnnnnnnnnnnnnnnnnnnnnnnnnnnnnnnnnnnnnnnnnnnnnnnnnnnnnnnnnnnnnnnnnnnnnnnnnnnnnnnnnnnnnnnnnnnnnnnnnnnnnnnnnnnnnnnnnnnnnnnnnnnnnnnnnnnnnnnnnnnnnnnnnnnnnnnnnnnnnnnnnnnnnnnnnnnnnnnnnnnnnnnnnnnnnnnnnnnnnnnnnnnnnnnnnnnnnnnnnnnnnnnnnnnnnnnnnnnnnnnnnnnnnnnnnnnnnnnnnnnnnnnnnnnnnnnnnnnnnnnnnnnnnnnnnnnnnnnnnnnnnnnnnnnnnnnnnnnnnnnnnnnnnnnnnnnnnnnnnnnnnnnnnnnnnnnnnnnnnnnnnnnnnnnnnnnnnnnnnnnnnnnnnnnnnnnnnnnnnnnnnnnnnnnnnnnnnnnnnnnnnnnnnnnnnnnnnnnnnnnnnnnnnnnnnnnnnnnnnnnnnnnnnnnnnggcggctgagccagcggccatcctgtgtttgaatgcctggaatgggtccttgcttctcggctatgtcggaccccaccgtgtaataaaacccgaaggaacagccc

SEQ ID NO: 30866 - DNA, 2331 bp, Macaca Mulatta
  misc_feature (1)...(2331): n = A,T,C or G
atgtcaaaaacaaacaaatccaagtctggatctcgctcttctcgctcaagatctgcatcaagatctcgttctcgttcattttcgaagtctcggtcccgaagccgatctctctctcgttcaaggaagcgcaggctgannnnnnnnnnnnnnnnnnnnnnnnnnnnnnnnnnnnnnnnnnnnnnnnnnnnnnnnnnnnnnnnnnnnnnnnnnnnnnnnnnnnnnnnnnnnnnnnnnnnnnnnnnnnnnnnnnnnnnnnnnnnnnnnnnnnnnnnnnnnnnnnnnnnnnnnnnnnnnnnnnnnnnnnnnnnnnnnnnnnnnnnnnnnnnnnnnnnnnnnnnnnnnnnnnnnnnnnnnnnnnnnnnnnnnnnnnnnnnnnnnnnnnnnnnnnnnnnnnnnnnnnnnnnnnnnnnnnnnnnnnnnnnnnnnnnnnnnnnnnnnnnnnnnnnnnnnnnnnnnnnnnnnnnnnnnnnnnnnnnnnnnnnnnnnnnnnnnnnnnnnnnnnnnnnnnnnnnnnnnnnnnnnnnnnnnnnnnnnnnnnnnnnnnnnnnnnnnnnnnnnnnnnnnnnnnnnnnnnnnnnnnnnnnnnnnnnnnnnnnnnnnnnnnnnnnnnnnnnnnnnnnnnnnnnnnnnnnnnnnnnnnnnnnnnnnnnnnnnnnnnnnnnnnnnnnnnnnnnnnnnnnnnnnnnnnnnnnnnnnnnnnnnnnnnnnnnnnnnnnnnnnnnnnnnnnnnnnnnnnnnnnnnnnnnnnnnnnnnnnnnnnnnnnnnnnnnnnnnnnnnnnnnnnnnnnnnnnnnnnnnnnnnnnnnnnnnnnnnnnnnnnnnnnnnnnnnnnnnnnnnnnnnnnnnnnnnnnnnnnnnnnnnnnnnnnnnnnnnnnnnnnnnnnnnnnnnnnnnnnnnnnnnnnnnnnnnnnnnnnnnnnnnnnnnnnnnnnnnnnnnnnnnnnnnnnnnnnnnnnnnnnnnnnnnnnnnnnnnnnnnnnnnnnnnnnnnnnnnnnnnnnnnnnnnnnnnnnnnnnnnnnnnnnnnnnnnnnnnnnnnnnnnnnnnnnnnnnnnnnnnnnnnnnnnnnnnnnnnnnnnnnnnnnnnnnnnnnnnnnnnnnnnnnnnnnnnnnnnnnnnnnnnnnnnnnnnnnnnnnnnnnnnnnnnnnnnnnnnnnnnnnnnnnnnnnnnnnnnnnnnnnnnnnnnnnnnnnnnnnnnnnnnnnnnnnnnnnnnnnnnnnnnnnnnnnnnnnnnnnnnnnnnnnnnnnnnnnnnnnnnnnnnnnnnnnnnnnnnnnnnnnnnnnnnnnnnnnnnnnnnnnnnnnnnnnnnnnnnnnnnnnnnnnnnnnnnnnnnnnnnnnnnnnnnnnnnnnnnnnnnnnnnnnnnnnnnnnnnnnnnnnnnnnnnnnnnnnnnnnnnnnnnnnnnnnnnnnnnnnnnnnnnnnnnnnnnnnnnnnnnnnnnnnnnnnnnnnnnnnnnnnnnnnnnnnnnnnnnnnnnnnnnnnnnnnnnnnnnnnnnnnnnnnnnnnnnnnnnnnnnnnnnnnnnnnnnnnnnnnnnnnnnnnnnnnnnnnnnnnnnnnnnnnnnnnnnnnnnnnnnnnnnnnnnnnnnnnnnnnnnnnnnnnnnnnnnnnnnnnnnnnnnnnnnnnnnnnnnnnnnnnnnnnnnnnnnnnnnnnnnnnnnnnnnnnnnnnnnnnnnnnnnnnnnnnnnnnnnnnnnnnnnnnnnnnnnnnnnnnnnnnnnnnnnnnnnnnnnnnnnnnnnnnnnnnnnnnnnnnnnnnnnnnnnnnnnnnnnnnnnnnnnnnnnnnnnnnnnnnnnnnnnnnnnnnnnnnnnnnnnnnnnnnnnnnnnnnnnnnnnnnnnnnnnnnnnnnnnnnnnnnnnnnnnnnnnnnnnnnnnnnnnnnnnnnnnnnnnnnnnnnnnnnnnnnnnnnnnnnnnnnnnnnnnnnnnnnnnnnnnnnnnnnnnnnnnnnnnnnnnnnnnnnnnnnnnnnnnnnnnnnnnnnnnnnnnnnnnnnnnnnnnnnnnnnnnnnnnnnnnnnnnnnnnnnnnnnnnnnnnnnnnnnnnnnnnnnnnnnnggagaatagacatttcccccagtacattcagaaaacatggtttggctcatgatgaaatgaaaagtccccgggaacctggctacaaggcnnnnnnnnnnnnnnnnnnnnnnnnnnnnnnnnncgccttgatattgttcctcgtaaaaaacataaggagagagatcttaaacgaggtaaatcgagagaatcagtggattcccgagactccagccactcgagggaaaggtcagctgagaaaacagagaaaactcataaaggatcaaagaaacagaag

SEQ ID NO: 30867 - DNA, 1230 bp, Macaca Mulatta
  misc_feature (1)...(1230): n = A,T,C or G
tttcacccttccctacaggccgaggtttgaagtctcatgcctacattcacagtgtccaatttagccaccatgttttcctcaacctccataccctcaagttttactgccttccagacaactatgagatcatcgattcctcattggaggatatcacnnnnnnnnnnnnnnnnnnnnnnnnnnnnnnnnnnnnnnnnnnnnnnnnnnnnnnnnnnnnnnnnnnnnnnnnnnnnnnnnnnnnnnnnnnnnnnnnnnnnnnnnnnnnnnnnnnnnnnnnnnnnnnnnnnnnnnnnnnnnnnnnnnttcaggctctatctaatgttcctcctctccggaactactttctggaagaagacaattataagaacattaagcgtcctccaggggatatcatgttcttgttggtccagcgttttggagagctgatgagaaagctttggaaccctcgaaatttcaaagcacatgtgtctccccatgagatgnnnnnnnnnnnnnnnnnnnnnnnnnnnnnnnnnnnnnnnnnnnnnnnnnnnnnnnnnnnnnnnnnnnnnnnnnnnnnnnnnnnnnnnnnnnnnnnnnnnnnnnnnnnnnnnnnnnnnnnnnnnnnnnnnctattgtgactgatgttttccaggggtccatgaggatcttcactaaaaagcttccccatcctgatctgccagcagaagaaaaagagcagttgctccataatgatgagtaccaggagacgatggtggagtccacttttatgtacctgacacttgaccttcctactgcccccctctacaaggacgagaaggagcagctcatcattccccaagtgccacaagtcaacatcctggccaaattcaatggcatcactannnnaggaatataagacttacaaggagaactttctgaagcgcttccagcttaccaagctacctccatatctaatcttttgtatcaagagattcactaagaacaacttctttgttgagaagaatccaactattgtcaatttccctattanatgtggatctcagagaatacttgtctgaagaagtacaagcagtacacaagaataccacctatgacctcattgccaacatcgtgcatgatggcaagccctccgagggctcataccggatccatgtgcttcatcatgngggacaggcaaatggtatgaattacaagacctccaggtgactgacatccttccccatatgatctcactgtcagaggcttacattc

SEQ ID NO: 30868 - DNA, 1837 bp, Macaca Mulatta
  misc_feature (1)...(1837): n = A,T,C or G
tctttatacagcaaattgcacagagtttgaaagatgaacagaagaaggtaccttcagaagcttcattttcggatgttcacttagaggaaggagagtctaacagtctgacaaaatctggnnnnnnnnnnnnnnnnnnnnnnnnnnnnnnnnnnnnnnnnnnnnnnnnnnnnnnnnnnnnnnnnnnnnnnnnnnnnnnnnnnnnnnnnnnnnnnnnnnnnnnnnnnnnnnnnnnnnnnnnnnnnnnnnnnnnnnnnnnnnnnnnnnnnnnnnnnnnnnnnnnnnnnnnnnnnnnnnnnnnnnnnnnnnnnnnnnnnnnnnnnnnnnnnnnnnnnnnnnnnnnnnnnnnnnnnnnnnnnnnnnnnnnnnnnnnnnnnnnnnnnnnnnnnnnnnnnnnnnnnnnnnnnnnnnnnnnnnnnnnnnnnnnnnnnnnnnnnnnnnnnnnnnnnnnnnnnnnnnnnnnnnnnnnnnnnnnnnnnnnnnnnnnnnnnnnnnnnnnnnnnnnnnnnnnnnnnnnnnnnnnnnnnnnnnnnnnnnnnnnnnnnnnnnnnnnnnnnnnnnnnnnnnnnnnnnnnnnnnnnnnnnnnnnnnnnnnnnnnnnnnnnnnnnnnnnnnnnnnnnnnnnnnnnnnnnnnnnnnnnnnnnnnnnnnnnnnnnnnnnnnnnnnnnnnnnnnnnnnnnnnnnnnnnnnnnnnnnnnnnnnnnnnnnnnnnnnnnnnnnnnnnnnnnnnnnnnnnnnnnnnnnnnnnnnnnnnnnnnnnnnnnnnnnnnnnnnnnnnnnnnnnnnnnnnnnnnnnnnnnnnnnnnnnnnnnnnnnnnnnnnnnnnnnnnnnnnnnnnnnnnnnnnnnnnnnnnnnnnnnnnnnnnnnnnnnnnnnnnnnnnnnnnnnnnnnnnnnnnnnnnnnnnnnnnnnnnnnnnnnnnnnnnnnnnnnnnnnnnnnnnnnnnnnnnnnnnnnnnnnnnnnnnnnnnnnnnnnnnagctgagccttctgctgtcagtttctaaataaggccagctgggctgtgcacctaaatggtctgtctgggaggagcaggctgagaagtcttgcggtctgcaggacaccgaggaatcatatgtgggaatgtccccgagaaccacacgagcgtgctgctcagtgctgactgcagaatgaaatagaagcaaagtgttacgggatcggtgttttcttttctgaaacatcaaaatgccaaagattaatgtgtgattggtgataactgcctcatttaaatggtcacaagaaatgtgaagagagagctagggcagacactcagtgaaatggttctttgttaaagatgtgcaataaacatagattacaataagtagtgcaaagaactttacagaaatacagcgaattagaagacctgtaagagtaaggtttgctaaaacgtgaaacactgtaacacttttaaccactgagcattccacagtgaaatgttatttccacactcttatttaatgtaatgtttctcctgtcattttgaagtttagtttggagtagattggttgcttctgaggatacattctgccttcctgggaatttggggtgtcatccttttctctgtttgatgtgaggtagtttaaagatacaaggactttgtgtgaagctccagcatctgtgccacttgaattgcttaggtgcagacagttctaaagcaaggagctgcagccttctcatcatagatacatgcggtgtctttaatgagtatcttcatggtatgatagtgcgtgtttgtgagtgcaaagtaccaattaaggtgtcttaaatttggtgcataaaggagagaaggaaacctgatgagtagtgttcctcctgaatg

SEQ ID NO: 30869 - DNA, 698 bp, Macaca Mulatta
tcgtaagagaacagtgacggacaacttgagaaaagcagtcaagttccaaggaactgacagcaacctgcaaagaggacaacagcatctcctcacctgcataaaattgtctcagcttctgttgtttctcaactgaggttcctaaacccatgaggataatccctggagggaatagatccttgcacatccggggcaagaaacacgtcccggttacccagaccattgataacagttgcatttaggttgcatctgggtaatctggcacaaaagatctctctctacgcctcactcttgcagtgtctatctcttcacctccattgaaatcagcattttggatctaggtcttcatggaatccttgagaagagaggcctttacaattatccagttctgagggttcaggttcatgaaaagaaatgcaacttgggataatcatgggttaaagataagatttcaagaagccatctaagaatacagaaccaaattggatccatttttttttgaaaaatggttttgcatggaacctggaccaaggcaaatgtcttgtctttgcagaattgttttccgggatgccagtggattcagatagcaatgcttggagtagaatccgttactaaaatagttccaaagttgacaaaaaattttcgaagataaaagcagttttacattgggggttgctgaggtaggcacaagaaaaagtcag

SEQ ID NO: 30870 - DNA, 201 bp, Macaca Mulatta
  misc_feature (1)...(201): n = A,T,C or G
tccagctcaaccaagataaaatgaatttttccacactgagaaacattcagggtctatttgctccactaaaattacagatggaattcaaggcagtgcagcaggtnnnggttcagcgtcttccatttctttcaagctcaaatctttcattggatattttgaggggtaatgatgagactattggatttgaggatattcttaatg

SEQ ID NO: 30871 - DNA, 796 bp, Macaca Mulatta
ggtcttcataccagagtaggaagtaaaaatagcttagaaagccctgtcaggtgttttgtgcagctgacagaggtaatgttacatcacctcaaaaagaaagataaacagtcagttattctaaaaataaattgtttggaaagtacaatgcaccacatttttgtagaagtctactatttgataaacagttgaaattcaagatgtgtttgacccttagtcatttttactctttggttctgagtatacctattttcttagcatatctaccttgtttatctttttcttcaccttttaacaagtatgacataggaaagtcatttttttaggattcatggatcagtctgatctactcttattcataatggaacatgtaaatatattgaaaactgtttttcaggagagaaatatgagttggagggaaggaaaagtcgttctacttacgttccaaaatcctcatcagagaaggtatgatgttctcaggtgtggaaaatatttttttagttgattgaaaaggcaggttttaccgaaaaatataagaaggggcataatggattgcccttttttccagactggatttttcttacacaactgttaatgttctccgagtttgatgaaggaccaccctttgtggatacacttgtaagttttaaaccctgccttggtaacaaaaaggatccaactttaatcccaggtagaaattcaaagaggggttgtaccttccgtttgtatgaaaaaaatttaatggtttctcaaggaccgggtggggctcctaaaaaaaaatggtttttttaagccctcc

SEQ ID NO: 30872 - DNA, 649 bp, Macaca Mulatta
acttcaggtgtctgtttgcaattccagcttgtactcacggactgtgtagccctacagattttggaattctatatgcctatcatttgtttttcatatttccttatcagagcaccagtgttagagttgttttgttattaatggtgcctggagattggttacataaagagttaaggaaaatggtacaaacagaactcaggttccctagggacactttactgcttcgttatcccaactacattattttacaaagcaagtatttcttggccactgtgctagccagtggagatacaaagaaaagtaagaaatgcatatgaagggccatgtgttgatagaggccatccaaagagcccctggtcatgagggccatggtggccactttgtttcctcctctgacttctgggccctttaggggtcactggttatcttttgtccatctcttacacatcttagaggcacacaaacttccagattctgatctccatgccactctgaggaaactgagaggtcttctggtgcctctgttgcacaccacattttctcctttacgtccaccatgccactagctcagagtacatctgcatggctgctgcctcccaggttccagagagaaagtgggctataagttcgcaatcccacctaggacttggct

SEQ ID NO: 30873 - DNA, 774 bp, Macaca Mulatta
  misc_feature (1)...(774): n = A,T,C or G
ttcatgcagtagccgtgtttatgagatatatgatgtgatttagttaaagctgaacatgggggtatttaaaatctgattatttagagcatatgttttggcaatacatcacttaccagatagatttctgcaaataagaagccttttaaaatgaatgtataataaagttttattntaataaaggggccaagagcattagaattttatatagcttcatgctattataaatgcatcttgttaaaataatataaatctagacattgtaaggagtccttttaaattgaaattctagtgttgttatttccttgactaataccttcacatcatacttctttgttcgtggctttcattgagagcactaaagaatcccaccagcagaacatgtcagaatgggttgagactttatgtgcttcactgtctgttagtgatcatctcttgcttttcttatagaccatggcaaaagttataaccactgtactgaagttccctgatgatcagacccagaaaattttggaaagagaagatgctcggctaatggtaagttctagaagtaggctctagatagaagaagatgatatcccatctgtttatattctgtctcatttataaggacttttgagttggtaaaataaattttaagatttcaaatctttattatatcacagcctgaaaaatgagagggaatttacactaagacatttaaccaagggtaaatgtgaatggatgccctcaagggaaggaacagtctaatttaataccatataagaggttgacacc

SEQ ID NO: 30874 - DNA, 393 bp, Macaca Mulatta
  misc_feature (1)...(393): n = A,T,C or G
tggtggcgctgaagggtgtccccgcgctgctgtcccccgagctgctctacgcgctggcgcgcatggggcacggggacgagatcgnnnnnnnnnnnnnnnnnnnnnnnnnnnnnnnnnnnnnnnnnnnnnnnnnnnnnnnnnnnnnnnnnnnnnnnnnnnnnnnnnnnnnnnnnnnnnnnnnnnnnnnnnnnnnnnnnnnnnnnnnnnnnnnnnnnnnnnnnnnggctgcagtcatggagctggtgcccagcgacaaggagaggggcctgcagaccccggtgtggacggagtacgagtccattctacacagggccggctgnnngagagccctggcaaagttagagaggttcgagttttatgagcgggctaagaaggcttttgctgttgtggcaa

SEQ ID NO: 30875 - DNA, 256 bp, Macaca Mulatta
aatatatcattgtaagcataagctttagaagtaaaacatttgcgtttgcagtgcatcagataaattttatatttcttaaaatagaaataatattatgattgcataaatcttaaaatgaattatgttatttgctctaataagaaaattctaaatcaattattgaagtaggatacacacaattactaaagtacaaatatcctagtgtttgtgtcgggctcgttttgctaaacatgatatttgtggtattcagcctttc

SEQ ID NO: 30876 - DNA, 88 bp, Macaca Mulatta
ggcctgaatatcatcgagcagcaacagaaggagccgtgtagacttccagcctccaaaatgacccacaagggcgaagtggagatccagc

SEQ ID NO: 30877 - DNA, 2028 bp, Macaca Mulatta
  misc_feature (1)...(2028): n = A,T,C or G
tggtcagtgagaaggtcggaggggccgaggggaccaagctggacgatgacttcaaagagatggagaagnnnnnnnnnnnnnnnnnnnnnnnnnnnnnnnnnnnnnnnnnnnnnnnnnnnnnnnnnnnnnnnnnnnnnnnnnnnnnnnnnnnnnnnnnnnnnnnnnnnnnnnnnnnnnnnnnnnnnnnnnnnnnnnnnnnnnnnnnnnnnnnnnnnnnnnnnnnnnnnnnnnnnnnnnnnnnnnnnnnnnnnnnnnnnnnnnnnnnnnnnnnnnnnnnnnnnnnnnnnnnnnnnnnnnnnnnnnnnnnnnnnnnnnnnnnnnnnnnnnnnnnnnnnnnnnnnnnnnnnnnnnnnnnnnnnnnnnnnnnnnnnnnnnnnnnnnnnnnnnnnnnnnnnnnnnnnnnnnnnnnnnnnnnnnnnnnnnnnnnnnnnnnnnnnnnnnnnnnnnnnnnnnnnnnnnnnnnnnnnnnnnnnnnnnnnnnnnnnnnnnnnnnnnnnnnnnnnnnnnnnnnnnnnnnnnnnnnnnnnnnnnnnnnnnnnnnnnnnnnnnnnnnnnnnnnnnnnnnnnnnnnnnnnnnnnnnnnnnnnnnnnnnnnnnnnnnnnnnnnnnnnnnnnnnnnnnnnnnnnnnnnnnnnnnnnnnnnnnnnnnnnnnnnnnnnnnnnnnnnnnnnnnnnnnnnnnnnnnnnnnnnnnnnnnnnnnnnnnnnnnnnnnnnnnnnnnnnnnnnnnnnnnnnnnnnnnnnnnnnnnnnnnnnnnnnnnnnnnnnnnnnnnnnnnnnnnnnnnnnnnnnnnnnnnnnnnnnnnnnnnnnnnnnnnnnnnnnnnnnnnnnnnnnnnnnnnnnnnnnnnnnnnnnnnnnnnnnnnnnnnnnnnnnnnnnnnnnnnnnnnnnnnnnnnnnnnnnnnnnnnnnnnnnnnnnnnnnnnnnnnnnnnnnnnnnnnnnnnnnnnnnnnnnnnnnnnnnnnnnnnnnnnnnnnnnnnnnnnnnnnnnnnnnnnnnnnnnnnnnnnnnnnnnnnnnnnnnnnnnnnnnnnnnnnnnnnnnnnnnnnnnnnnnnnnnnnnnnnnnnnnnnnnnnnnnnnnnnnnnnnnnnnnnnnnnnnnnnnnnnnnnnnnnnnnnnnnnnnnnnnnnnnnnnnnnnnnnnnnnnnnnnnnnnnnnnnnnnnnnnnnnnnnnnnnnnnnnnnnnnnnnnnnnnnnnnnnnnnnnnnnnnnnnnnnnnnnnnnnnnnnnnnnnnnnnnnnnnnnnnnnnnnnnnnnnnnnnnnnnnnnnnnnnnnnnnnnnnnnnnnnnnnnnnnnnnnnnnnnnnnnnnnnnnnnnnnnnnnnnnnnnnnnnnnnnnnnnnnnnnnnnnnnnnnnnnnnnnnnnnnnnnnnnnnnnnnnnnnnnnnnnnnnnnnnnnnnnnnnnnnnnnnnnnnnnnnnnnnnnnnnnnnnnggggcccggcccactgcctaccctcgagtcccacagcgttaacgggatgggatcgagcatccctgtggggtggctcagagacaggaccctggttttaaatcccctcccagcctggtgctggcgatgggccctggcccttcttcagggccactgcacttccgcctcacacatgcactccttctccccaaggccagggcagagggcctcaccgcctctccggcctgctgtcagcttacagcctggggacagaggccagctgggatctgccagaggacagagaacatggtctcctgcagggccctgcctcccaagccccacccttacaaagccaagtaccttttcagctttttaactgcccccagccaggcccatggaggcctgtgtcactctggcacgagcagccatcaccagccacccacannnnnnnnnnnnnnnnnnnnnnnnnnnnnnnnngcgctaccaagggccaagcacaaaggctccagtgagcgagttccagtccctggtggccaggcctccccttgccaagccactgccaccccatcctgtgggaaaaggccccggccatctcctctagaccaacacaggcagcc

SEQ ID NO: 30878 - DNA, 255 bp, Macaca Mulatta
tgagaaggctcagcccaaaaagttgacaccagtgcaggttttggaatatggagaagctattgctaagtttaactttaatggtgatacacaggtagaaatgtccttcagaaaggtaagctgcccttctcatgccttgctttggggctctcttggatggcacagctatgtggggaagtgtggtgttgctatcacatcccagtctgggggtgctatctgtacccttaagagaagtatgctaatcaataattgcattaa

SEQ ID NO: 30879 - DNA, 227 bp, Macaca Mulatta
gagcaacaaggcgtgcggtatttgctgaaggacgtgggagctgcccaatttggagggaactgtttttacaacgcatgcgtaccctggatggccgtagagaggagccacagagacagaaacgtgcggaacatcaagcagataccgggcccaacgaaggaaccacttctgggcactcattgaggaaagagagaacagcaaccccatttgacaacgagtgaagaagaggt

SEQ ID NO: 30880 - DNA, 137 bp, Macaca Mulatta
cagggggcttgtacatgacagccggaatagcctccagttgaggggcttggtggtgctccttatctctaaagcagctgggcccagcagcgtgaacacttcatgtcagaactatgacatggtcagtgggatctactcat

SEQ ID NO: 30881 - DNA, 647 bp, Macaca Mulatta
  misc_feature (1)...(647): n = A,T,C or G
aaatcaatatgagacaagcgggtacaatgcagtgggcaagcctgnaactgcctgcagctaaaaagcaggaaaaacaaaaagatgacacaacagattgaatgggagatgggaggaaggctattacatatttcagaattcttaatactgtgtgaagtggtggcttgctgctgtaatcttttgttttgttgttgtgttattgaatgtggcatttcagggttaacattaagttcttaaaagccaaagtcagtttgtctttttgtgcctctcatctttcttttgtgttatgtaagattgattgattattcatttctccttactggtaggaaccatagttgtgtcctttacttgaagaggctggaaaatagcccataaccataattgcagtatttctttgtatttctttgttaagcagagaaatattaaggaactttttttttatgtcttcgtattattccataattagtaaagcaagatgaaatatcaaattttagtcagttttttcatggatttgtgttcttacagtacttgaaaatatttaaggaagagatgaagctctgcagtttctttctatgtgggatgattacttttttaaggaggattaattctgagtatagtaaataaaggggaatatctgaattgtttaacaa

SEQ ID NO: 30882 - DNA, 288 bp, Macaca Mulatta
aagttacaggactaaaagaacaaactgaccggcctaaaactaaaatgacatttattccctagctacaaacgtcagcgttattatgttaatcatatcttaccctctatcattataagcggttgccatggtgtttctaaaagtgttttaccattaatgtgtagaggggaacaaagcataaagtactaagggatcatgcttatcctagggtctcacagaagacaggacatattaatcttgtgaattacagaatgggttgtggtccagacaccaagaatcatagcggttttt

SEQ ID NO: 30883 - DNA, 120 bp, Macaca Mulatta
aaattttacagttctggctcacaaagggtgttgatggttttagctttgatgctgttaaatttctcctagaagcaaagcatctgagagatgagatccaagtaaataagacccaaatcccgg

SEQ ID NO: 30884 - DNA, 692 bp, Macaca Mulatta
  misc_feature (1)...(692): n = A,T,C or G
ggaagagtttaaagaacgctgcagtcagtgtgctgctgtctcatggggccttactgatgaaggcaaatattattgcacttcttgccacaatgttacagannnnnnnnnnnnnnnnnnnnnnnnnnnnnnnnnnnnnnnnnnnnnnnnnnnnnnnnnnnnnnnnnnnnnnnnnnnnnnnnnnnnnnnnnnnnnnnnnnnnnnnnnnnnnnnnnnnnnnnnnnnnnnnnnnnnnnnnnnnnnnnnnnnnnnnnnnnnnnnnnnnnnnnnnnnnnnnnnnnnnnnnnnnnnnnnnnnnnnnnnnnnnnnnnnnnnnnnnnnnnnnnnnnnnnnnnnnnnnnnnnnnnnnnnnnnnnnnnnnnnnnnnnnnnnnnnnnnnnnnnnnnnnnnnnnnnnnnnnnnnnnnnnnnnnnnnnnnnnnnnnnnnnnnnnnnnnnnnnnnnnnnnnnnnnnnnnnnnnnnnnnnnnnnnnnnnnnnnnnnnnnnnnnnnnnnnnnnnnnnnnnnnnnnnnnnnnnnnnnnnnnnnnnnnnnnnngaaacgtctgtctgctctggatctctggatggagttgaatactcacaacgaaaggagaaaggaattgtgaagatgaccgtgccacagacactcgccttctgttacttgtccttactttggcagagagaagcaataacactttcagatcttttgaggttn

SEQ ID NO: 30885 - DNA, 108 bp, Macaca Mulatta
agaagtgaatgctcttcaaggtgcatcagaggaatttgtaggaaagacggattattgacatcttcatatagtcttaaatacttccaggttagcatgaagggattttag

SEQ ID NO: 30886 - DNA, 502 bp, Macaca Mulatta
catccctgaggaaattaagcagccgcagcagttccagaaggaggacgctgcattgaccatctatgagatgctccacaatatcttcgctattttcagacaagatttatctagcactggctggaatgagactattgtggagaacttccttgctaatgtctatcatcagatagaccatctgaagacaatcctagaagaaaaactggagaaagaagatttcaccaggggaaaattcatgagcagtttgcacctgaaaagatactatggaaggattctgcattacctgaaggccaaggagtacagtcactgtgcctggaccatagtcagagtggaaatcctcaggaactttttcttcattaacaaacttacaggttacctccgaaactgaagatctcctagcctgtgcctctgggactggacaattacttcaagcattcttcaaccggcagatgctgtttaagtgactgatggctaatgtactgcatatgaaagaacactagaagac

SEQ ID NO: 30887 - DNA, 665 bp, Macaca Mulatta
taaatacaaataagattatattatgaattaactattgtggcaatatgtgaagaaagttaaactgtataatttgtgaaagaacaagctggatttcttggactagtgctctccctgtatattttgaagctttttaaaaggaaaaaatattgtagaaccatgtgtaatttttttttaaataaaagaatcttctactccctacctctaacatgtttaagtggtatatactcaatgcagcatgtataagtttctgcttatatgtttttaggaatataaaagtaagagtatttggttacggttttaaatgcaaggttaagtgcccatgttagacacattctttctaagaggcgttctcagctgtagctgggaggaaaccggaattgggttcacagatgtcaaaactttactctgaacagtgaggcgcaagaagcacctgaaataggagatgcacatccctgggtccccacacctagatagtcaccatctgtggtctggaatggggtgtttttaatcagcacccatttcacccctctgtgagactgacacatttattttaaataccactttttgaagaacaggcacatttaacgagatatcctatcaagaagcaggggaaaacatcacgtgttggggataaccaggattatttccaaggtgggatagctttt

SEQ ID NO: 30888 - DNA, 4285 bp, Macaca Mulatta
  misc_feature (1)...(4285): n = A,T,C or G
caggttaagtagcctgtcttctctgggagattctgcacctgagcgcaagtccccttnnnnnnnnnnnnnnnnnnnnnnnnnnnnnnnnnnncaggtctcgttcaacgctgtgtcattatccaaaaggaccagcatggcttcggcttcacagtcagtggggatcgcattgttctggtgcagtctgtgcggcctgnnnnnnnnnnnnnnnnnnnnnnnnnnnnnnnnnnnnnnnnnnnnnnnnnnnnnnnnnnnnnnnnnnnnnnnnnnnnnnnnnnnnnnnnnnnnnnnnnnnnnnnnnnnnnnnnnnnnnnnnnnnnnnnnnnnnnnnnnnnnnnnnnnnnnnnnnnnnnnnnnnnnnnnnnnnnnnnnnnnnnnnnnnnnnnnnnnnnnnnnnnnnnnnnnnnnnnnnnnnnnnnnnnnnnnnnnnnnnnnnnnnnnnnnnnnnnnnnnnnnnnnnnnnnnnnnnnnnnnnnnnnnnnnnnnnnnnnnnnnnnnnnnnnnnnnnnnnnnnnnnnnnnnnnnnnnnnnnnnnnnnnnnnnnnnnnnnnnnnnnnnnnnnnnnnnnnnnnnnnnnnnnnnnnnnnnnnnnnnnnnnnnnnnnnnnnnnnnnnnnnnnnnnnnnnnnnnnnnnnnnnnnnnnnnnnnnnnnnnnnnnnnnnnnnnnnnnnnnnnnnnnnnnnnnnnnnnnnnnnnnnnnnnnnnnnnnnnnnnnnnnnnnnnnnnnnnnnnnnnnnnnnnnnnnnnnnnnnnnnnnnnnnnnnnnnnnnnnnnnnnnnnnnnnnnnnnnnnnnnnnnnnnnnnnnnnnnnnnnnnnnnnnnnnnnnnnnnnnnnnnnnnnnnnnnnnnnnnnnnnnnnnnnnnnnnnnnnnnnnnnnnnnnnnnnnngagtgacatcatattccaggatctggagaaactgaagtctcggccagctcacctgggggtttttctacgttacatcttctctcaggcagaccccagtccactgnnnnnnnnnnnnnnnnnnnnnnnnnnnnnnnnnnnnnnnnnnnnnnnnnnnnnnnnnnnnnnnnnnnnnnnnnnnnnnnnnnnnnnnnnnnnnnnnnnnnnnnnnnnnnnnnnnnnnnnnnnnnnnnnnnnnnnnnnnnnnactcacgcctgcggaacagcgaggatgcccgtggtgttctctgtgaagctcaagaggcagccatgcctgagatccaagagcagatccacgactacagnagaacgaagcgcactctggggctgggcagcctgtatggtgaaaatgacctgctggacctggatggggaccctctccgagagcgccaagtggctgagaagcagctggctgcccttggagatattttgnnnnnnnnnnnnnnnnnnnngcgcccccatggactttgccctcaatacctacatgagccatgctgggatccgtcttcgagaggcacgaccttccaacacagctgaaaaggcccagtctgctcctgacaaggacaagtggctacccttcttccctaagaccaagaannnnnnnnnnnnnnnnnnnnnnnnnnnnnnnnnnnnnnnnnnnnnnnnnnnnnnnnnnnnnnnnnnnnnnnnnnnnnnnnnnnnnnnnnnnnnnnnnnnnnnnnnnnnnnnnnnnnnnnnnnnnnagtcaaaccaggcaatgtgaggaacatcattcagcactttgagaacaaccagcagtatgacgccccagaacctgggacacagcgactctcgaccggaagttttcctgaggacctgctggagagtgacannnnnnnnnnnnnnnnnnnnnnnnnnnnnnnnnnnnnnnnnnnnnnnnnnnnnnnnnnnnnnnnnnnnnnnnnnnnnnnnnnnnnnnnnnnnnnnnnnnnnnnnnnnnnnnnnnnnnnnnnnnnnnnnnnnnnnnnnnnnnnnnnnnnnnnnnnnnnnnnnnnnnnnnnnnnnnnnnnnnnnnnnnnnnnnnnnnnnnnnnnnnnnnnnnnnnnnnnnnnnnnnnnnnnnnnnnnnnnnnnnnnnnnnnnnnnnnnnnnnnnnnnnnnnnnnnnnnnnnnnnnnnnnnnnnnnnnnnnnnnnnnnnnnnnnnnnnnnnnnnnnnnnnnnnnnnnnnnnnnnnnnnnnnnnnnnnnnnnnnnnnnnnnnnnnnnnnnnnnnnnnnnnnnnnnnnnnnnnnnnnnnnnnnnnnnnnnnnnnnnnnnnnnnnnnnnnnnnnnnnnnnnnnnnnnnnnnnnnnnnnnnnnnnnnnnnnnnnnnnnnnnnnnnnnnnnnnnnnnnnnnnnnnnnnnnnnnnnnnnnnnnnnnnnnnnnnnnnnnnnnnnnnnnnnnnnnnnnnnnnnnnnnnnnnnnnnnnnnnnnnnnnnnnnnnnnnnnnnnnnnnnnnnnnnnnnnnnnnnnnnnnnnnnnnnnnnnnnnnnnnnnnnnnnnnnnnnnnnnnnnnnnnnnnnnnnnnnnnnnnnnnnnnnnnnnnnnnnnnnnnnnnnnnnnnnnnnnnnnnnnnnnnnnnnnnnnnnnnnnnnnnnnnnnnnnnnnnnnnnnnnnnnnnnnnnnnnnnnnnnnnnnnnnnnnnnnnnnnnnnnnnnnnnnnnnnnnnnnnnnnnnnnnnnnnnnnnnnnnnnnnnnnnnnnnnnnnnnnnnnnnnnnnnnnnnnnnnnnnnnnnnnnnnnnnnnnnnnnnnnnnnnnnnnnnnnnnnnnnnnnnnnnnnnnnnnnnnnnnnnnnnnnnnnnnnnnnnnnnnnnnnnnnnnnnnnnnnnnnnnnnnnnnnnnnnnnnnnnnnnnnnnnnnnnnnnnnnnnnnnnnnnnnnnnnnnnnnnnnnnnnnnnnnnnnnnnnnnnnnnnnnnnnnnnnnnnnnnnnnnnnnnnnnnnnnnnnnnnnnnnnnnnnnnnnnnnnnnnnnnnnnnnnnnnnnnnnnnnnnnnnnnnnnnnnnnnnnnnnnnnnnnnnnnnnnnnnnnnnnnnnnnnnnnnnnnnnnnnnnnnnnnnnnnnnnnnnnnnnnnnnnnnnnnnnnnnnnnnnnnnnnnnnnnnnnnnnnnnnnnnnnnnnnnnnnnnnnnnnnnnnnnnnnnnnnnnnnnnnnnnnnnnnnnnnnnnnnnnnnnnnnnnnnnnnnnnnnnnnnnnnnnnnnnnnnnnnnnnnnnnnnnnnnnnnnnnnnnnnnnnnnnnnnnnnnnnnnaacagatggatggagctcttagaagaggccgtgcggaatgccaccaggcaccccggagctgccccgatgcccatccatcctccacccccaggcccccaggagccagcccaccagggcctcacacccagcagnnnnnnnnnnnnnnnnnnnnnnnnnnnnnnnnnnnnnnnnnnnnnnnnnnnnnnnnnnnnnnnnnnnnnnnnnnnnnnnnnnnnnnnnnnnnnnnnnnnnnnnnnnnnnnnnnnnnnnnnnnnnnnnnnnnnnnnnnnnnnnnnnnnnnnnnnnnnnnnnnnnnnnnnnnnnnnnnnnnnnnnnnnnnnnnnnnnnnnnnnnnnnnnnnnnnnnnnnnnnnnnnnnnnnnnnnnnnnnnnnnnnnnnnnnnnnnnnnnnnnnnnnnnnnnnnnnnnnnnnnnnnnnnnnnnnnnnnnnnnnnnnnnnnnnnnnnnnnnnnnnnnnnnnnnnnnnnnnnnnnnnnnnnnnnnnnnnnnnnnnnnnnnnnnnnnnnnnnnnnnnnnnnnnnnnnnnnnnnnnnnnnnnnnnnnnnnnnnnnnnnnnnnnnnnnnnnnnnnnnnnnnnnnnnnnnnnnnnnnnnnnnnnnnnnnnnnnnnnnnnnnnnnnnnnnnnnnnnnnnnnnnnnnnnnnnnnnnnnnnnnnnnnnnnnnnnnnnnnnnnnnnnnnnnnnnnnnnnnnnnnnnnnnnnnnnnnnnnnnnnnnnnnnnnnnnnnnnnnnnnnnnnnnnnnnnnnnnnnnnnnnnnnnnnnnnnnnnnnnnnnnnnnnnnnnnnnnnnnnnnnnnnnnnnnnnnnnnnnnnnnnnnnnnnnnnnnnnnnnnnnnnnnnnnnnnnnnnnnnnnnnnnnnnnnnnnnnnnngggaactgcttttatgtcagcatgccagcaggacccctggactcaagcaccgaccactcaggggtacccacaagcccccctcagcctgacagcgtccctgcagggcaggcagagcctcggcctcagctgcagggaggcaatggagatccaagacgcctcagccgctctcccccaagcctggccctcagggacgtaggcatgatcttccgtaccattgagcagctcaccctcaagctcaacaggctcaag

SEQ ID NO: 30889 - DNA, 326 bp, Macaca Mulatta
  misc_feature (1)...(326): n = A,T,C or G
ttattgagactgaaaacaatcctaaagatgactttccagaaaactagctaccagtgcatgcgtctatcagtaaaacgtgcattagacacaaatacaaaaaccatgaaacaagccaccattctcaacaatttgagcaaagataaaatgcctaagtaacaacatggatgacttgcaaaggatgggctctttactttaagcacnnnnnnnnnnnnnnnnnnnnnnnnnnnnnnnnnnnnnnnnnnnntacccanannnnnnnnnnnnnnnnnnnnnnnnnnnnnnnnnnnnnnnnnnnnnnnnnnnnnnnnnnnnnnnnnnnnnngcgt

SEQ ID NO: 30890 - DNA, 796 bp, Macaca Mulatta
gggatgaatttagaaacatggtgactagatgtaacaatgttggggttcgtatttatgtggatgctgtaattaatcatatgtgtggtaatgctgtgagtgcaggaacaagcagtacttgtggaagttatttcaaccctggaagtagggactttccagcagtcccgtattctggatgggattttaatgatggtaaatgtaaaacttcaagtggagatatcgagaactataatgatgctactcaggtcagagattgtcgtctgactggtcttcttgatcttgcgctggagaaggattatgtgcgttccgagattgccgaatatatgaacaagctcattgacatgggagttgcagggttcagacttgatgcttccaagcacatgtggcctggagacataaaggcagttttggacaaactgcataatctcaacagtaactggtttcctcaaagaagtaaacctttcatttaccaggaggtaattgatctgggtggtgagccaattaaaagcagtgagtactttgggaatggccgggtgacagaatttcagtatggtgcaaaactcggcacgggttatcgcaagtggaatggaagagaagatgtcttacttaaagaactggggagaaggttgggggtttcgtgcccttctgacaaagcaccttgtcttttgtggataacccttggacaatcaacgaggaacatggggcttggagaaacccctattcttaaccttctgggacccccaggcttgtataaaaatggccaattgggattttaggcttgcccctcccttatggaatt

SEQ ID NO: 30891 - DNA, 185 bp, Macaca Mulatta
cagctgactcttttggtgatcccttcttcccccggactacacagatactattagaatatcagctagggagatgggtgccacgtcttcgtgaaccacgggatttatatggtgtctcttcttctggtccactgagcccaacacggtggccataccattgtgaagtcatcgatgaaaaagtccagcat

SEQ ID NO: 30892 - DNA, 799 bp, Macaca Mulatta
  misc_feature (1)...(799): n = A,T,C or G
gaatacgagccatcatgggaagagcagccaatgcctgagactccaaaatggtttcatctgccctatttgttccagatgcctccatatgccagttcttccaaagtcgtaaccagannnnnnnnnnnnnnnnnnnnnnnnnnnnnnnnnnnnnnnnnnnnnnnnnnnnnnnnnnnnnnnnnnnnnnnnnnnnnnnnnnnnnnnnnnnnnnnnnnnnnnnnnnnnnnnnnnnnnnnnnnnnnnnnnnnnnnnnnnnnnnnnnnnnnnnnnnnnnnnnnnnnnnnnnnnnnnnnnnnnnnnnnnnnnnnnnnnnnnnnnnnnnnnnnnnnnnnnnnnnnnnnnnnnnnnnnnnnnnnnnnnnnnnnnnnnnnnnnnnnnnnnnnnnnnnnnnnnnnnnnnnnnnnnnnnnnnnnnnnnnnnnnnnnnnnnnnnnnnnnnnnnnnnnnnnnnnnnnnnnnnnnnnnnnnnnnnnnnnnnnnnnnnnnnnnnnnnnnnnnnnnnnnnnnnnnnnnnnnnnnnnnnnnnnnnnnnnnnnnnnnnnnnnnnnnnnnnnnnnnnnnnnnnnnnnnnnnnnnnnnnnnnnnnnnnnnnnnnnnnnnnnnnnnnnnnnnnnnnnnnnnnnnnnnnnnnnnnnnnnnnnnnnnnnnnnnnnnnnnnnnnnnnnnnnnnnnaggtgtctgaatctccctggttccatgccccatctctgaagagcagctgtgaatatgtgagtctctaccaccagcctgccgccaagatggaggacagtaattcagatgactacatcaatgttcctgcctga

SEQ ID NO: 30893 - DNA, 255 bp, Macaca Mulatta
ataatatcccacggcctctgctgacatccatcactgcccccaccaaaatatataccataacatcatcagccagcgttcctggtgaatctcagaggagcagaattgtggctgtgcgctcctgggacacagtagggttgcacatggtttggactaagtaaaacccctccacacagagagtgttaattcagcagggtgtgtaggaagcctggtgctgggctcaggcatgcttccagtcatttgtatcctcctcgcctg

SEQ ID NO: 30894 - DNA, 687 bp, Macaca Mulatta
tgcaggacctgcacgaagcacaggcagagcgcggcggctctcggccgtcgtccaacctcagctccctgtccaacgcctccgagagggaccagcaccacctgggaagcccttctcgcctgagtgtcggggagcagccagatgtcacccacgacccctatgagtttcttcagtctccagagcctgcggcctccaccaagacctaactctagaccacctgcagctcttttgtttcatttttttagttttattttgcatgtgtagagtttttgtcatcggacaaggactttgatcttccccctttggcatgcgggaagcaaccctggggaggtaacgaattgtctgtggtatcatgtcagcgagagagtctctgcacagccccgtgaacccaggggagtggagtcatgcgtgaagggcgtatggccgggccgcagaactgtgtgcaatctgtgtccaaatatcacgtgtggctccagcccttgtttctgccagtgtagacacctctgtctgcccccctgtcctggggtcgctcttgggaggcacgggcatgggtgcgtctggccgccttctgtatcagtcctgcgtgttcctctcatcgttcgtgtttcccaggcaggccgtggtaggggcctcgcaggggccagtggggagcgcagggccaggctggggtgaggagagccccccgttttc

SEQ ID NO: 30895 - DNA, 1748 bp, Macaca Mulatta
  misc_feature (1)...(1748): n = A,T,C or G
ggcgggacttccggggcggtgattgcatcagattctgggaagtgtctgtagccgcagctgtgggtccgggattcccagccatggcaggttcctccgggcagcaggnnnnnnnnnnnnnnnnnnnnnnnnnnnnnnnnnnnnnnnnnnnnnnnnnnnnnnnnnnnnnnnnnnnnnnnnnnnnnnnnnnnnnnnnnnnnnnnnnnnnnnnnnnnnnnnnnnnnnnnnnnnnnnnnnnnnnnnnnnnnnnnnnnnnnnnnnnnnnnnnnnnnnnnnnnnnnnnnnnnnnnnnnnnnnnnnnnnnnnnnnnnnnnnnnnnnnnnnnnnnnnnnnnnnnnnnnnnnnnnnnnnnnnnnnnnnnnnnnnnnnnnnnnnnnnnnnnnnnnnnnnnnnnnnnnnnnnnnnnnnnnnnnnnnnnnnnnnnnnnnnnnnnnnnnnnnnnnnnnnnnnnnnnnnnnnnnnnnnnnnnnnnnnnnnnnnnngccattttcagtaaaattaaatgagacgacagatcctgataaaaagcagatgctcgaacggattcagcacgaagtgcagcttgccacagaaccgcttgagaaagctgtgcagtccagactcacgggagaggaagtcaacagctgtgtggaggtgnnnnnnnnnnnnnnnnnnnnnnnnnnnnnnnnnnnnnnnnnnnnnnnnnnnnnnnnnnnnnnnnnnnnnnnnnnnnnnnnnnnnnnnnnnnnnnnnnnnnnnnnnnnnnnnnnnnnnnnnnnnnnnnnnnnnnnnnnnnnnnnnnnnnnnnnnnnnnnnnnnnnnnnnnnnnnnnnnnnnnnnnnnnnnnnnnnnnnnnnnnnnnnnnnnnnnnnnnnnnnnnnnnnnnnnnnnnnnnnnnnnnnnnnnnnnnnnnnnnnnnnnnnnnnnnnnnnnnnnnnnnnnnnnnnnnnnnnnnnnnnnnnnnnnnnnnnnnnnnnnnnnnnnnnnnnnnnnnnnnnnnnnnnnnnnnnnnnnnnnnnnnnnnnnnnnnnnnnnnnnnnnnnnnnnnnnnnnnnnnnnnnnnnnnnnnnnnnnnnnnnnnnnnnnnnnnnnnnnnnnnnnnnnnnnnnnnnnnnnnnnnnnnnnnnnnnnnnnnnnnnnnnnnnnnnnnnnnnnnnnnnnnnnnnnnnnnnnnnnnnnnnnnnnnnnnnnnnnnnnnnnnnnnnnnnnnnnnnnnnnnnnnnnnnnnnnnnnnnnnnnnnnnnnnggcctactttgaaaacgactgctgggtcaggtacttcctacatacaggccacctgaccattgcaggctgcaaaatgtcaaagtcactgaaaaacttcatcaccattaaagatgccttgaagaagcattcagncagcacggcagttgcggctggccttcctcatgcactcgtggaaggacaccctggactactccagcaacaccatggagtcagcgcttcagtatgagaagttcttgaatgnnnnnnnnnnnnnnnnnnnnnnnnnnnnnnnnnnnnnnnnnnnnnnnnnnnnnnnnnnnnnnnnnnnnnnnnnnnnnnnnnnnnnnnnnnnnnnnnncttttatgacaagaagacagcaattcatgaagccctctgtgacaacgttgacacccgcacagtcatggaagagatgcgggccttggtcagtcagtgcaacctctatatggcagcccggaaagccatgaggaagaggcccaaccgggctctgctggagaacatcgccctctacctcacccatatgttgaa

SEQ ID NO: 30896 - DNA, 3047 bp, Macaca Mulatta
  misc_feature (1)...(3047): n = A,T,C or G
cagggctcatccgactgcaggagctcatcatggccccatcgagatacaacatccgcctgaagatccgtcagctccccgtcgactctgacgactcgcgccccttgctcaaggagatgaaacgaggccgggaattccgcattatcttcgactgcagccacactatggcagcccagatcctcaagcaggnnnnnnnnnnnnnnnnnnnnnnnnnnnnnnnnnnnnnnnnnnnnnnnnnnnnnnnnnnnnnnnnnnnnnnnnnnnnnnnnnnnnnnnnnnnnnnnnnnnnnnnnnnnnnnnnnnnnnnnnnnnnnnnnnnnnnnnnnnnnnnnnnnnnnnnnnnnnnnnnnnnnnnnnnnnnnnnnnnnnnnnnnnnnnnnnnnnnnnnnnnnnnnnnnnnnnnnnnnnnnnnnnnnnnnnnnnnnnnnnnnnnnnnnnnnnnnnnnnnnnnnnnnnnnnnnnnnnnnnnnnnnnnnnnnnnnnnnnnnnnnnnnnnnnnnnnnnnnnnnnnnnnnnnnnnnnnnnnnnnnnnnnnnnnnnnnnnnnnnnnnnnnnnnnaggctcaatgggaaggattaactggacgaattgttttcaacaaaactagtggcttgcggacggattttgatctggacatcatcagcctgaaagaggatggcctggagaaggtnnnnnnnnnnnnnnnnnnnnnnnnnnnnnnnnnnnnnnnnnnnnnnnnnnnnnnnnnnnnnnnnnnnnnnnnnnnnnnnnnnnnnnnnnnnnnnnnnnnnnnnnnnnnnnnnnnnnnnnnnnnnnnnnnnnnnnnnnnnnnnnnnnnnnnnnnnnnnnnnnnnnnnnnnnnnnnnnnnnnnnnnnnnnnnnnnnnnnnnnnnnnnnnnnnnnnnnnnnnnnnnnnnnnnnnnnnnnnnnnnnnnnnnnnnnnnnnnnnnnnnnnnnnnnnnnnnnnnnnnnnnnnnnnnnnnnnnnnnnnnnnnnnnnnnnnnnnnnnnnnnnnnnnnnnnnnnnnnnnnnnnnnnnnnnnnnnnnnnnnnnnnnnnnnnnnnnnnnnnnnnnnnnnnnnnnnnnnnnnnnnnnnnnnnnnnnnnnnnnnnnnnnnnnnnnnnnnnnnnnnnnnnnnnnnnnnnnnnnnnnnnnnnnnnnnnnnnnnnnnnnnnnnnnnnnnnnnnnnnnnnnnnnnnnnnnnnnnnnnnnnnnnnnnnnnnnnnnnnnnnnnnnnnnnnnnnnnnnnnnnnnnnnnnnnnnnnnnnnnnnnnnnnnnnnnnnnnnnnnnnnnnnnnnnnnnnnnnnnnnnnnnnnnnnnnnnnnnnnnnnnnnnnnnnnnnnnnnnnnnnnnnnnnnnnnnnnnnnnnnnnnnnnnnnnnnnnnnnnnnnnnnnnnnnnnnnnnnnnnnnnnnnnnnnnnnnnnnnnnnnnnnnnnnnnnnnnnnnnnnnnnnnnnnnnnnnnnnnnnnnnnnnnnnnnnnnnnnnnnnnnnnnnnnnnnnnnnnnnnnnnnnnnnnnnnnnnnnnnnnnnnnnnnnnnnnnnnnnnnnnnnnnnnnnnnnnnnnnnnnnnnnnnnnnnnnnnnnnnnnnnnnnnnnnnnnnnnnnnnnnnnnnnnnnnnnnnnnnnnnnnnnnnnnnnnnnnnnnnnnnnnnnnnnnnnnnnnnnnnnnnnnnnnnnnnnnnnnnnnnnnnnnnnnnnnnnnnnnnnnnnnnnnnnnnnnnnnnnnnnnnnnnnnnnnnnnnnnnnnnnnnnnnnnnnnnnnnnnnnnnnnnnnnnnnnnnnnnnnnnnnnnnnnnnnnnnnnnnnnnnnnnnnnnnnnnnnnnnnnnnnnnnnnnnnnnnnnnnnnnnnnnnnnnnnnnnnnnnnnnnnnnnnnnnnnnnnnnnnnnnnnnnnnnnnnnnnnnnnnnnnnnnnnnnnnnnnnnnnnnnnnnnnnnnnnnnnnnnnnnnnnnnnnnnnnnnnnnnnnnnnnnnnnnnnnnnnnnnnnnnnnnnnnnnnnnnnnnnnnnnnnnnnnnnnnnnnnnnnnnnnnnnnnnnnnnnnnnnnnnnnnnnnnnnnnnnnnnnnnnnnnnnnnnnnnnnnnnnnnnnnnnnnnnnnnnnnnnnnnnnnnnnnnnnnnnnnnnnnnnnnnnnnnnnnnnnnnnnnnnnnnnnnnnnnnnnnnnnnnnnnnnnnnnnnnnnnnnnnnnnnnnnnnnnnnnnnnnnnnnnnnnnnnnnnnnnnnnnnnnnnnnnnnnnnnnnnnnnnnnnnnnnnnnnnnnnnnnnnnnnnnnnnnnnnnnnnnnnnnnnnnnnnnnnnnnnnnnnnnnnnnnnnnncactgggctggggaccagagctgccacctgcctgttgggccagaagcctcctgcccttacctgccaggaagccaacaggctctcaggccagctgcttgggcttcgtcctcctcagatcttctgtgggtttctaaagctgccagccgagatagccaaggccaaaggaagcacatgcctctctcaggccaaactcacccgcccctctactctcctccagagtcagaagtttctgccatggccctgcagaggccacagaaaatggaagacatctcttatgttaccatttcttccccaagagcccaggcctccgtcagttgaccatgaggccagagacacaagcctttggcgccttaaggaagttctagcatggctgccaatgggagttcatggtgagggatgcccatcccatatgcctgggcagaaggaagacttcatccctctgaggctgttcacatggtcctgatcttctggacttggcaccacccctggcagcccctgttttggcagagttgaagacagagtcacatggggaaaagaggagcttggggtatgggagagaagagaatgcacaaacagaagtcgccattttggattcttatggacaatgacccagtggttcctaatgctctaggaggtctctaagaatataagtggggagtggccacagaaaattcttctcggctttctggccagaggagagacgaccccctgaatctctaacaaaggatgcccaaagactcagccgatatttg

SEQ ID NO: 30897 - DNA, 785 bp, Macaca Mulatta
  misc_feature (1)...(785): n = A,T,C or G
gggccccgagccctgccaagcatggtgaacttgggcctgtcccgggtggacgacgccgtggctgccaggcacccgggactcggggagtatgccgcatgccagtcacacgccttcatgaagggcgttttcaccttcgtcacaggcaccggcgtggcctttggcttgcagatgttcattcagaggaagtttccataccctttgcagtggagcctactagtggccgtggttgcaggctctgtggccagctatggggtgacgagagtggagtcgaagaaatgcagcaacctgtggctcttcctggagaccgggcagctccccaaagacatgagcacagatcggcgaagccaggagagttccggccggggcgcagaggattgggggcagtaggagtctggaacacagccttcatgccccccgaccccaggctgaccctccccacaccctagggtaccccggtcatatcctctatccgcatgcatggccaggcctgataaacctctgcagacggccgctgccccagcctgggacctgtccagaaagttggagcagaaggggctctcctctagctggtggttctcctctaaggtatcgggatggatggtctgcactgccancagaaagggtgtgtctgggggccaccacctgtgggcacggggttagaaggggctttgtgcactcctgtcattcccttttctaagccccctggcaccttcccgacaagttcccaggttggcttaaggaactttggtggctaaactgggatgccctaagggggtttgttgggt

SEQ ID NO: 30898 - DNA, 108 bp, Macaca Mulatta
ctgaagtgagtagtgaatatagtatggacaaggcaatggttgaatttgctacaatggatcggcaactaaaccattatgtaaaggctgttcaatctacaataaatcatg

SEQ ID NO: 30899 - DNA, 779 bp, Macaca Mulatta
  misc_feature (1)...(779): n = A,T,C or G
ctgcacagcaggcatcttcatcctcacccagcctgagtggaacatcgtgttctttctcttccctggaaaatacaatgaagacacccagcagttttccttcctccttatctaaagagagacaatccttgcccgacacagttaacagttcatctgctgctgaagatgagggacaaccaataacgtttgctgtacaagttcattcacctgcaacatcagaggcaggcagccacaaggcccgggaaaacagctttgtcacatcagaaagtggatttttgaactctttatctagtgatgatacttcttcattaagtagcaatcatgaccatcttactgtcccggataagcctgctggatcaaagatcatggacaaannnnnnnnnnnnnnnnnnnnnnnnnnnnnnnnnnnnnnnnnnnnnnnnnnnnnnnnnnnnnnnnnnnnnnnnnnnnnnnnnnnnnnnnnnnnnnnnnnnnnnnnnnnnnnnnnnnnnnnnnnnnnnnnnnnnnnnnnnnnnnnnnnnnnnnnnnnnnnnnnnnnnnnnnnnnnnnnnnnnnnnnnnnnnnnngtgtaaagaacatgatctggccatgattaaccagttgctggatgacccgaagctgacagccaggaaatacagagagtggaaagtcatgaacaccctgctgatccaggacatctatcagcagcagcggggcttcgccttcccctgatgaacctggatgacaccccccaggactccangaaatccaccttcttctccctgtgttgaaaatccatttga

SEQ ID NO: 30900 - DNA, 666 bp, Macaca Mulatta
  misc_feature (1)...(666): n = A,T,C or G
gtatgagacagagctgaacctgcgcatgagtgtggaggccgacatcaatggcctgcgcagggtgcaggatgaactgaccctggccagagctgacctggagatgcagattgagagcctgaaggaggagctggcctacctgaaaaagaaccacgaggaggnnnnnnnnnnnnnnnnnnnnnnnnnnnnnnnnnnnnnnnnnnnnnnnnnnnnnnnnnnnnnnnnnnnnnnnnnnnnnnnnnnnnnnnnnnnnnnnnnnnnnnnnnnnnnnnnnnnnnnnnnnnnnnnnnnnnnnnnnnnnnnnnnnnnnnnnnnnnnnnnnnnnnnnnnnnnnnnnnnnnnnnnnnnnnnnnnnnnnnnnnnnnnnnnnnnnnnnnnnnnnnnnnnnnnnnnnnnnnnnnnnnnnnnnnnnnnnnnnnnnnnnnnnnnnnnnnnnnnnnnnnnnnnngaaagcatccctggagaacagcctggaggagaccaaaggccgctactgcatgcagctggcccagattcaggagatgattggcagtgtggaggaacagctggcccagctacgctgcgagatggagcagcagaaccaggagtacaagatcttgctggacgtgaagacacggctggagcaggagatcgccacctaccgccgcctgctggagggcgaggatgccc

SEQ ID NO: 30901 - DNA, 460 bp, Macaca Mulatta
gacagcagagtgcctaagtgcctttaaagttcccaggttgcctcatttttctgtcatgagggtgtcccttttgcctttagttgttcacaaacagtgtgatggcatctgtcttaacagtttttagcactcatttgtagaaatggtgtggtttctctctttgatcaatgaggatcttagacaacaaaaagcaaattagaatttcagcaatttgccatctttataactttcttttcatccaaataacactttcttagttcaagccttgcttatgttttgcttaagcagtggaaatagattataagttgtttatctcaataacttaacattttgtttcctctcatttgcctaaacctaccttgtaatgtattcacaaaatgaaaagcaactctccacaggaaataactactctctgctttactctgcaatggcctgtgaggtggagatgttaagtaatggaaag

SEQ ID NO: 30902 - DNA, 855 bp, Macaca Mulatta
  misc_feature (1)...(855): n = A,T,C or G
ggagcatgtccatgtttagatcaccggaagtaacaaagttgnnnnnnnnnnnnnnnnnnnnnnnnnnnnnnnnnnnnnnnnnnnnnnnnnnnnnnnnnnnnnnnnnnnnnnnnnnnnnnnnnngtcctggtttccaccgccccctccaggttacatgcctcttcttgcacaggagccaggagacggnnnnnnnnnnnnnnnnnnnnnnnnnnnnnnnnnnnnnnnnnnnnnnnnnnnnnnnnnnnnnnnnnnnnnnnnnnnntaggcagatacatccacctaaaccgggtgtatatacagaaaccaacagatctgctgaaagaaatataagnnnnnnnnnnnnnnnnnnnnnnnnnnnnnnnnnnnnnnnnnnnnnnnnnnnnnnnnnnnnnnnnnnnnnnnnnnnnnnnnnnnnnnnnnnnnnnnnnnnnnnnnnnnnnnnnnnnnnnnnnnnnnnnnnnnnnnnnnnnnnnnnnnnnnnnnnnnnnnnnnnnnnnnnnnnnnnnnnnnnnnnnnnnnnnnnnnnnnnnnnnnnnnnnnnnnnnnnnnnnnnnnnnnnnnnnnnnnnnnnnnnnnnnnnnnnnnnnnnnnnnnnnnnnnnnnnnnnnnnnnnaagaagtgaagacgttgataatgctatcaaagtaaatcccaaaggaaatgaaaataccactgnnnnnnnnnnnnnnnnnnnnnnnnnnnnnnnnnnnnnnnnnnnnnnnnnnnnnnnnnnnnnnnnnnnnnnnnnnnnnnnnnnnnnnnnnnnnnnnnnnnnnnnnnnnnnnnnnnnnnnngttccaaagacctcaatgacttcatcaaagtgaatccaggaacagaaaaaagtactcaagg

SEQ ID NO: 30903 - DNA, 334 bp, Macaca Mulatta
  misc_feature (1)...(334): n = A,T,C or G
ttatcttctacaaccacactcatggccgggaaatactggacatctttgtgcaccagctgctggttttggtcatctttctgacaggcctcgttgcctttctagagttccttgttcggaacaatgtacttctagagctactgcggtcaagcctcattctgcttcaggggagctggttctttcagncagattggatttgtcctgtatccccccagtggaggtcctgcatgggatctggtggatcatgaaaatattttgtttcttaccatatgcttttgttggcattatgcaataaccattgtcatcgttggaatgaattatgctttcatcacctggt

SEQ ID NO: 30904 - DNA, 1238 bp, Macaca Mulatta
  misc_feature (1)...(1238): n = A,T,C or G
cgcccaggaccaggactagcccctgctcaagctgagattctgagacccctgccaccactactgcatttgcagggatcccaggctaggagggctcgacatgggcagcccccagggcagctccctacagcttgggccatctgcacttttcccaaggccctaagtcatccgcctctgggctcgttaaggttcggggtgggagctgtgcggcgggaagcaacccggactacactccgcaagcatggcgctactgaaagtcaagtttgaccagaagaagcgggtcaagttggcccaagggctctggctcatgaactggttctctgtgttggctggtatcatcatcttcagcctaggactgttcctgaagattgaactccgaaagaggagcgacgtgatgaataattccgagagccattttgtgcccaactcattgatagggatgggggtgctatcctgtgtcttcaactctctggctgggaagatctgctacgatgccctggacccggccaagtacgccagatggaagccctggctgaagccatacctggctatctgtgtcctcttcaacatcgtcctcttcctcgtggctctctgctgctttctgctgcggggctcgctggagaacaccctgggccaagggctcaagaacggtatgaagtactaccgggacacagacacccctggcaggtgtttcatgaagaagaccatcgacatgctgcagatcgagttcaaatgctgcggcaacaacggttttcgggactggtttgagattcagtggatcagcaatcgctacctggacttttcctccaaagaagtcaaagantcgaatcaagagcaacgtggatgggcggtacctggtagatggcgtccccttcagctgctgcaatcctagctcgccacggccctgcatccagtatcagatcaccaacaactcagcacactacagttacgaccaccagacggaggagctcaacctgtgggtgcgtggctgcagggctgtcctgctcagctactccagcnnnnnnnnnnnnnnnnnnnnnnnnnnnnnnnnnnnnnnnnnnnnnnnnnaggtgaccattacaattgggctgcgctatctgcagacgtcactggaccatgtgtccaaccccgaggaacctgaaagcgagagcgagggctggctgctgggagaagagcgtgccagagacttggaagcctttcttgaaaggcgtgagaagctgggcaaggggcaacaggtggaa

SEQ ID NO: 30905 - DNA, 149 bp, Macaca Mulatta
atgcaagatcgagcactgtgaggcctgcttcagccataacttctgcactaagtgtaaggagggattgtacctgcacaagggccgctgctatccagcctgtcccgagggctcctcagctgccaatggcaccatggagtgcagtagtcctg

SEQ ID NO: 30906 - DNA, 812 bp, Macaca Mulatta
ggggctaccccaaacggggcaggaaacggagaagcacaaacgaaacggatgcctccaatatcgaggatcagtctgagacagaagccaatgtgagtcttgcaagttgggatgttgagaagatggccatcttcgctttcaatatttcccacatcagtaacaaggttcgaatcctagaactccttccagctcttacaactctgacgaatcacaacagatacttgatcgaatctggaaatgaagatggcttctttaaaatcaaccaaaaggaagggatcagctacctccacttcacaaagaagaagccagtggctggaacctattcattacaaatcagtagtactccactttataaaaagaaagaacttaaccaactagaagacaaatatgacaaagactacctcagtggtgaactgggtgataatctgaagatgaaaatccaggttttgcttcattaattcaccatccagagaccaaataattaaaagaaaaacaaatatagataggtagaactatatttttccccaatcagaatcatcatatcataggtacaatctttcaccaagtaaatttgtataaataagcactattcttgtattaccaaagcaaggtacaggtgactaccctagttcaaaacaaccactttctcaggcttctcgtgtgtgtagctaagctaccttgtcataatgtgttgattcttgaaaactggggacatggtatttccattggggggttggcccattttatgctgaaaccgccattttttccccaaacttacagggaaagggcctttcaaattggagggactacccctg

SEQ ID NO: 30907 - DNA, 96 bp, Macaca Mulatta
gttatgttaaaatgtcaaaactctcaaaggatatattgcgcctcaatgtagatcatctctacaccccagggaaacattgtttggattgtatataag

SEQ ID NO: 30908 - DNA, 934 bp, Macaca Mulatta
  misc_feature (1)...(934): n = A,T,C or G
ggaagtgttcctgctcatatgtttggcgtgacaaagtttggggataatattgaggatgaatggtttattgtttatgtaataaagcagatcacaaaggaatttccagagttagtagcaaggnnnnnnnnnnnnnnnnnnnnnnnnnnnnnnnnnnnnnnnnnnnnnnnnnnnnnnnnnnnnnnnnnnnnnnnnnnnnnnnnnnnnnngtatttttccaccatggagaattgtgtattattcctgcaccaagaaaacctggagcggaatcttggttacccaccacacccccaacaattccacaagcattgaatataatcgcagcacatccagaaaaaatacttgcttcagaatctatacgagctgctgtgagtaggcgcatcagagggtannngtacccagaaaaaattcaggtctcccttcatcgagcacactgcttccttccagctggcattgtggcagtgctaaagcagcgccccagattggtgtctgcagcannnnnnnnnnnnnnnnnnnnnnnnnnnnnnnnnnnnnnnnnnnnnnnnnnnnnnnnnnnnnnnnnnnnnnnnnnnnnnnnnnnnnnnnnnnnnnnnnnnnnnnnnnnnnnnnnnnnnnnnnnnnnnnnnnnnnnnnnnnnnnnnnnnnnnnnnnnnnnnnnnnnnnnnnnnnnnnnnnnnnnnnnnnnnnnnnnnnnnnnnnnnnnnnnnnnnnnnnnnggctcatggatttgagatcttatgctccaaatgtagcccacatttttctgattgcaagaaatcccttgtgactgcctcaccactctgggccagtttccttgcaagtctgaaaaagaatgattactttaagnnnaagggactgatagaaggttctgttcagtaccgggaaaggctagaaatggcagagaattacttccagctctcagtaaaccggccagaaa

SEQ ID NO: 30909 - DNA, 833 bp, Macaca Mulatta
  misc_feature (1)...(833): n = A,T,C or G
cagacaatgtggccgaaggaaatcaataagaaatcctgggtagcacttatgtcatggaagaagagatatcccacctcctacatatactattggtctaagtttttggaacaaggtcatagtcagacattatatctttagattgatgtcgaccacaaagttcagccagagcttgaggctagatgccgagctttgctgctgggaagaaggcctcttctggctatactgcacagtctcactgggcattcatccagaaatagagaagaaaggctgccagacttgagttgtgttgtcttttattagcagggaatgtcatcacagattggatggtacatccaagtgcaatgtcaccatcagcaaggtcagcttgacactcaagtggcacattagggaagaatgactagnnnnnnnnnnnnnnnnnnnggcaccaagggaaagggatgatggggtgggttggtgagtgtgggtgggaaatgaaatgtttagtgaggatctgctttgtactgggcactttaatccacattttatcatttgcttttcaaaccgatgcaccttacccccagcccaatgctctgtccctgcagatatcagaagacagtgtgattttcacactctaaagttcagttttacatgccatcatccctctctgttttttaacaatccaaagacagaccaaaaaaaccaccacagtttattaagtacttactgagcacccatccactgccccacattgtggcaaggattgtgaggggtaaagaagcatggggcacaatattctgctgccttcatgtaacttacagtctcacaaataaatagaacttcagttgaaatactga

SEQ ID NO: 30910 - DNA, 2145 bp, Macaca Mulatta
  misc_feature (1)...(2145): n = A,T,C or G
tccagatggactttctggccgagaccagccagtggagctgctgaatcctgcccgcgtgaaccacatgcccagcacggnnnnnnnnnnnnnnnnnnnnnnnnnnnnnnnnnnnnnnnnnnnnnnnnnnnnnnncaggagctgctggaacaccagcggaagctggagaggcatcgccaggagcaggagctggagaagcagcaccgggagcagaagctgcagcagctcaagaacaaggagaagggcaaagagagtgnnnnnnnnnnnnnnnnnnnnnnnnnnnnnnnnnnnnnnnnnnnnnnnnnnnnnnnnnnnnnnnnnnnnnnnnnnnnnnnnnnnnnnnnnnnnnnnnnnnnnnnnnnnnnnnnnnnnnnnnnnnnnnnnnnnnnnnnnnnnnnnnnnnnnnnnnnnnnnnnnnnnnnnnnnnnnnnnnnnnnnnnnnnnnnnnnnnnnnnnnnnnnnnnnnnnnnnnnnnnnnnnnnnnnnnnnnnnnnnnnnnnnnnnnnnnnnnnnnnnnnnnnnnnnnnnnnnnnnnnnnnnnnnnnnnnnnnnnnnnnnnnnnnnnnnnnnnnnnnnnnnnnnnnnnnnnnnnnnnnnnnnnnnnnnnnnnnnnnnnnnnnnnnnnagattccgcgtgcagcacctccccaggctctggacccagctcacccaacaacagctccgggagcgtcagcgcagagaacggcatcacgcccgccgtccccagcatcccggcggagcnnnnnnnnnnnnnnnnnnnnnnnnnnnnnnnnnnnnnnnnnnnnnnnnnnnnnnnnnnnnnnnnnnnnnnnnnnnnnnnnnnnnnnnnnnnnnnnnnnnnnnnnnnnnnnnnnnnnnnnnnnnnnnnnnnnnnnnnnnnnnnnnnnnnnnnnnnnnnnnnnnnnnnnnnnnnnnnnnnnnnnnnnnnnnnnnnnnnnnnnnnnnnnnnnnnnnnnnnnnnnnnnnnnnnnnnnnnnnnnnnnnnnnnnnnnnnnnnnnnnnnnnnnnnnnnnnnnnnnnnnnnnnnnnnnnnnnnnnnnnnnnnnnnnnnnnnagattccgcgtgcagcacctccccannnnnnnnnnnnnnnnnnnnnnnnnnnnnnnnnnnnnnnnnnnnnnnnnnnnnnnnnnnnnnnnnnnnnnnnnnnnnnnnnnnnnnnnnnnnnnnnnnnnnnnnnnnnnnnnnnnnnnnnnnnnnnnnnnnnnnnnnnnnnnnnnnnnnnnnnnnnnnnnnnnnnnnnnnnnnnnnnnnnnnnnnnnnnnnnnnnnnnnnnnnnnnnnnnnnnnngatcatcccgaaaccaagcgagccggcccggcagccggagagtcacccagaggagacggaggaggagctccgtgagcaccaggctctgctggacgagccctacctggaccggctgccggcgcagaaggaggcgcacgcaccagctggcgtgcaggtgaagcaggagcccattgagagcgatgacgaagaggcagagccccctcgggaggtggagccgggccagcgccagcccagtgagcaggagctgctcttcatacagnnnnnnnnnnnnnnnnnnnnnnnnnnnnnnnnnnnnnnnnnnnnnnnnnnnnnnnnnnnnnnnnnnnnnnnnnnnnnnnnnnnnnnnnnnnnnnnnnnnnnnnnnnnnnnnnnnnnnnnnnnnnnnnnnnnnnnnnnnnnnnnnnnnnnnnnnnnnnnnnnnnnnnnnnnnnnnnnnnnnnnnnnnnnnnnnnnnnnnnnnnnnnnnnnnnnnnnnnnnnnnnnnnnnnnnnnnnnnnnnnnnnnnnnnnnnnnnnnnnnnnnnnnnnnnnnnnnnnnnnnnnnnnnnnnnnnnnnnnnnnnnnnnnnnnnnnnnnnnngtgcatccgcggacgcaaggccaccctggaggagctgcagacggtgcactcggaagcccacaccctcctgtacggcacaaatcccctcaaccggcagaaactggacagtaagaaacttctaggnnnnnnnnnnnnnnnnnnnnnnnnnnnnnnnnnnnnnnnnnnnnngtggacagcgacaccatatggaacgaggtgcactcggcgggggcagcccgcctggccgtgggctgcgtggtggagctggtcttcaaggtggccacgggggagctgaag

SEQ ID NO: 30911 - DNA, 159 bp, Macaca Mulatta
agggagagctggtgacggcctccaaggcaatcattgagaaggagtaccagccccacgtcatcgtgagcaccacgggccccaaccccttcaccacgctcacagaccgcgagctggaggagtaccgcagggaggtggagcggaagcagaagggctctgaag

SEQ ID NO: 30912 - DNA, 2097 bp, Macaca Mulatta
  misc_feature (1)...(2097): n = A,T,C or G
gatctgcagtggtgcgaaggtccaacaccagccccatgggcttcctccggctgggatcatgctccccggtgccagcagacacagcacagacagttggacgaaggctctccactgggtcttctaggccttactcaccttcccctttggnnnnnnnnnnnnnnnnnnnnnnnnnnnnnnnnnnnnnnnnnnnnnnnnnnnnnnnnnnnnnnnnnnnnnnnnnnnnnnnnnnnnnnnnnnnnnnnnnnnnnnnnnnnnnnnnnnnnnnnnnnnnnnnnnnnnnnnnnnnnnnnnnnnnnnnnnnnnnnnnnnnnnnnnnnnnnnnnnnnnnnnnnnnnnnnnnnnnnnnnnnnnnnnnnnnnnnnnnnnnnnnnnnnnnnnnnnnnnnnnnnnnnnnnnnnnnnnnnnnnnnnnnnnnnnnnnnnnnnnnnnnnnnnnnnnnnnnnnnnnnnnnnnnnnnnnnnnnnnnnnnnnnnnnnnnnnnnnnnnnnnnnnnnnnnnnnnnnnnnnnnnnnnnnnnnnnnnnnnnnnnnnnnnnnnnnnnnnnnnnnnnnnnnnnnnnnnnnnnnnnnnnnnnnnnnnnnnnnnnnnnnnnnnnnnnnnnnnnnnnnnnnnnnnnnnnnnnnnnnnnnnnnnnnnnnnnnnnnnnnnnnnnnnnnnnnnnnnnnnnnnnnnnnnnnnnnnnnnnnnnnnnnnnnnnnnnnnnnnnnnnnnnnnnnnnnnnnnnnnnnnnnnnnnnnnnnnnnnnnnnnnnnnnnnnnnnnnnnnnnnnnnnnnnnnnnnnnnnnnnnnnnnnnnnnnnnnnnnnnnnnnnnnnnnnnnnnnnnnnnnnnnnnnnnnnnnnnnnnnnnnnnnnnnnnnnnnnnnnnnnnnnnnnnnnnnnnnnnnnnnnnnnnnnnnnnnnnnnnnnnnnnnnnnnnnnnnnnnnnnnnnnnnnnnnnnnnnnnnnnnnnnnnnnnnnnnnnnnnnnnnnnnnnnnnnnnnnnnnnnnnnnnnnnnnnnnnnnnnnnnnnnnnnnnnnnnnnnnnnnnnnnnnnnnnnnnnnnnnnnnnnnnnnnnnnnnnnnnnnnnnnnnnnnnnnnnnnnnnnnnnnnnnnnnnnnnnnnnnnnnnnnnnnnnnnnnnnnnnnnnnnnnnnnnnnnnnnnnnnnnnnnnnnnnnnnnnnnnnnnnnnnnnnnnnnnnnnnnnnnnnnnnnnnnnnnnnnnnnnnnnnnnnnnnnnnnnnnnnnnnnnnnnnnnnnnnnnnnnnnnnnnnnnnnnnnnnnnnnnnnnnnnnnnnnnnnnnnnnnnnnnnnnnnnnnnnnnnnnnnnnnnnnnnnnnnnnnnnnnnnnnnnnnnnnnnnnnnnnnnnnnnnnnnnnnnnnnnnnnnnnnnnnnnnnnnnnnnnnnnnnnnnnnnnnnnnnnnnnnnnnnnnnnnnnnnnnnnnnnnnnnnnnnnnnnnnnnnnnnnnnnnnnnnnnnnnnnnnnnnnnnnnnnnnnnnnnnnnnnnnnnnnnnnnnnnnnnnnnnnnnnnnnnnnnnnnnnnnnnnnnnnnnnnnnnnnnnnnnnnnnnnnnnnnnnnnnnnnnnnnnnnnnnnnnnnnnnnnnnnnnnnnnnnnnnnnnnnnnnnnnnnnnnnnnnnnnnnnnnnnnnnnnnnnnnnnnnnnnnnnnnnnnnnnnnnnnnnnnnnnnnnnnnnnnnnnnnnnnnnnnnnnnnnnnnnnnnnnnnnnnnnnnnnnnnnnnnnnnnnnnnnnnnnnnnnnnnnnnnnnnnnnnnnnnnnnnnnnnnnnnnnnnnnnnnnnnnnnnnnnnnnnnnnnnnnnnnnnnnnnnnnnnnnnnnnnnnnnnnnnnnnnnnnnnnnnnnnnnnnnnnnnnnnggaagaggggaaagaaggaagagcttttccatttggtgctccaatgtctccggctggacccatcttctgcctagtggaagggagcaaaatttcaagaaacaggtgaggttgagcagtttggtgcaaccccatggggcctggagttggagctcaacagcaatggatttcagagaccaccctgaaactcccagtaaaaaagacttcggagacatgttaataaactcaagcattcgatcaaccca

SEQ ID NO: 30913 - DNA, 6443 bp, Macaca Mulatta
  misc_feature (1)...(6443): n = A,T,C or G
agtgcggaccaggctctggaccggtttgcaatgaagcggttctatgaggataagattgtgcccattggccagccatcccaaagaaggtnnnnnnnnnnnnnnnnnnnnnnnnnnnnnnnnnnnnnnnnnnnnnnnnnnnnnnnnnnnnnnnnnnnnnnnnnnnnnnnnnnnnnnnnnnnnnnnnnnnnnnnnnnnnnnnnnnnnnnnnnnnnnnnnnnnnnnnnnnnnnnnnnnnnnnnnnnnnnnnnnnnnnnnnnnnnnnnnnnnnnnnnnnnnnnnnnnnnnnnnnnnnnnnnnnnnnnnnnnnnnnnnnnnnnnnnnnnnnnnnnnnnnnnnnnnnnnnnnnnnnnnnnnnnnnnnnnnnnnnnnnnnnnnnnnnnnnnnnnnnnnnnnnnnnnnnnnnnnnnnnnnnnnnnnnnnnnnnnnnnnnnnnnnnnnnnnnnnnnnnnnnnnnnnnnnnnnnnnnnnnnnnnnnnnnnnnnnnnnnnnnnnnnnnnnnnnnnnnnntcttatgggccagagaaaattcaagnnnnnnnnnnnnnnnnnnnnnnnnnnnnnnnnnnnnnnnnnnnnnnnnnnnnnnnnnnnnnnnnnnnnnnnnnnnnnnnnnnnnnnnnnnnnnnnnnnnnnnnnnnnnnnnnnnngaggtggtgggacacacgcaggggccactagatgggagcgtgtatgccaaggtgaagaagaaagactccgtgcatggcagcaccggggttgtcaatgccacacgtcatacactgtcggccacccccaaccacgtggaacacacactttcagtgagcannnnnnnnnnnnnnnnnnnnnnnnnnnnnnnnnnnnnnnnnnnnnnnnnnnnnnnnnnnnnnnnnnnnnnnnnnnnnnnnnnnnnnnnnnnnnnnnnnnnnnnnnnnnnnnnnnnnnnnnnnnnnnnnnnnnnnnnnnnnnnnnnnnnnnnnnnnnnnnnnnnnnnnnnnnnnnnnnnnnnnnnnnnnnnnnnnnnnnnnnnnnnnnnnnnnnnnnnnnnnnnnnnnnnnnnnnnnnnnnnnnnnnnnnnnnnnnnnnnnnnnnnnnnnnnnnnnnnnnnnnnnnnnnnnnnnnnnnnnnnnnnnnnnnnnnnnnnnnnnnnnnnnnnnnnnnnnnnnnnnnnnnnnnnnnnnnnnnnnnnnnnnnnnnnnnnnnnnnnnnnnnnnnnnnnnnnnnnnnnnnnnnnnnnnnnnnnnnnnnnnnnnnnnnnnnnnnnnnnnnnnnnnnnnnnnnnnnnnnnnnnnnnnnnnnnnnnnnnnnnnnnnnnnnnnnnnnnnnnnnnnnnnnnnnnnnnnnnnnnnnnnnnnnnnnnnnnnnnnnnnnnnnnnnnnnnnnnnnnnnnnnnnnnnnnnnnnnnnnnnnnnnnnnnnnnnnnnnnnnnnnnnnnnnnnnnnnnnnnnnnnnnnnnnnnnnnnnnnnnnnnnnnnnnnnnnnnnnnnnnnnnnnnnnnnnnnnnnnnnnnnnnnnnnnnnnnnnnnnnnnnnnnnnnnnnnnnnnnnnnnnnnnnnnnnnnnnnnnnnnnnnnnnnnnnnnnnnnnnnnnnnnnnnnnnnnnnnnnnnnnnnnnnnnnnnnnnnnnnnnnnnnnnnnnnnnnnnnnnnnnnnnnnnnnnnnnnnnnnnnnnnnnnnnnnnnnnnnnnnnnnnnnnnnnnnnnnnnnnnnnnnnnnnnnnnnnnnnnnnnnnnnnnnnnnnnnnnnnnnnnnnnnnnnnnnnnnnnnnnnnnnnnnnnnnnnnnnnnnnnnnnnnnnnnnnnnnnnnnnnnnnnnnnnnnnnnnnnnnnnnnnnnnnnnnnnnnnnnnnnnnnnnnnnnnnnnnnnnnnnnnnnnnnnnnnnnnnnnnnnnnnnnnnnnnnnnnnnnnnnnnnnnnnnnnnnnnnnnnnnnnnnnnnnnnnnnnnnnnnnnnnnnnnnnnnnnnnnnnnnnnnnnnnnnnnnnnnnnnnnnnnnnnnnnnnnnnnnnnnnnnnnnnnnnnnnnnnnnnnnnnnnnnnnnnnnnnnnnnnnnnnnnnnnnnnnnnnnnnnnnnnnnnnnnnnnnnnnnnnnnnnnnnnnnnnnnnnnnnnnnnnnnnnnnnnnnnnnnnnnnnnnnnnnnnnnnnnnnnnnnnnnnnnnnnnnnnnnnnnnnnnnnnnnnnnnnnnnnnnnnnnnnnnnnnnnnnnnnnnnnnnnnnnnnnnnnnnnnnnnnnnnnnnnnnnnnnnnncaggggtgcaggctcgggagaagcagcctgcagagcccccagcccctctgcggaggcgggcggccagtgatggacagtatgagaaccagtctccagaagccacatcccctcgtagccctggggttcgataacctgtccagtgtgtctcccccgagctggctcttaccatcgctctcaatcctggagggcggcccaaagannnnnnnnnnnnnnnnnnnnnnnnnnnnnnnnnnnnnnnnnnnnnnnnnnnnnnnnnnnnnnnnnnnnnnnnnnnnnnnnnnnnnnnnnnnnnnnnnnnnnnnnnnnnnnnnnnnnnnnnnnnnnnnnnnnnnnnnnnnnnnnnnnnnnnnnnnnnnnnnnnnnnnnnnnnnnnnnnnnnnnnnnnnnnnnnnnnnnnnnnnnnnnnnnnnnnnnnnnnnnnnnnnnnnnnnnnnnnnnnnnnnnnnnnnnnnnnnnnnnnnnnnnnnnnnnnnnnnnnnnnnnnnnnnnnnnnnnnnnnnnnnnnnnnnnnnnnnnnnnnnnnnnnnnnnnnnnnnnnnnnnnnnnnnnnnnnnnnnnnnnnnnnnnnnnnnnnnnnnnnnnnnnnnnnnnnnnnnnnnnnnnnnnnnnnnnnnnnnnnnnnnnnnnnnnnnnnnnnnnnnnnnnnnnnnnnnnnnnnnnnnnnnnnnnnnnnnnnnnnnnnnnnnnnnnnnnnnnnnnnnnnnnnnnnnnnnnnnnnnnnnnnnnnnnnnnnnnnnnnnnnnnnnnnnnnnnnnnnnnnnnnnnnnnnnnnnnnnnnnnnnnnnnnnnnnnnnnnnnnnnnnnnnnnnnnnnnnnnnnnnnnnnnnnnnnnnnnnnnnnnnnnnnnnnnnnnnnnnnnnnnnnnnnnnnnnnnnnnnnnnnnnnnnnnnnnnnnnnnnnnnnnnnnnnnnnnnnnnnnnnnnnnnnnnnnnnnnnnnnnnnnnnnnnnnnnnnnnnnnnnnnnnnnnnnnnnnnnnnnnnnnnnnnnnnnnnnnnnnnnnnnnnnnnnnnnnnnnnnnnnnnnnnnnnnnnnnnnnnnnnnnnnnnnnnnnnnnnnnnnnnnnnnnnnnnnnnnnnnnnnnnnnnnnnnnnnnnnnnnnnnnnnnnnnnnnnnnnnnnnnnnnnnnnnnnnnnnnnnnnnnnnnnnnnnnnnnnnnnnnnnnnnnnnnnnnnnnnnnnnnnnnnnnnnnnnnnnnnnnnnnnnnnnnnnnnnnnnnnnnnnnnnnnnnnnnnnnnnnnnnnnnnnnnnnnnnnnnnnnnnnnnnnnnnnnnnnnnnnnnnnnnnnnnnnnnnnnnnnnnnnnnnnnnnnnnnnnnnnnnnnnnnnnnnnnnnnnnnnnnnnnnnnnnnnnnnnnnnnnnnnnnnnnnnnnnnnnnnnnnnnnnnnnnnnnnnnnnnnnnnnnnnnnnnnnnnnnnnnnnnnnnnnnnnnnnnnnnnnnnnnnnnnnnnnnnnnnnnnnnnnnnnnnnnnnnnnnnnnnnnnnnnnnnnnnnnnnnnnnnnnnnnnnnnnnnnnnnnnnnnnnnnnnnnnnnnnnnnnnnnnnnnnnnnnnnnnnnnnnnnnnnnnnnnnnnnnnnnnnnnnnnnnnnnnnnnnnnnnnnnnnnnnnnnnnnnnnnnnnnnnnnnnnnnnnnnnnnnnnnnnnnnnnnnnnnnnnnnnnnnnnnnnnnnnnnnnnnnnnnnnnnnnnnnnnnnnnnnnnnnnnnnnnnnnnnnnnnnnnnnnnnnnnnnnnnnnnnnnnnnnnnnnnnnnnnnnnnnnnnnnnnnnnnnnnnnnnnnnnnnnnnnnnnnnnnnnnnnnnnnnnnnnnnnnnnnnnnnnnnnnnnnnnnnnnnnnnnnnnnnnnnnnnnnnnnnnnnnnnnnnnnnnnnnnnnnnnnnnnnnnnnnnnnnnnnnnnnnnnnnnnnnnnnnnnnnnnnnnnnnnnnnnnnnnnnnnnnnnnnnnnnnnnnnnnnnnnnnnnnnnnnnnnnnnnnnnnnnnnnnnnnnnnnnnnnnnnnnnnnnnnnnnnnnnnnnnnnnnnnnnnnnnnnnnnnnnnnnnnnnnnnnnnnnnnnnnnnnnnnnnnnnnnnnnnnnnnnnnnnnnnnnnnnnnnnnnnnnnnnnnnnnnnnnnnnnnnnnnnnnnnnnnnnnnnnnnnnnnnnnnnnnnnnnnnnnnnnnnnnnnnnnnnnnnnnnnnnnnnnnnnnnnnnnnnnnnnnnnnnnnnnnnnnnnnnnnnnnnnnnnnnnnnnnnnnnnnnnnnnnnnnnnnnnnnnnnnnnnnnnnnnnnnnnnnnnnnnnnnnnnnnnnnnnnnnnnnnnnnnnnnnnnnnnnnnnnnnnnnnnnnnnnnnnnnnnnnnnnnnnnnnnnnnnnnnnnnnnnnnnnnnnnnnnnnnnnnnnnnnnnnnnnnnnnnnnnnnnnnnnnnnnnnnnctcttcggctttgtggcccggaagcagggcagcaccacggacaacgcctgccacctctttgctgaacttgaccccaaccagccggcctctgccatcgtcaacttcgtctccaaggtcatgctgaacgctggccaaaagagatgaaccctgcctcttgcccagggccagnnnnnnnnnnnnnnnnnnnnnnnnnnnnnnnnnnnnnnnnnnnnnnnnnnnnnnnnnnnnnnnnnnnnnnnnnnnnnnnnnnnnnnnnnnnnnnnnnnnnnnnnnnnnnnnnnnnnnnnnnnnnnnnnnnnnnnnnnnnnnnnnnnnnnnnnnnnnnnnnnnnnnnnnnnnnnnnnnnnnnnnnnnnnnnnnnnnnnnnnnnnnnnnnnnnnnnnnnnnnnnnnnnnnnnnnnnnnnnnnnnnnnnnnnnnnnnnnnnnnnnnnnnnnnnnnnnnnnnnnnnnnnnnnnnnnnnnnnnnnnnnnnnnnnnnnnnnnnnnnnnnnnnnnnnnnnnnnnnnnnnnnnnnnnnnnnnnnnnnnnnnnnnnnnnnnnnnnnnnnnnnnnnnnnnnnnnnnnnnnnnnnnnnnnnnnnnnnnnnnnnnnnnnnnnnnnnnnnnnnnnnnnnnnnnnnnnnnnnnnnnnnnnnnnnnnnnnnnnnnnnnnnnnnnnnnnnnnnnnnnnnnnnnnnnnnnnnnnnnnnnnnnnnnnnnnnnnnnnnnnnnnnnnnnnnnnnnnnnnnnnnnnnnnnnnnnnnnnnnnnnnnnnnnnnnnnnnnnnnnnnnnnnnnnnnnnnnnnnnnnnnnnnnnnnnnnnnnnnnnnnnnnnnnnnnnnnnnnnnnnnnnnnnnnnnnnnnnnnnnnnnnnnnnnnnnnnnnnnnnnnnnnnnnnnnnnnnnnnnnnnnnnnnnnnnnnnnnnnnnnnnnnnnnnnnnnnnnnnnnnnnnnnnnnnnnnnnnnnnnnnnnnnnnnnnnnnnnnnnnnnnnnnnnnnnnnnnnnnnnnnnnnnnnnnnnnnnnnnnnnnnnnnnnnnnnnnnnnnnnnnnnnnnnnnnnnnnnnnnnnnnnnnnnnnnnnnnnnnnnnnnnnnnnnnnnnnnnnnnnnnnnnnnnnnnnnnnnnnnnnnnnnnnnnnnnnnnnnnnnnnaggcctgtggctcagcagcaaggaaggcaatgtgctcctgctggggccctggactctgccttagctcccacctctcagccctgttcctgggtttcatgccccaggaccagccttatctcagacctgcttacctgcatgatgccttttcaggggctggggattgagccttcctgctctgcccagccctgttctattctgcagggtccctgtgttggaattcaccctggggaacctgcttcctgctcagtgaggctcaggggagaaacctggagtccttatcctcccctctgtaagtgttttagggtctggcttttgcaggcaccctctgacctcagcagagctcctggggctgctacctgtacaccgtatcgcctacctacaatgccaaacctcactgtcaccctttctgccttggtttccccagctgagccacactgcccatgcagcagagggcagaaggcttgcacttgggccaaagggcctaaggtccactggacagttgggaagacacctgaccaccatttaaggactctaagccagaatggaaaattcaccaggactccattcttaagcctatgggggtcccctagagagaggcattgtactgatgtataaatattatataatatatacatgagacatactgacagaatctgtaagctaataaaatgtaagaaaaggt

SEQ ID NO: 30914 - DNA, 995 bp, Macaca Mulatta
ggggaaatagacaagtaagatgtgtctatcctctaagacttccagtttggtagcttagtatagaaattctgtaatggaggtgcaggtgaaatgctgggggaacagaagtggggatgagatcatttatttttctcaggaaggattgtggaagacttcatagagtaagtggcattggagatgactttgaggtgaaggaggacaaagaaggaaaagagataaggcatgaagcgatgaaaccaggcagaagaaagtgtgcagtgtgtcctgggacaaagaattttctgctactgttgaataatggagagtaaagctggcttgttgtgaggaaagctcatataaatttggattttattccacaactagtaagataccaatactgccattgaaacttggggaaaataactggagataccagtgcagctgtttaaaactgtagcaagggctgcaatcttgtagagattttaaagagaagttttaaagtttctaatgcctctttttgataaatacaagttttataaatcttgccctgggatcctgattcccctttagtcaagaagatttgtcagacttcaccttctataatgagaaaacacagttataagaacagtcagtttttataattttccaaattaaaaaattgcactatgattttgaataagcatttccaattatattacccatcttgcatgctataggtgggagtataattggcacaacctttaggaatgtagttttctcgggtttattgaaactgtttgaaccttttggcctactaagttcatttctagggaactgcctaatggggataatctgacaagtgtacacaagcaaattcattgcacctttgttctttaatacttaaactcaaatgtcctgtcaataagggatggtttaataaatggttcctttatgcaatttgtttcctagtattcatttaagtgagttgagaatgtcctggattattaggggcaaaatttccaaactcttactccttt

SEQ ID NO: 30915 - DNA, 1024 bp, Macaca Mulatta
gggcacactctattgtacaagccacaaggacttctttgcccacagtgggcccatcaggactctatagtccatcaaataatcgaggtcctatacagatgaaaattccaatttctgcatttagtacttcgtctcctgcagaacagaacagcaataccaccccaagaattgaaaaccagacgaacaaaacaatagatgcttctgtcagtaagaaagcagctgatagcacatcacagagtggaaaagccactggcagtgattcaggtggtgtcattgatctcacaatggatgatgaagagagtggagcttcacaagaccccaaaaagctaaatcacactcccgtatcaaccatgagttcttctcagcctgtgtcacgaccattgcaacccatacaaccagcaccacctcttcaaccatctggggtgccaacaagtggaccatctcagaccaccatacacttactacctacagctccaactaccgtgaatgtaacacatcgtccagtaactcaggtgaccacaagactccctgtaccaagagctcctgcaaaccaccaggtggtttatacaactcttcctgcaccaccagctcaggctcccttgcgaaggaactgttatgcaggctccctgctgttcggcaggtcaatccccaaaatagtggttacaggttcgagtgccctcaaaccaacccacgtatgttgtaaacaatggactaaccctgggatccacaggacctcagctcacagtgcatcaccgaccaccacaagtgcatactgagcccgcacgccctgtgcacccagcacctcttacagaagctccacaccacagcgtgtgcccccagaagctgccagcacatctctgcctcagaagccacacttgaagttagcacgaagttcagaatccaaattgccataatactggtcattggattgtcccggggagggtggattgaaaagctggtgccccctggtttgaaaagcctacccatcctcctaatgcctttaccaatggaggggaaaacttaaggg

SEQ ID NO: 30916 - DNA, 1617 bp, Macaca Mulatta
  misc_feature (1)...(1617): n = A,T,C or G
gttttcaattatagaacataaccatgaaaggaaacatgcaaacgaccagacagtcatcttttcagatgaaaaccagatggacctgacatcaagtcatactgtaatgattaccaaaggcctttnnnnnnnnnnnnnnnnnnnnnnnnnnnnnnnnnnnnnnnnnnnnnnnnnnnnnnnnnnnnnnnnnnnnnnnnnnnnnnnnnnnnnnnnnnnnnnnnnnnnnnnnnnnnnnnnnnnnnnnnnnnnnnnnnnnnnnnnnnnnnnnnnnnnnnnnnnnnnnnnnnnnnnnnnnnnnnnnnnnnnnnnnnnnnnnnnnnnnnnnnnnnnnnnnnnnnnnnnnnnnnnnnnnnnnnnnnnnnnnnnnnnnnnnnnnnnnnnnnnnnnnnnnnnnnnnnnnnnnnnnnnnnnnnnnnnnnnnnnnnnnnnnnnnnnnnnnnnnnnnnnnnnnnnnnnnnnnnnnnnnnnnnnnnnnnnnnnnnnnnnnnnnnnnnnnnnnnnnnnnnnnnnnnnnnnnnnnnnnnnnnnnnnnnnnnnnnnnnnnnnnnnnnnnnnnnnnnnnnnnnnnnnnnnnnnnnnnnnnnnnnnnnnnnnnnnnnnnnnnnnnnnnnnnnnnnnnnnnnnnnnnnnnnnnnnnnnnnnnnnnnnnnnnnnnnnnnnnnnnnnnnnnnnnnnnnnnnnnnnnnnnnnnnnnnnnnnnnnnnnnnnnnnnnnnnnnnnnnnnnnnnnnnnnnnnnnnnnnnnnnnnnnnnnnnnnnnnnnnnnnnnnnnnnnnnnnnnnnnnnnnnnnnnnnnnnntatgggggcagaaactcacatagtctcacagacttgtaatcaagatgccagaatattagccatgaccccagaatctgtttgttctaatccatgtattcaaggttgtaagacagttttctattctagttgtaatgatgccatggaaatgaccaaatgtctctcaaatatgagagaggagaaaaatttgctaaagcatgacagtaattattctaaaatgtattgcaatccagatgctatgtcttgtctcacagagaaaactatttattccggagaggagaacatggacattaccaagagtcatacagttgcaatagataatcagatttttaaacaagatcaatcaaatgtgcaaatagcagctgtaccaacacctgaaaaagaaatgatgctccaaaatcgtatgaccacatcagaagatgggaaaatgaatgtaaattgtaactcacttcctcatatgtctaaggaaagaatacagcagagcctgtcaaatcctttatctatttcattgactgatagaaagactgaactcttagcaggtgaagatatggatttgactgaaagtcacacaagtaacttaggaagtcaagttcctcttgcaacttataatctagcaccggagaataccagtgaatctcactctcacaacaaaagctcttcagatgaatgtgaagaaatgaccaaaagtcataatgaaccatttcaacggccagacatgataaccaaaaacagcttaaccgatacctggaacaaagacaaagatcgggttttgaaggttttgccctaccttgataaagattctcctcagtcagctgatgtaatcag

SEQ ID NO: 30917 - DNA, 761 bp, Macaca Mulatta
tttgaaccaatcagtaatttgaaggtttttgtttgttctaaatgtaagagttcagactcacattctattaaaatttagccctaaaatgacaaacctcttaaagcctttttttcaaaagcccaccctattcttgctcagattaagagttgccaaaataccttctgaactacactgcattgttgtgctaagaacaccaagcactaaactgtgtaaggaccttcgtctttgagaagactgtagcctctgcagttaggagatgcagacacttgctcagtagttctcagatgtgtaaagcagaacagcctcccgaatggtgcgttgccattgaactcaccagtgatttagcggcccatgttcacgacataacattgtactgtaatggagtgagtgtaacagctcagctctttggatcagtctttttgatttcatagtgagttttctgaccagctcttgcggagattttgaacagaactcgtgtttcctctaatgaagaattctgtttagctgtgggtgtgccgggtggggtgtgtgtgatcaaaggacaaagacagtattttgacaaaatacgaagtggagatttacactacattgtacaaggaacaaaagtgtcacgggtaaaaactctaaaaggttaatttctgtcaaatgcagtagatgatgaaagaaaggttggtattatcaggaaatgttcttaagcttttcctttctcttacacctgccatccctccccaaattgggcatttaattcatctttaaactgg

SEQ ID NO: 30918 - DNA, 794 bp, Macaca Mulatta
gggactcggtcccaacgccgtagatgaaggcggcggcgatggcggcggggatagtggcttctcgcagactccgcgacctactgagccggcgattgacagcctccaactactcgggcctcagtattagccttcgcctcactggctcctctgcacaagaggaagccccagaccacagctatgagtcccttcgtgtgacatctgcgcagaaacacgttctgcatgtccagctcaaccggcccaacaagaggaatgccatgaacaaggccttctggagagagatggtagagtgcttcaacaagatttcgagagacgcctgtgacatccggtactgtgcccaggacgctttcttccaggtgaaggaggtggacgtgggtttggctgccgatgtaggaacactgcagcgcctgcccaaggtcatcgggaaccagagcctggtcaacgagctggccttcaccgcccgcaagatgatggctgatgaggccctgggctgtggcctggtcagccgggtgttcccagacaaggaggtcatgctcgatgctgccttagcgctggcggccgagatatccagcaagagccccgtggcggtgcagagcaccaaggtcaacctgctctactcccgcaaccattcggtgggccgagagcctcaactatggtggcgtccctggaacatgagccatgttgccagacccaggacatctacccagttcgggtccaagccgtgaactgagaaccaagggaactggaaaagcggcccctttctccaaagcttcttgaaaggcttctcggcatcccgt

SEQ ID NO: 30919 - DNA, 544 bp, Macaca Mulatta
  misc_feature (1)...(544): n = A,T,C or G
gaatatatgcccctccctccagaagannnnnnnnnnnnnnnnnnnnnnnnnnnnnnnnnnnnnnnnnnnnnnnnnnnnnnnnnnnnnnnnnnnnnnnnnnnnnnnnnnnnnnnnnnnnnnnnnnnnnnnnnnnnnnnnnnnnnnnnnnnnnnnnnnnnnnnnnnnnnnnnnnnnnnnnnnaggctgcagtactttgcacggggcctgcaagtttatatcagacaacttcgcttagctctccagggtaaaacgggtgaggccttaaaaacagaagannnnnnnnnnnnnnnnnnnnnnnnnnnnnnnnnnnnnnnnnnnnnnnnnnnnnnnnnnnnnnnnnnnnnnnnnnnnnnnnnnnnnnnnnnnngtaacactatcctggaaacctgtacaaaaggttgagnnnngcaaaagagagccagtgaagatacaacttcaggttcaccacccaagaaatcttcagcaggaccaaaaagagatgccaggcagatttataaccctcccagtgggaaatatagcagcaatttgggcaactttaattatg

SEQ ID NO: 30920 - DNA, 327 bp, Macaca Mulatta
ggcctggtggtgtatggcagccaggtgcagactgccttcgggctggacgccaaacccacccaggctgcgctgctgcgggccattagccaggccccctacctgggtggggtgggctcagccggcaccgccctgctgcacatctatgacaaagtgatgactgtccagaggggcgcccggcctggtgtccccaaagctgtggtggtgctcacaggcgggagaggcgcagaggacgcggctgtccctgcccagaagctgaggaacaacggcatctctgtcttggtcatgggcgtggggcctgtcctaagcgagggtctgcggaggcttgca

SEQ ID NO: 30921 - DNA, 722 bp, Macaca Mulatta
ctgtctcgttgtttggtcaatgcatgaaggtggagagtttggagcctggcagagagactagacagctctggaggaacaggctctggtgaggggaggggagcatggacttggcctccagagtgggacactggtcctaggaaccaggctgagctgagtggcctcaaggcccccactggatcagaccctcctgttggcagtgttcttagggtatgagttactgggaagaatcagagataaaaaccaacctaaatcattcctctggcacattatttctaaataagggtggtttgtggaaatcgtcctttttttatgccttggttgatggggaaagtaaagtcctggtgaggaatttacagttagaaacttctggaaaaactgaagttcctggaggaaagccaaaccgtgccaacacactagaggctggtttgggtcctgggaaaagtttggggtgaatgggttggaagtggggtatgaatacagctttgggatttaactcagtggttcttcattcctgctgggcattgctggtggctccttgtggggcctcaccacaggcctcctaatttgaaatttctcagtgaaacttaggcatttgtctctcttgatactcatgggttgccatggtggacagccactgatttaattcttggtctgaaatgtgcggttcctatacttttggttgctattgtaagattcgataaggttagtcttaaaaatccttt

SEQ ID NO: 30922 - DNA, 1072 bp, Macaca Mulatta
  misc_feature (1)...(1072): n = A,T,C or G
agggagcttctctcttgttgatgctgaaaacttaccttagtgaagatgtgtttcaacatgctgttgtcctttacctgcataatcacagctatgcatccattcagagtgatgatctgtgggatagttttaatgaggnnnnnnnnnnnnnnnnnnnnnnnnnnnnnnnnnnnnnnnnnnnnnnnnnnnnnnnnnnnnnnnnnnnnnnnnnnnnnnnnnnnnnnnnnnnnnnnnnnnnnnnnnnnnnnnnnnnnnnnnnnnnnnnnnnnnnnnnnnnnnnnnnnnnnnnnnnnnnnnnnnnnnnnnnnnnnnnnnnnnnnnnnnnnnnnnnnnnnnnnnnnnnnnnnnnnnnnnnnnnnnnnnnnnnnnnnnnnnnnnnnnnnnnnnnnnnnnnnnnnnnnnnnnnnnnnnnnnnnnnnnnnnnnnnnnnnnnnnnnnnnnnnnnnnnnnnnnnnnnnnnnnnnnnnnnnnnnnnnnnnnnnnnnnnnnnnnnnnnnnnnnnnnnnnnnnnnnnnnnnnnnnnnnnnnnnnnnnnnnnnnnnnnnnnnnnnnnnnnnnnnnnnnnnnnnnnnnnnnnnnnnnnnnnnnnnnnnnnnnnnnnnnnnnnnnnnnnnnnnnnnnnnnnnnnnnnnnnnnnnnnnnnnnnnnnnnnnnnnnnnnnnnnnnnnnnnnnnnnnnnnnnnnnnnnnnnnnnnnnnnnnnnnnnnnnnnnnnnnnnnnnnnnnnnnnnnnnnnnnnnnnnnnnnnnnnnnnnnnnnnnnnnnnnnnnnnnnnnnnnnnnnnnnnnnnnnnnnnnnnnnnnnnnnnnnnnnnnnnnnnnnnnnnnnnnnnnnnnnnnnnnnnnnnnnnnnnnnnnnnnnnnnnnnnnnnnnnnnnnnnnnnnnnnnnnnnnnnnnnnnnnnnnnnnnnnagcctgcctactgacgtcatgacaactgtgttcaaagttggagcaaaaactgacaaaggctggtctttccttttgggcaaatacatttctataggctctgaagcagagaagaacaaaatactagaagcacttgccagctcagaggatgtgcggaagctttactgg

SEQ ID NO: 30923 - DNA, 622 bp, Macaca Mulatta
  misc_feature (1)...(622): n = A,T,C or G
ntcctcacatccccttcccttcttatggagacacaaagctgagcacctgtctattgacagctttcggcttagacagcctctcagactaggccaactgctcacaatcctgctgaccctctttggcacctatgatgttgtaaaggcaatgcggtactcatgtcagcagcacacatactataactggcacaacacagaggtcagcatgggccccgtgcacagatgacatataaattcatgaagtgttctacatatatatgtgtatatatatatgttctccatatatatatgtgtatatatatttttatataggtatatataaatatnnnnnnnnnnnnnnnnnnctgggtcttgctctgtcattnnnnnnnnnnnnnnnnnnnnntatcacggcttactgcagcctcgacctcttgagctcaagtgatcctcctgcttcagcctcccaagcagctggaactgcaggtgtgcaccaccacatctggcaaatttctgtaccctttgtagagatgaggtttcaccatgttgcccaannnnnnnnnnnnnnnnnnngnnnnnnnnnnnnnnnnnnnnnnnnannnnnnnnnnnnnnnnnnnnnnnngtgagtcactgtgcccagctccc

SEQ ID NO: 30924 - DNA, 404 bp, Macaca Mulatta
ggagcctgcagagggcgctgctgacctgagctcaggacctcagagcaagaacagaagagcccgcccttccttcgcccgctaacaccaactcctctagaactcggtggtaatgactgggaggtctattcctgccgggaggaacctcagttgggtaaggtgtacatacctgtacagttttggtcatctgcggtaagttctatggtatttattggcatgtccaatttgcttgcacttttccacatcagaccttccactaaagggtaccaattcaatacaaaagaggaaagaagaacctctcagtgcttttccaacgaatgtaaagtgggtttaaaagatccctgcatagatcgttttggatggctgacgttcttgacaagtcagggcaagtgtttagaatcttagca

SEQ ID NO: 30925 - DNA, 608 bp, Macaca Mulatta
  misc_feature (1)...(608): n = A,T,C or G
atattggttgagtgcttccagtagcaggccttaagttgggtcccaataaggaaaacagtcatcgactcctccatccatccatccactgccttcatcaagcacttatgtccccatccaggtcccacaccagtctcccccaaaacctgaccctctgaggctatggcccagcagaggagagggatggtgtggatggccattatcatcttgagagtaggggaacagagggtctccctgggctgggggcttccccactggggacagggtgtgttccaagacccctttgcacaataacctgaaatgctgaggggctcagaccccttggacagggataaggctggcatgtgaaggctgggagccgccggccatgcccccatggacctaccctccgggcagagccttgtgccgccccggaaggtggcacagccctgagtccctcacactgttctctgctcctccagaaaatgcagctgtgacctgttgctgggagcggcgacagggagtccctgcaagagcaatanacttccttctcccggggctgcctggatccttgatttgcgcggcctctgctgcttcccagctctctggggctgcccctttccacactatgc

SEQ ID NO: 30926 - DNA, 555 bp, Macaca Mulatta
gtgtcgattttatatcagtcactgagacttttttttaagtttttatttattattaagacaactttgccaaaaaaaatcccctaagcacaactatttacatttctttatagcctcttctgatctctaacacatatatgcagtttaactgttactgtcatagtaactgatcttttgtctaaggatttttacctgaaaagcacaatgcattaagagtctcttgaaaatcatctttcagatctttttacagaatgaatttatgcactgcaacaaacacaaatgtatgcctgaggttggtttttgcagaaaatagtctccgcttctaaaaacttctatgtctagtcttccataggaaatcctcactgtttaaccatgtgaggagcctaagtcattaaacggatcatgtctgtacattgtgtaatgaatgaaaagcacataaatgtaatctactttgaacttagtagaaattatgtgtggaggctatactgacttacccatctcaagtcctgtgtgtgcacatgtgcgcaagtgcacatacgtgtatgtatgtgtgtataa

SEQ ID NO: 30927 - DNA, 657 bp, Macaca Mulatta
tgttatggttatacaaacagcataatgtttttctttctctttgtgattgcttgaataggatatcaagccaatgagagatcaaattgtcagagtgaagagatatgaaaaagtcccactaatcctagtaggaaataaagtggatctggaaccagaaagagaggttatgtcttcagaaggcagagctctggctcaagaatggggctgtcctttcatggagacatcggcaaaaagtaaatcaatggtggatgaactttttgctgagatcgtcaggcaaatgaactattcatccctgcccgagaagcaagatcagtgttgtacaacttgcgtcgtccagtaaaaaagataacctcaatcatggccataccgagcaggttagtttttgatggaactgtgtgaatcaggtagtgttttgttttttgatcaagtataacaaaaagctggttggtgttaatacacatggcactgtcttaaatttctttatttttaaaataacattttccatcacacaaaatagtcaacattcaatgaagaaaatttttttaaatgcagataagcaaagcgtaggtaaaaaattgcttatattcccatcaccaagattttaagtgagttattgttcttccttctctgctttattggtgacaattctttgggttgagt

SEQ ID NO: 30928 - DNA, 146 bp, Macaca Mulatta
aggacaaatcgatggccaggagatcactgccactgccgtgctggccccctggcctaggccaccacccaggagatttagccctcccaggagaatgttgccaccaccgcccatgtggcgcaggtctccgccacggatgaggagaaggt

SEQ ID NO: 30929 - DNA, 400 bp, Macaca Mulatta
actcatattttctttgtcctgctcatccaggagctctctctacatctccagatctcagaaataataagctattttaattaattccaagtgttcaactttctctttttatgtatatttggattgctttctcttaattcttaaaaattattattcttcagaacttgaaagaaaaacttgccccaacctgtgtccaaatccacaaaagcatgaaagacttgaccagaaaatactttgaagaaactggaagattttattataccactcccagtagctacttgcaatttatggaaacatttgcacacattttgagggcgcgagaggaagagatgcaaacaaagaggtaagactttgagaacaaatcaaaagtatattttatattggtgtttttgtttgcgaaaag

SEQ ID NO: 30930 - DNA, 194 bp, Macaca Mulatta
  misc_feature (1)...(194): n = A,T,C or G
ggtctatactcgctatgggaagtgttacaccttcaacgcggacccgcggagctcgctgcccagccgggcagggggcatgggcagtggcctggagatcatgctggacatccagcaggaggagtacctacccatctggagggagacaanatgagacgtcgtttgaggcaggtattcgggtgcagatccacagccag

SEQ ID NO: 30931 - DNA, 175 bp, Macaca Mulatta
ggaattcggctgcgccaagaccctgtacatctcagatgcagacaagaggaagcacttccggctggtgctgcggctggtgctgcgcgggggccgggaactgggaaccttccacagccgcctcatcaaggtcatctcgaagccctcgcagaagaagcagtcgctcaaaaacaccgat

SEQ ID NO: 30932 - DNA, 149 bp, Macaca Mulatta
gattgacaaatctccagccactcccttctgaggagagaggatcctggtcccccagctcactttgatgctgagtataggaagggtgtgattgtgcatgttggaagcaggagttctggggcagagtggaattgttgtgcttaataaaggag

SEQ ID NO: 30933 - DNA, 403 bp, Macaca Mulatta
  misc_feature (1)...(403): n = A,T,C or G
agggtttgaacttcagtggtgctgaatctttctcgtttggaccttcgatacattaacttcaaaatggccaatttaagccgctgcaatcttgcacatgcaaatctttgctgtgcaaatcttgaacgagctgatcttttctggatcagtgcttgantgtgcaaatctccagggagtcaagatgctctgttctaatgcagaaggagcatccctgaaactgtgtaattttgaggatccttctggtcttaaagccaatttagaaggtgnnnnnaggtgctaatctgaaaggtgtggatatggaaggaagtcagatgacaggaattaacctgagagtggctaccttaaaaaatgcaaagttgaagaactgtaacctcagaggagcaactctggcaggaactgatttaga

SEQ ID NO: 30934 - DNA, 3621 bp, Macaca Mulatta
  misc_feature (1)...(3621): n = A,T,C or G
ctggagagtaaaaagaaactggaggaaagagtccctctgcctagcattgcttcccccaggctcccagaaatctcaggtcagagggcacagacaacctctggagctcttgtctggtgggaccatgaactggcagcagctgtggctgggcttcctactccccatgacagtctcaggtcgggtcctggggcttgcagagnnnnnnnnnnnnnntacctgtcgcaatatgggtacctacagaagcctctagaaggatctaataannnnnnnnnnnnnnnnnnnnnnnnnnnnnnagggagagtcctggcccatgccgacatcccagagctgggcagtgtgcacttcgacgaagacgagttctggactgaggggacctaccgcggggtgaacctgcgcatcattgcagcccatgaagtgggccatgccctggggctggggcactcccgatattcccaggccctcatggccccagtctaccagggctaccagcccnnnnnnnnnnnnnnnnnnnnnnnnnnnnnnnnnnnnnnnnnnnnnnngcaagaagagtccagtgataaaggatgaggaagaagaagagacagagctgcccactgtgtccccagtgcccacagaacccagtcccatgccagacccctgcagtggtgaactggatgccatgatgctgggtgaggtccttcccctccaggctgttggcaggcagtgggggcagcctgctgatcctgaggcctggacatatgggagtgacatgggacttcagcatgagcaatggaggttagatcccaggcattaatgaccatggaaggagacatgtgacatggggagggagagttcagagccaaannnnnnnnnnnnnnnnnnnnnnnnnnnnnnnnnnnnnnnnnnnnnnnnnnnnnnnnnnnnnnnnnnnnnnnnnnnnnnnnnnnnnnnnnnnnnnnnnnnnnnnnnnnnnnnnnnnnnnnnnnnnnnnnnnnnnnnnnnnnnnnnnnnnnnnnnnnnnnnnnnnnnnnnnnnnnnnnnnnnnnnnnnnnnnnnnnnnnnnnnnnnnnnnnnnnnnnnnnnnnnnnnnnnnnnnnnnnnnnnnnnnnnnnnnnnnnnnnnnnnnnnnnnnnnnnnnnnnnnnnnnnnnnnnnnnnnnnnnnnnnnnnnnnnnnnnnnnnnnnnnnnnnnnnnnnnnnnnnnnnnnnnnnnnnnnnnnnnnnnnnnnnnnnnnnnnnnnnnnnnnnnnnnnnnnnnnnnnnnnnnnnnnnnnnnnnnnnnnnnnnnnnnnnnnnnnnnnnnnnnnnnnnnnnnnnnnnnnnnnnnnnnnnnnnnnnnnnnnnnnnnnnnnnnnnnnnnnnnnnnnnnnnnnnnnnnnnnnnnnnnnnnnnnnnnnnnnnnnnnnnnnnnnnnnnnnnnnnnnnnnnnnnnnnnnnnnnnnnnnnnnnnnnnnnnnnnnnnnnnnnnnnnnnnnnnnnnnnnnnnnnnnnnnnnnnnnnnnnnnnnnnnnnnnnnnnnnnnnnnnnnnnnnnnnnnnnnnnnnnnnnnnnnnnnnnnnnnnnnnnnnnnnnnnnnnnnnnnnnnnnnnnnnnnnntcctcacatgctctcaggagacaaggtgtggcgctacgttaatttcaagatgtctcctggcttccccaagaagctgaatagggtagaacctaacctggatgcagctttctattggcctctcaaccaaaaggtgttcctctttaaggtataaagttcaaagcaagggcaaatcccttcttaggaggggtgggctaccttatactgagaatcgaagcttgtgcttgaagggagatgttctgcagctgcactgggctgggggtagacctctgggggtcctaagctttctcctcttcctctccccacccatcccatatccagggctctgggtactggcagtgggacgagctggcccgaactgacttcagcagctaccccaaaccaatcaagggtttgtttacgggagtgccaaaccagccttcagctgctacgagttggcaagatggccgagtcttcttcttcaaaggcaaagtctactggcgcctcaaccagcagcttcgagtagagaaaggctatcccagaaatattgcccacaactggatgcactgtcgtccccagactgtagacactaccccatcaggtggggataccactccttcaggtatgggcacaaccttggataccactctctcagccacagataccacatttgaatactgactgctcaaacacagatacaatcttggacattacgccctcaggctccaccacccaccctttcattccctcccagaggcctannnnnnnnnnnnnnnnnnnnnnnnnnnnnnnnnnnnnnnnnnnnnnnnnnnnnnnnnnnnnnnnnnnnnnnnnnnnnnnnnnnnnnnnnnnnnnnnnnnnnnnnnnnnnnnnnnnnnnnnnnnnnnnnnnnnnnnnnnnnnnnnnnnnnnnnnnnnnnnnnnnnnnnnnnnnnnnnnnnnnnnnnnnnnnnnnnnnnnnnnnnnnnnnnnnnnnnnnnnnnnnnnnnnnnnnnnnnnnnnnnnnnnnnnnnnnnnnnnnnnnnnnnnnnnnnnnnnnnnnnnnnnnnnnnnnnnnnnnnnnnnnnnnnnnnnnnnnnnnnnnnnnnnnnnnnnnnnnnnnnnnnnnnnnnnnnnnnnnnnnnnnnnnnnnnnnnnnnnnnnnnnnnnnnnnnnnnnnnnnnnnnnnnnnnnnnnnnnnnnnnnnnnnnnnnnnnnnnnnnnnnnnnnnnnnnnnnnnnnnnnnnnnnnnnnnnnnnnnnnnnnnnnnnnnnnnnnnnnnnnnnnnnnnnnnnnnnnnnnnnnnnnnnnnnnnnnnnnnnnnnnnnnnnnnnnnnnnnnnnnnnntgtataactcttacagtagtctatatgatacaggtatctctattagatctttaggggacagaggattngtcaagatggttagctctttgttttggggtgcagagaaagaaaagagcaccaacagcagaggctggactcctggttcagtatgtaatgccatnttattcacatgctcccatgttctccctccctcccattgtagccttgctgcccaggggagggatatgtcttcctttatgcatctgggaaaccaggaacagacctggggcaggagagtcagagggggaagagttagagtgggttagtggctggaacaaagttctggttaaggaggaaattagtgccacccacagtaagaagcagagaaagcacttgtctcctatgcagccctgaagaccaggctcctttgggcaaaaggcaagactctggcaggtgggccaatgctctctccttggagcaagaagccagcttttggggaaggcaggtcctgaggcaggcactgccctgtggtcttccccaggttgaggagaaaagtggaagcaccatggaagatagtgctcctagctgaggtaggagnnnnnnnnnnnnnnnnnnnngtttaagcctatggggcccagggggaaggtcaaagaaacccaactaccccctaatgaagtgcctggaggtgggggtatcttggagctcctcagagcccttgttcccatcaaaaagctatcaaatgccttagaagctccctgatcctacaaaac

SEQ ID NO: 30935 - DNA, 801 bp, Macaca Mulatta
  misc_feature (1)...(801): n = A,T,C or G
gatgttctttggcaaaaacaaggtaatgatggtggccttgggtcgaagcccatctgatgagtacaaagacaacctgcaccaggtnaggtcagcaaaaggttgaggggtgaagtgggtctcctgttcaccaactgcacaaaggaggaggtgaatgagtnnnnnnnnnnnnnnnnnnnnnnnnnnnnnnnnnnnnnnnnnnnnnnnnnnnnnnnnnnnnnnnnnnnnnnnnnnnnnnnnnnnnnnnnnnnnnnnnnnnnnnnnnnnnnnnnnnnnnnnnnnnnnnnnnnnnnnnnnnnnnnnnnnnnnnnnnnnnnnnnnnnnnnnnnnnnnnnnnnnnnnnnnnnnnnnnnnnnnnnnnnnnnnnnnnnnnnnnnnnnnnnnnnnnnnnnnnnnnnnnnnnnnnnnnnnnnnnnnnnnnnnnnnnnnnnnnnnnnnnnnnnnnnnnnnnnnnnnnnnnnnnnnnnnnnnnnnnnnnnnnnnnnnnnnnnnnnnnnnnnnnnnnnnnnnnnnnnnnnnnnnnnnnnnnnnnnnnnnnnnnnnnnnnnnnnnnnnnnnnnnnnnnnnnnnnnnnnnnnnnnnnnnnnnnnnnnnnnnnnnnnnnnnnnnnnnnnnnnnnnnnnnntttatttgtctgtagacagggaatgtgatgggcactgacctcctataaagaataaaactctgggccgggcgcagtggctcaagcctgtaatcccagcactttcggaggccgagacaggtggatcacgaggtcaggagaccgagaccatcctggctaacacggtgaaaccccatctctac

SEQ ID NO: 30936 - DNA, 776 bp, Macaca Mulatta
  misc_feature (1)...(776): n = A,T,C or G
aggccacaggcctcctgggagtgaccagggttcagcgggacaacatggggttctcatctggcctggagctgctcactcttccccatggatgtcgcttgaggttggaactgctagagaggnaggcatgagacactggcgctggccggggcactggcagtgctgggctgctcggggccgctggaggagcgcgcagccgcactgaggggcctggtagagctggcgctggcgctgcggccaggggcagcgggggacctgcccgggctggctgcggtcatgggcgccctgctcatgccccaggtnnnnnnnnnnnnnnnnnnnnnnnnnnnnnnnnnnnnnnnnnnnnnnnnnnnnnnnnnnnnnnnnnnnnnnnnnnnnnnnnnnnnnnnnnnnnnnnnnnnnnnnnnnnnnnnnnnnnnnnnnnnnnnnnnnnnnnnnnnnnnnnnnnnnnnnnnnnnnnnnnnnnnnnnnnnnnnnnnnnnnnnnnnnnnnnnnnnnnnnnnnnnnnnnnnnnnnnnnnnnnnnnnnnnnnnnnnnnnnnnnnnnnnnnnnnnnnnnnnnnnnnnnnnnnnnnnnnnnnnnnnnnnnnnnnnnnnaggattccggcctaacccagagctgagggaggccctgaccaccggcttcctgcggaggctgctctggggtagccggggcgcgggagctccgcgcgctgaacgctttgagaagttccagcgcgtcctcggcgtcctgtcacagcgcctggagcaagacagctgagagcgcagacccctttcttc

SEQ ID NO: 30937 - DNA, 1398 bp, Macaca Mulatta
gggagttctggagctgttgtagcctcggttgcccggccggggacccgagccgaacagttatcgtcagaatgtcgggcaaagaccgaattgaaatctttccctcgagaatggcacagactatcatgaaggctcgtttaaagggagcacagacaggtcgaaacctcctgaagaaaaaatctgatgccttaactcttcgatttcgacagatcctaaagaagataatagagactaaaatgttgatgggcgaagtgatgagagaagctgccttttcactagccgaagccaagttcacagcaggtgacttcagcactacagttatccaaaatgtaaataaagcccaagtgaagattcgagcgaagaaagataatgtagcaggtgttactttgccagtatttgaacattaccatgaaggaactgacagttatgaactgactggtttagccagaggtggggaacagttggctaaattaaagaggaattatgccaaagcagtggaactactggtggaactagcttcgctgcagacttcttttgttactttggatgaagctattaagataaccaacaggcgtgtaaatgccattgaacatgtcatcattccccggtattgaacgtactcttgcttatatcatcacagagctggatgagagagagcgagaagagttctataggtttaaagaaaatacaggagaagaaaaagattctaaaggaaaaatctgagaaggatttggaacaaaggagagcagctggagaggtgctggagcctgctaatcttctagctcgaagagaaggatgaggatcttctgtttgaataatctttcctgttctggttcttttagaaaccctaacactggcttcatcttaattcatagtgtgtaggtttgatttgtctggctatttattttttgggctaagaatttcactaggttgtaacatttacctggatgtctgtttatgggattacttttgcagaatcataatttagcaaccatttatcatggatgaaagagatctgtaaaacctgcccaggaacttaaagaatttactctgaagtgttatcctactccatttacatctgtgttacacgtgctgtgcttaccaagcatattaggaaatacctcttaggaaggattagtggtctcagggcaattaccgggggagcggctttcattcctaccctcttgccaacctgggggctgttggcctgagattgcgggcaggattgcggggggtaaggaggggggacttccccaagactttggtggaaaaaggtggccctttttcgctgggaatggaaaggggcccccggggcgttgtccagggccgagggaaagccgatgatggggcccaccgtggagaagcgggagctgtggaaacggggaagcggggaaaagaaat

SEQ ID NO: 30938 - DNA, 474 bp, Macaca Mulatta
  misc_feature (1)...(474): n = A,T,C or G
aactgcctagaaatcttgtgtagacacggagggcttgagccagaaaggagagacaagtgcaatcggactgtgcatgatgttgccactgatgactgcaagcatttgctggagaatctgagtgagtgatgttcagagcttattgtttatctttcccctctgctgctggggcctctggtacaatgggaaaaactatttacagtttttgcatctcctttttaacctttttggagccccaactatggcaaaaatactgacnnnccttgacattttatttcattttttggaactaggaaatgtgccatggtcagtgggtcagagcttcacgcagtccccgtgggactttatgaggaagaataaggcagagcacatcactgtgcttttgtcaggtnnnncaggtcctcaagaaggctgcctcagtagtgtgacttatgcctccatgatccctctccagatgatgcagaactacctcaggct

SEQ ID NO: 30939 - DNA, 620 bp, Macaca Mulatta
ggactagctacaccaacatatgcactttttacatttagaaacactgtgattagaccacagaacaataaatatgtgccatcagaccaaaaaaaagtagagaaaggagctgagctccactctcactcgatgctatttacagaggagatctgtaaggtcttcataaaagaccttgaatggtgcctgggatggcagagcccctgggtcctactccatcctccagcctttgtcctcgtcctgggctcctctcccggtctgtaaactgggcgcaaggactgtacaagcggagtacaactaccctcctgcctaatgacagggcaactgctgggtttggtcctgtgtagatgatacccaagtattcccagagtctcattcatccagctcctcttcagacagaaggtccccacggtcagacagctggtctgcattgctggtactggttgcatcatcctcatcctcagagctggcttcacaggcagtgtggaagagctgcatgagttctcgaaaacggtgggagacctaagaaaggcgaagggctgtattcgctgatccttagtaacatgttaacatttatgaagcactatatattgatttgcaaaatcttttatgtattcaacacagca

SEQ ID NO: 30940 - DNA, 395 bp, Macaca Mulatta
tctacggcagggaatttgggctgtgaacttccgtgtgatgtaaaagtaggcacctggcgggggagtctgggaacacaggtcccgcctgttttctgttctcccgagaaaaacccacattctgttctgccctttgcaacatcttcagtggggggacaagtgggaacatttttcttgggattttattttgtctggggatccagctaatgggtttgcctggaagcttcaaggttaatgatctgcatttagaaagagcaccgcagccatggcaggtggtgtctctgtgcgttatttgtatcaggtgttgaatgtggcagttgtcactgtggccaccctgaccccagagcaagcgtacgagtgggagataaacgctttaatacaacacaaaacgtggtccc

SEQ ID NO: 30941 - DNA, 483 bp, Macaca Mulatta
gggcaggacctggaaagagcacatcaccagggtgacatgtggtcgcaagcccagctctgtccctgagcagcgcgatctctgcttggggtctctcctgattgtctctgcaaggtgcagggagagaactgctgctccctttgaatgctttcttccatgtgtggaccaatggcccttcccttccttccccataacacagcccgtggaaatattgagatatgccacgccgtgactttccaagtgggacatcaaagaactgggcttctaccgtgagcatcatcttgctgtggacctcaaataagtcaccccatcatttatgcctcaccttccttgtctgtaaaatgagaggagagccagtcaccgtggcacacacctgtagtcccagttactcaggaggctgaggcaggaggatcgcttgagcccaggaggcagaggttgcagtgaaccgagatcgtgccactgcactccagcttgggctacagagtg

SEQ ID NO: 30942 - DNA, 479 bp, Macaca Mulatta
ctgcgtatgtaactgtcatgagatcctatttagtgtgatcctggctagaatgataattaaaagtatttaatttgaagcaacctttgaatgttcacaatagtagaaaatgatgtgaaatttctgttgagttcctagttttctcatcatttgttttctttaactgggttgaatggagtagatggaaatatttatggtttaggtgacacttaggtgtttcctaagaatgcaaactgccttttgcacacgaaggctgggaataaaattctgggtgttctcctagtatcataagggagtttagctttcagagagaaacagcaggattgcctttgaccccatttcagaagattggccttcagtaaaggtggacatttttgagatttttataataaagaatttaattgctctgcatttgtcaagttcagttcacttgaaagcctgcctgactgtggaaaagatggagctcaagaatggagttgatg

SEQ ID NO: 30943 - DNA, 520 bp, Macaca Mulatta
tattatgactttggtagttgggggagtgggaaaggccatgggtttaattttttgccaaatgatttttctaaaatgtcctcctcctctctctttccaggtggcagatatctacctagcatctcagtacacatcctatgccataagtggccccacagtacaaggtggcctccctgtttttcactggaaccgtttcaacaaaactctacatcagggcatgccagaggtctacaactttgattttattaccatgaaaccaattttgaaacgtgacatgaaatgaaggagggagatgacagactagaaggctgtaaataagaaaccaaaggcactattttagctatgtttttcccatcagaattatgcaataaaatatattaaattcatttgtcactttcgttttccactgactttgttgtttttacagcaagcacttgctataaggtagagcactgtagaagaaatgttatatatataaataacactaagcttcagtgtacatgctaatacacaagagggtatg

SEQ ID NO: 30944 - DNA, 328 bp, Macaca Mulatta
gaggcgcctccgccccgtagtgaccgcctggtgccgccgcccccaggatgaagggcggcgaggaggacgcgtgcgagcaggccccgctgaacccggagggcgagagccctgcaggctcggccacgtaccgggagttcgtgcaccgcggctacctggacctcatgggggccagtcagcactcgctgcgggcgctcagctggcgccgcctctacctcagccgggccaagctcaaagcttccagccgcacgtccgccctgctctcgggcttcgccatggtgaggggccgggagggggcacaaacggtggggcagagcacgtggggggcaca

SEQ ID NO: 30945 - DNA, 1671 bp, Macaca Mulatta
  misc_feature (1)...(1671): n = A,T,C or G
cggggcgcgccgagccgaacccagccacgcggcgccagcgaggcgnnnnnnnnnnnnnnnnnnnnnnnnnnnnnnnnnnnnnnnnnnnnnnnnnnnnnnnnnnnnnnnnnnnnnnnnnnnnnnnnnnnnnnnnnnnnnnnnnnnnnnnnnnnnnnnnnnnnnnnnnnnnnnnnnnnnnnnnnnnnnnnnnnnnnnnnnnnnnnnnnnnnnnnnnnnnnnnnnnnnnnnnnnnnnnnnnnnnnnnnnnnnnnnnnnnnnnnnnnnnnnnnnnnnnnnnnnnnnnnnnnnnnnnnnnnnnnnnnnnnnnnnnnnnnnnnnnnnnnnnnnnnnnnnnnnnnnnnnnnnnnnnnnnnnnnnnnnnnnnnnnnnnnnnnnnnnnnnnnnnnnnnnnnnnnnnnnnnnnnnnnnnnnnnnnnnnnnnnnnnnnnnnnnnnnnnnnnnnnnnnnnnnnnnnnnnnnnnnnnnnnncagagccttcggggagacctcggggatttctttgttggctgcatcttcatggcagaactgagcactccatttgtgtcactgggcagggttctgattcaggcatgtatgaatgaaatnnnnnnnnnnnnnnnnnnnnnnnnnnnnnnnnnnnnnnnnnnnnnnnnnnnnnnnnnnnnnnnnnnnnnnnnnnnnnnnnnnnnnnnnnnnnnnnnnnnnnnnnnnnnnnnnnnnnnnnnnnnnnnnnnnnnnnnnnnnnnnnnnnnnnnnnnnnnnnnnnnnnnnnnnnnnnnnnnnnnnnnnnnnnnnnnnnnnnnnnnnnnnnnnnnnnnnnnnnnnnnnnnnnnnnnnnnnnnnnnnnnnnnnnnnnnnnnnnnnnnnnnnnnnnnnnnnnnnnntgctcctgggagtcgggcgccctttcaaccagctgcctcctccactcagcattccatggaccttattgtgccctgggtggcctcagacttttgggtattgataagcagatggatttgagtttttctaaagaatattcgtattacctccttcttctaacttgccctatttgcaaaagcacttttgtagtaacaactattgagtcctgtcagacctccacggacagcaaagtggttttaatgcaagcccaaggatcctttgggtcttatctcaagagctctgggaggtggaagcatggggtgtgatcggtggaccagggtgataagcgtctgtgcatctgcctgtccctatatcggcagctacctacctttccaaccactcagggcagtacccacggcactgggcccacagaagcaagnnnnnnnnnnnnnnnnnnagtaatgtcttcttgtgacattggcctgggacaatcactgtgggtaggtagtttttgatcgtttactagataacccattggttctttgcgtcatcctctcatccatgggtcagagttgannnnnnnnnnnnnnnnnnnnnnnnnnnnnnnnnnnnnnnnnnnnnnnnnnnnnnnnnnaggcaggaggcaaggatgggagcctgagtagatagtgtggccaaaaggccagcacaacctttgcaagctgacttggtaagtctgacagtgtcaaacttgtgagcttactgcagtcagtcacagatactgttctttttaacacactccttcatgcccagctttccccatatccacatgcagaggacatgctcataaaa

SEQ ID NO: 30946 - DNA, 111 bp, Macaca Mulatta
aacacgaagaaggagactcgctttcagtggttcttccagagggcagagctgccagatggtcagtatgacccagagacgggaacgggacttctctgcatcgaagaggcaagt

SEQ ID NO: 30947 - DNA, 704 bp, Macaca Mulatta
  misc_feature (1)...(704): n = A,T,C or G
aggctctagcaaggtgctgctgaggccacggacctcggaggaggtgtcccacatcctcagnnnnnnnnnnnnnnnnnnnnnnnnnnnnnnnnnnnnnnnnnnnnnnnnnnnnnnnnnnnnnnnnnnnnnnnnnnnnnnnnnnnnnnnnnnnnnnnnnnnnnnnnnnnnnnnnnnnnnnnnnnnnnnnnnnnnnnnnnnggaattctggtttgccaggcgggctgcgtcctggaggagctgagccactacgtggaggaacgggactttatcatgccactggacttaggagccaagggcagctgccacatcgggggaaacgtggcaaccaacgccgggggcctgcggtttcttcgatacggctcactgcatgggactgtcctgggcctggaagtggtnnnnnnnnnnnnnnnnnnnnnnnnnnnnnnnnnnnnnnnnnnnnnnnnnnnnnnnnnnnnnnnnnnnnnnnnnnnnnnnnnnnnnnnnnnnnnnnnnnnnnnnnnnnnnnnnnnnnnnnnnnnnnnnnnnnnnnnnnnnnnnnnnnnnnnnnnnnnnnnnnnnnngctgtccaggctttgctgaggttctgcagaccttcagcacctgcaaggggatgctgggcgagatcctgtctgcattcgagttcatggatgctgtgtgcatgcaactggtcgggcgttatctccacctggccagcccggtacaag

SEQ ID NO: 30948 - DNA, 819 bp, Macaca Mulatta
ggggctcgcgcctgaggaactgcggctgcggttccgagcgggctctggggctgtttccattgaatgaccaggaaggctctcggtgcaaagcgttcctgcagaattgcttccacgtaaagggaccttcgggaaatttcgctggacaccggctggcattgacaaacccagcgtccctgagccttgtgaggtttccaggcaggttgattgcgaggcaacatgtctgcttcggtgaaagaaagccttcagcttcagctactggagatggaaatgctgttttctatgtttcctaaccaaggagaagtaaaacttgaagatgtaaatgccctgacgaatataaagaggtatttggaaggcacaagggaggcgctgccgccaaaaatcgaatttgtaattacgctccagattgaggagcccaaggtgaaaattgatttgcaagtgaccatgcctcacagctacccctatgtagcattgcagctgtttggacggtcatctgaacttgacagacatcagcagctacttctcaacaaaggtctcacttcttacatagggacttttgatccaggtgagctctgcgtatgtgcagcaatccagtggctacaggacaacagtgcatcttatttcctgagcagaaagcttgtgtatgaaacatctacacaagcaaagccagtcaagaacacattccctcgaaatgtggatctacaggtcaccatatatatcagccaggacctaaggaaaaagatttttggatgttgggaaaaaggttagatgtgactgggattttgcatgacagggaaacccggttataatttgtggtggagg

SEQ ID NO: 30949 - DNA, 794 bp, Macaca Mulatta
gggaaggggccatgtccccgccggggccagtgctgctgtattgttggtgacaagattgtcctctttgggggtaccagtccatctcctgaggaaggcctgggagatgaatttgacctcatagatcattctgacttacacattttggactttagccctagtctgaagactctgtgcaaactggccgtgattcaatataacctagaccagtcctgtttgcctcatgacatcaggtgggagctgaatgccatgaccaccaacagcaatataagtcgccccatcgtctcctcccatgggtaggaggaagtttctgccacctcccctcctgagcctgctgtcaccttcactgcccctgcccatctgtcatccacctgcgcctttgacccctggacttggtatacctccatgtggagttgttgggcgagaggtgttctctgtgctgtgaattcagtggggagctgtagcggggtgggggccaggttcctccccccttgggccgagggccccttccccttggtgctctgtccccatccacctcctttcagctgctcctgggcctcagctctgcccagggccagccaggttctgttgggaagggaagggaatggggagaagggagaagcaagcagtgtctgagcctcaggagcttccccctccccctttgcctatcccgtccccctggcttgagccttgagccttgactgggagctgaaaggagttgcagctgtttggcatgagacctccttcttccccgtctttggggaaggcggggaaccaccaagataaatccccatcct

SEQ ID NO: 30950 - DNA, 392 bp, Macaca Mulatta
gatgcttatagaattttatgagtcaccagatccagaaagaagaaaaagatttcctgggaaaagtgttaattccaaattaagtatcaagaagactttaccatcaatgttgatcttaagtggtttgactgcaggcatgcttatgaccgatgctggaaggaagctgtatgtgaacacctggatatatggaaccctacttggctgcctgtgggttactattaaagcataaacaaatagctgtctccagacaatgggatgtgctacattgtctatttttggcggctgcacatgacatcaaattgtttcctgaatttaataaggagtgtaaataaagccttgttggttgaagattggataaaatagaatttgtgacgaaagctgagatacaatggtct

SEQ ID NO: 30951 - DNA, 107 bp, Macaca Mulatta
agccctcaccatctagaactctagtcattggagtcatcagtggaattgctgtttttgtcatcatcttgttcattggaattttgttcataatattaaggaagaggcag

SEQ ID NO: 30952 - DNA, 510 bp, Macaca Mulatta
cacttagaaaacaagactgatccaactgctttcattttttgacctgaatttattctgacttgagccaaattggaaagagaatcttttatatctcttttggcctcatacctcccctgaattgtccaaaagggaaccaggggcatttgtagcccaaaatgatggtcttcatgccctgagccagagccccatcctctgtcactgggcctgctcagccctgtcatgcgagaggctgcagggggaggaagagcgtcggctttcagttctcctgaggggtcctgttccacgggcaatgaccagaaacaccaaggccccagctgcccctgtgatttgggcaattaactgttttaagaatctgccccctcctgtgtgaggtcaggccaccatcacgcctcacagggtgaaggataaaggccactcccgcctggtttctctgccttcgaattgtcctcctccaactcagtcagcccaggaagcaccagtgtcatcctctgaaatactaatctgaccaca

SEQ ID NO: 30953 - DNA, 88 bp, Macaca Mulatta
aatgttgtgggacagctggctaaacagatgattgggtacaatctagcgacaaaacaaactccaaaagaaggtgtgaaagttaacaagg

SEQ ID NO: 30954 - DNA, 138 bp, Macaca Mulatta
ggtgagggtgctcggaaatccagcccaagaccaaggccatgacaataagcagttggtctggaggaggccacccagagtttgaacccagcgcaggcttcactcttcccaggaggccgcttcagccccaccattcaagcc

SEQ ID NO: 30955 - DNA, 159 bp, Macaca Mulatta
ggttataaacaacttgtgaaatgagtgatttggaagatgacgagacaccccagctttctgcccacgccttagcagctctccaggaattttatgctgagcaaaaacaacaaattgacctaggcgaggatgataaatataacattggaataatagaagaga

SEQ ID NO: 30956 - DNA, 768 bp, Macaca Mulatta
  misc_feature (1)...(768): n = A,T,C or G
gggggtattttgaggggagggtggaaggagtaaggaagtgctccttttacaagaatttcgatgcatgagtgtctgttgtagggttcggatgatctagtaaagtgttttagaacccctttttatcccatgcaccatttggtaaacataaaagtcacaattctgctaatgtcatttggaacttcaaaataaatatcttgtctaaaaacnnnnnnnnnnnnnnnnnnnnnnnnnnnnnnnnnnnnnnnnnnnnnnnnnnnnnnnnnnnnnnnnnnnnnnnnnnnnnnnnnnnnnnnnnnnnnnnnnnnnnnnntttgtggccccccccgccccnnnnnnnnnnnnnnnnnnnnnnnnnngggcccgggcccccatagggaaaggaaagggggcaaacggtttccccaagaaaaaccgggcccgagcaagggttgggtttttccccaaataaaaaccccccggggggaaccgagcgttttgaacgacccccgggggggtttctggggggtttttgggttttttccccaggggtcccgagaaacgcgtattttaaaataaagcccccccccttgcaaattatgagaaaaaatgggtggaaatcaataaaaaaattttccccccaacgggaaccccccccccagcccgccatatataaaaccctgaattcccccgaggggaaccccaccccctttgccccctttggggattaaatattttcgccctctggggaataacaggggggccaaaaaaaattgttctcaatattttggc

SEQ ID NO: 30957 - DNA, 1455 bp, Macaca Mulatta
  misc_feature (1)...(1455): n = A,T,C or G
gagaacttcgatggcccagaaggggagttccacttctcagtttcgcacgcagccggagcctccacagacttctctgcagcctctgctcccaaccagtcagcgcctccgcccctgggtcatgcccacagcgagggcccagctcctgcctacgtggccagtggaccctttagagaagccgggctccccggccaggctgcctcccctctgggcagggccaacgggatgctctttgcaaacgccagatactcattctctgccatgggctttcagcgaaggttcttccaccaggaccaatcccctgtggggggcctcacagctgaggacattgagaaggcccggcaggctaaggctcgccctgagaacaagcagcacaaacagacgnnnnnnnnnnnnnnnnnnnnnnnnnnnnnnnnnnnnnnnnnnnnnnnnnnnnnnnnnnnnnnnnnnnnnctggcagtgggtcttggctttggggcactggcagaggtcgccaagaagagcctgcgctccgaggacccctcagnnnnnnnnnnnnnnnnnnnnnnnnnnnnnnnnnnnnnnnnnnnnnnnnnnnnnnnnnnnnnnnnnnnnnnnnnnnnnnnnnnnnnnnnnnnnnnnnnnnnnnnnnnnnnnnnnnnnnnnnnnnnnnnnnnnnnnnnnnnnnnnnnnnnnnnnnnnnnnnnnnnnnnnnnnnnnnnnnnnnnnnnnnnnnnnnnnnnnnnnnnnnnnnnnnnnnnnnnnnnnnnnnnnnnnnnnnnnnnnnnnnnnnnnnnnnnnnnnnnnnnnnnnnnnnnnnnnnnnnnnnnnnnnnnnnnnnnnnnnnnnnnnnnnnnnnnnnnnnnnnnnnnnnnnnnnnnnnnnnnnnnnnnnnnnnnnnnnnnnnnnnnnnnnnnnnnnnnnnnnnnnnnnnnnnnnnnnnnnnnnnnnnnnnnnnnnnnnnnnnnnnnnnnnnnnnnnnnnnnnnnnnnnnnnnnnnnnnnnnnnnnnnnnnnnnnnnnnnnnnnnnnnnnnnnnnnnnnnnnnnnnnnnnnnnnnnnnnnnnnnncagggacctgctgaagggccacccattcttctatgtgcctgagatcgtggatgagctctgcagcccgcatgtgctgaccacagagcttgtgtccggcttccccctggaccaggccgaagggctcagccaggagattcggaacgannnnnnnnnnnnnnnnnnnnnnnnnnnnnnnnnnnnnnnnnnnnnnnnnnnnnnnnnnnnnnnnnnnnnnnnnnnnnnnnnnnnnnnnnnnnnnnnnnnnnnnnnnnnnnnnnnnnnnnnnnnnnnnnnnnnnnnnnnnnnnngacagatccttcaccgacctctacattcagncagatcatcagggctgctgccgacagggacagggagactgtgcgggcaaaatccatagagatgaagttcctcaccggctacgaggttaaggt

SEQ ID NO: 30958 - DNA, 96 bp, Macaca Mulatta
gcctacaaagagaagatgaaggagcttccgctggtttccttgttctgctcctgcttcctggccgatcccctgaataagtcttcctacaaatatgaa

SEQ ID NO: 30959 - DNA, 618 bp, Macaca Mulatta
acatatggtgatactattacatagaatatagttgaccatgttgattggatgacttcacctgaacaagtagccgactcagtgaaacgtttcagagatgcattttggccaaatggcattttagcagagactgttccatgcagagataaaagtattcgaatgagaacaagagtagcaggaaaaacgaaattacttgcaattatgccagatgaactgaagcacattattggggctgagacaacacggaaaggtattcttcgggtttttgaaatgtttcagcataaccaattaaataggagaatggtttatgtcttcttggaaggctttttagaaaccttatttccacagtataaattccgtgaacttttcaacaaactgcattcacggtcaaagcagatgcagaaatataaacagaaacttcaaactacgcaagcgccttctttacagaaaaggtgacactccactctatgaagctggtgttcattttgtccaggactaatggtatggacagatcttctggggcttaactcaaatactgttgtgtctgcaccagtcttttagtgtctcaaaatagattattaatacatccataagtctgagggacttctcattctcatctat

SEQ ID NO: 30960 - DNA, 599 bp, Macaca Mulatta
cacaggaccatcgcccccttggggaccacagcaggaagggacttgggagctctgggttctggggtgtggccccacacaaggagtctgccatcctaggggccactgaaaaagtggctggagtgaccccagccctcctctcacctccctcacagcctggttcaagaaaaccccgaggtggccgtggactgtgtgatatacctgagccagcacatcagcccagctgagcgggcacaggtcatccacctgctgtctaccatggacagcccggcctccacctgaccccggcctgccccgccattcccgggaccacagcaggaggaaccacccacacccaccatcggtacgccctcagcagaccttgaagacctgcttttaaaaaaagaaaatcctgggcacttctgcagggctgctggttccgagctgacacctgtctcaataaaaggcccaggagtgcctctcccaaacacaagcaacctcctctgcatagctgggaagtttcttttgttttgtctctgaagacagcatttttattgcatcactaaatctaatcaagctaaaacatccctgtttccttttgcaaaacagtgcctggcctgtgg

SEQ ID NO: 30961 - DNA, 516 bp, Macaca Mulatta
  misc_feature (1)...(516): n = A,T,C or G
ggagcctacagcaaacccatcctctcagtcctgccgagtcctcttgtgacctcaggagagagcgtgaccctgctgtgtcagtcacagagcccgatggacactttccttctgtttaaggagggggcagcccatcccctgccgcgtctgagatcacagcacggagctcagctgcactgggctgaattccccatgggtcctgtgacctcagtgcatggggggacctacaggtgcatcagctcacgcagcttctcccactacctgctgtcacgccccagtgaccccgtggagctcacagtctnnnnnnnnnnnnnnnnnnnnnnnnnnnnnnnnnnnnnnnnnnnnnnnnnnnnnnnnnnnnnnnnnnnnnnnnnnnnnnnnnnnnnnnnnnnnnnnnnnnnnnnnggtctgagaaggcactgggaggtactgatcggtgtcttggtggtctccatcctgcttctctccctcgtcttctttctcctcctccaacactggcgtcagggcaaacacaggaca

SEQ ID NO: 30962 - DNA, 1793 bp, Macaca Mulatta
  misc_feature (1)...(1793): n = A,T,C or G
cagagctgctccagaagggttccacctgcatcaccaacactgaaggatgggtggggcaccccctggaccccattggctgcctctgcagggcgctcctggaggcctgtcgtctggaggaggaggcacttaccctttacccannnnnnnnnnnnnnnnnnnnnnnnnnnnnnnnnnnnnnnnnnnnnnnnnnnnnnnnnnnnnnnnnnnnnnnnnnnnnnnnnnnnnnnnnnnnnnnnnnnnnnnnnnnnnnnnnnnnnnnnnnnnnnnnnnnnnnnnnnnnnnnnnnnnnnnnnnnnnnnnnnnnnnnnnnnnnnnnnnnnnnnnnnnnnnnnnnnnnnnnnnnnnnnnnnnnnnnnnnnnnnnnnnnnnnnnnnnnnnnnnnnnnnnnnnnnnnnnnnnnnnnnnnnnnnnnnnnnnnnnnnnnnnnnnnnnnnnnnnnnnnnnnnnnnnnnnnnnnnnnnnnnnnnnnnnnnnnnnnnnnnnnnnnnnnnnnnnnnnnnnnnnnnnnnnnnnnnnnnnnnnnnnnnnnnnnnnnnnnnnnnnnnnnnnnnnnnnnnnnnnnnnnnnnnnnnnnnnnnnnnnnnnnnnnnnnnnnnnnnnnnnnnnnnnnnnnnnnnnnnnnnnnnnnnnnnnnnnnnnnnnnnnnnnnnnnnnnnnnnnnnnnnnnnnnnnnnnnnnnnnnnnnnnnnnnnnnnnnnnnnnnnnnnnnnnnnnnnnnnnnnnnnnnnnnnnnnnnnnnnnnnnnnnnnnnnnnnnnnnnnnnnnnnnnnnnnnnnnnnnnnnnnnnnnnnnnnnnnnnnnnnnnnnnnnnnnnnnnnnnnnnnnnnnnnnnnnnnnnnnnnnnnnnnnnnnnnnnnnnnnnnnnnnnnnnnnnnnnnnnnnnnnnnnnnnnnnnnnnnnnnnnnnnnnnnnnnnnnnnnnnnnnnnnnnnnggcccgcaagccctgatgaatatcatgcagaactggtattccctattcacaccggtggaggcggccaccatcgtagcagtgacgggcaccacacacgccactctgctgcgactgcagctggacacaccccggagggaggagctctgggcctgcgcccgcaccctggccttgcagtgcgccatgaaggatcctcagaactgcgctttgcctgccctgaccctgtgtgagaagaaccactcggccttcgaggcggcctaccagatcgtgctggacgcggcggccggcggcctgggccacgcccacctcttcactgtggcccgctatatggagcaccgcgggctgccgctccgggcctacaagctggcgacgctggccctggcgcagctcagcattgccttcaaccaggacagccaccctgccgtcaacgacgtgctttgggcctgctcgctcagccactccctgggccggcacgagctctctgccatcgtccccctcatcatccgcagcatccactgtgccccaatgctgtccgatattctgcgccgctggactctctcggcgcccggcctgggccccttaggggcacgccgggccaccaagccactgggtgctgaccgggcgccgctctgccagctcctggatgcggcagtcaccgcctacatcaccaccagccactcgcgcctcacgcacatcagcccgcggcactatggggacttcataagaattcctgggcaaggcccgggagaccttcctgctggcgcccgacgggcacctccagttcgcacagttcttggagaacctcaaacagacctacaagggcaagaagaaactcatgcttttggtgcgggagcgttttggttg

SEQ ID NO: 30963 - DNA, 90 bp, Macaca Mulatta
atgggactctgaggacttctgccaatcctggtaccattcttccttctgggggatgtccagaaacctgggcacgctgaagggatctttggc

SEQ ID NO: 30964 - DNA, 370 bp, Macaca Mulatta
tcgagaagaggaggtatgggtcaggtgcaggaagatatctgggtgcctgtagagaatgcttcctctattaaacctccattaaatggcggtgatttccatcctgctgttgtggaccctctgtgactgcccctcccttccttttgctccctgtgacgtgagggcacatcccccgtggtgggtttgtgtccacacccctgtgatcatgtgctctggtccactgttatgtaatgcatttttctttgtttccaactgccacattccctgaagtgaactattgattctccatctcttcagttctgagcatacatctggattaaataactggaataggtgggcaaatgtgtatttgggactttgaaacatgagtctg

SEQ ID NO: 30965 - DNA, 813 bp, Macaca Mulatta
ggtcatcgattctcagtcctggccctgctggtgatgcctccgctgatgaacggaaggcaggtgcaggtaaaagagtggtgtttttggaacccctgaaggatactgcagcaggtcagaacgggaaagtgaggctctttcccagcgaggcagtgatagctgagggcatcctaaagtccacgagggggaaatcggactcagattcagtcaattcagtgttttctgacacaccttttgtggcgtccacttaatttgtgcctatatttgtatgatgtcataatttaatctcttcatatttaactttgtgtgtggtctgcaaaataaacaacaggacagaaattgtgttgttttgttctttgaaatacaaccaaatggtctcttaaaatgattggtaggaaatgaggtaaagcactttagttcctcagtctgccagagaaagatggggttgttttccaaagttttcagttctagataacaatatcttagtctttagcactattgataatttcagagcaggcccagatgtgatatgactcccattgtccctttatttaggatattgaaagaaaaataaactttatgtattagtgtcctttaaaatagactttgctaacttactagtaccaaaggttgagttatttttaagaaaaacacttagtgttccaatttcatttttaaaagatgtagccaagaagcatccaggcatcaatttataaaggcctaaaggcaaggttagaatttggggggattattccgcccaaaatttaccttttttccgaacccccattggaataggactcacaccttgattaaaat

SEQ ID NO: 30966 - DNA, 1066 bp, Macaca Mulatta
  misc_feature (1)...(1066): n = A,T,C or G
gccattgagacccagagcagcagttctgaagagatagtgcccagccctccctcgccgccccctctaccccgcatctacaagccttgctttgtctgtcaggacaagtcctcaggctaccactatggggtcagcgcctgtgagggctgcaagnnagggcttcttccgccgcagcatccagaagaacatggtgtacacgtgtcaccgggacaagaactgcatcatcaacaaggtgacccggaaccgctgccagtactgccgactgcagaagtgcttcgaagtgggcatgtccaaggagctgtgagaaatgaccgaaacaagaagaagaaggaggtgcccaagcccgagtgctccgagagctacacgctgacgccggaggtgggggagctcattgagaaggtgcgcaaagcgcaccaggaaaccttcnnnnnnnnnnnnnnnnnnnnnnnnnnnnnnnnnnnnnnnnnnnnnnnnnnnnnnnnnnnnnnnnnnnnnnnnnnnnnnnnnnnnnnnnnnnnnnnnnnnnnnnnnnnnnnnnnnnnnnnnnnnnnnnnnnnnnnnnnnnnnnnnnnnnnnnnnnnnnnnnnnnnnnnnnnnnnnnnnnnnnnnnnnnnnnnnnnnnnnnnnnnnnnnnnnnnnnnnnnnnnnnnnnnnnnnnnnnnnnnnnnnnnnnnnnnnnnnnnnnnnnnnnnnnnnnnnnnnnnnnnnnnnnnnnnnnnnnnnnnnnnnnnnnnnnnnnnnnnnnnnnnnnnnnnnnnnnnnnnnnnnnnnnnnnnnnnnnnnnnnnnnnnnnnnnnnnnnnnnnnnnnnnnnnnnnnnnnnnnnnnnnnnnnnnnnnnnnnnnnnnnnnnnggagcagcctgaccgtgtggacatgctgcaggagccgctgctggaggcgctaaaggtctacgtgcgaaagcggaggcccagccgcccccacatgttccccaagatgctgatgaagatcactgacctgcgaagcatcagcgccaagggnggggctgagcgggtgatcacgctgaagatggagatcccgggctccatgccgcctctcatccaggaaatg

SEQ ID NO: 30967 - DNA, 570 bp, Macaca Mulatta
  misc_feature (1)...(570): n = A,T,C or G
tggttcggtgtgtgtgctggtggtggtagggtctccagggattccctgctaagcagaaggatcgggatatagggccaggctaagagcccagccccactgtggactgaggaggtagcttcgcgcagagcagctctccagctggaagaggagggtgagggtgaggatggcgaacctgccctgaggtgcttgggtctgtgctggtggagtcctggtatgcaggggccaccagtcactaacgctcttgtgtcctggctttctgtccccgctgagctttctctcacccgcccgttttctctcctgctttgttgcctgctgcctgagccttgcttggcccttttctcggggagagaggcaggtgctgtggcagcacctgtccccaccaccggggcccctgcaggccgcctccctcctcccaaccccgctaaccctctgtcttctccttctttgctgtcctgccggggatctccagtgtgtgcggnggcttaaagacctcctgaggaccgctgctctctgcctctccaggagtggcctggggggagccaggcacccggcacctccacctgcctaacc

SEQ ID NO: 30968 - DNA, 2154 bp, Macaca Mulatta
  misc_feature (1)...(2154): n = A,T,C or G
atggcggcggcgtttgaagccctgggagccgtagcggcagtggctactgctatgccagctgagcatgtggccgtgcacgtcccggccccagagccaacacctgggcctatgaggagcctgcggaccgctcaggatctcggcagcccgcggacccgcacgggggacgtgctgttggcggagccggccgacttcgagtcactgctgctttcgcggtcggtgctggaggggctgcgggcagccggcttcgagaggccctcgccggtgcagctcaaggccatcccgctggggcgctgcgggctcnnnnnnnnnnnnnnnnnnnnnnnnnnnnnnnnnnnnnnnnnnnnnnnnnnnnnnnnnnnnnnnnnnnnnnnnnnnnnnnnnnnnnnnnnnnnnnnnnnnnnnnnnnnnnnnnnnnnnnnnnnnnnnnnnnnnnnnnnnnnnnnnnnnnnnnnnnnnnnnnnnnnnnnnnnnnnnnnnnnnnnnnnnnnnnnnnnnnnnnnnnnnnnnnnnnnnnnnnnnnnnnnnnnnnnnnnnnnnnnnnnnnnnnnnnnnnnnnnnnnnnnnnnnnnnnnnnnnnnnnnnnnnnnnnnnnnnnnnnnnnnnnnnnnnnnnnnnnnnnnnnnnnnnnnnnnnnnnnnnnnnnnnnnnnnnnnnnnnnnnnnnnnnnnnnnnnnnnnnnnnnnnnnnnnnnnnnnnnnnnnnnnnnnnnnnnnnnnnnnnnnnnnnnnnnnnnnnnnnnnnnnnnnnnnnnnnnnnnnnnnnnnnnnnnnnnnnnnnnnnnnnnnnnnnnnnnnnnnnnnnnnnnnnnnnnnnnnnnnnnnnnnnnnnnnnnnnnnnnnnnnnnnnnnnnnnnnnnnnnnnnnnnnnnnnnnnnnnnnnnnnnnnnnnnnnnnnnnnnnnnnnnnnnnnnnnnnnnnnnnnnnnnnnnnnnnnnnnnnnnnnnnnnnnnnnnnnnnnnnnnnnnnnnnnnnnnnnnnnnnnnnnnnnnnnnnnnnnnnnnnnnnnnnnnnnnnnnnnnnnnnnnnnnnnnnnnnnnnnnnnnnnnnnnnnnnnnnnnnnnnnnnnnnnnnnnnnnnnnnnnnnnnnnnnnnnnnnnnnnnnnnnnnnnnnnnnnnnnnnnnnnnnnnnnnnnnnnnnnnnnnnnnnnnnnnnnnnnnnnnnnnnnnnnnnnnnnnnnnnnnnnnnnnnnnnnnnnnnnnnnnnnnnnnnnnnnnnnnnnnnnnnnnnnnnnnnnnnnnnnnnnnnnnnnnnnnnnnnnnnnnnnnnnnnnnnnnnnnnnnnnnnnnnnnnnnnnnnnnnnnnnnnnnnnnnnnnnnnnnnnnnnnnnnnnnnnnnnnnnnnnnnnnnnnnnnnnnnnnnnnnnnnnnnnnnnnnnnnnnnnnnnnnnnnnnnnnnnnnnnnnnnnnnnnnnnnnnnnnnnnnnnnnnnnnnnnnnnnnnnnnnnnnnnnnnnnnnnnnnnnnnnnnnnnnnnnnnnnnnnnnnnnnnnnnnnnnnnnnnnnnnnnnnnnnnnnnnnnnnnnnnnnnnnnnnnnnnnnnnnnnnnnnnnnnnnnnnnnnnnnnnnnnnnnnnnnnnnnnnnnnnnnnnnnnnnnnnnnnnnnnnnnnnnnnnnnnnnnnnnnnnnnnnnnnnnnnnnnagaattctgttcagacccccgttgaaaactccaccaacagtcagcaccatgtcaaagaagctttacctgtgtcactcccccaaattccttgtctgtcttcctttaaaatccatcagccatacacattgacttttgctgaattggtagaggattatgaacattatattaaagaggggttagagaaacctgtggaaatcatcaggcactacacaggtcctggggatcagactgtgaatcctcaaaatggttttgtgagaaataaagttactgaacagagagtccccatattggcaagtagtagccaatctggagactctgagagtgacagtgattcttacagctcaagaacctcttcccagagcaaaggaaataagtcatacttggaaggctcttctgataatcagctgaaagactctgaatctactcctgtggatgatcatatttctttggaacaacctccaaatggaagtgacacccccaatccagaggaatatcaagaatcatctggaatccagat

SEQ ID NO: 30969 - DNA, 373 bp, Macaca Mulatta
  misc_feature (1)...(373): n = A,T,C or G
ggcgcggccccgaagcttccgggggccacttcctcctttgtctcctagctacggctggtagcgttgttgacatcccgggagtctgtgccgccggcctgagcccagagtttcgcggcctccgcgatggtaaatcnnnnnnnnnnnnnnnnnnnnnnnnnnnnnnnnnnnnnnnnnnnnnnnnnnnnnnnnnnnnnnnnnnnnnnnnnnnnnnnnnnnnnnnnnnnnnnngacaattcaacaactgttcaatatgcaggccttcttcatcacctaacaatgaaagccaaaagcacagttcgtgatattgatcctcagaacgacctgacttttcttaggatcagatcaaagaaacatgaaatcatggtagctccag

SEQ ID NO: 30970 - DNA, 249 bp, Macaca Mulatta
ggtcgttagctctgaacccggtgcagagacccgagatgtttatcatcggtgcccagcccgtgtgcagtcagcttcctgggctctcccctggccagaggaagctgtgccaactgtaccaggagcacatggcctacataggggagggagccaagacaggcatcaaggaatgccagcaccagttccggcagcggcgatggaactgcagcacggtggacaacgtgtctgtctttgggagagtcatgcagatag

SEQ ID NO: 30971 - DNA, 588 bp, Macaca Mulatta
aaccctgctgtgtcctatctcatgacgctcatggaacctctttctttgatcttctttgtcttttctccccctcttttttgttctaaagaaaaatcattttgatgcaaggtcctgcctgccatcagatccgaggtgcctcctgcagtgaccccttttcctggcatttctcttccatgagacgaggtctgcctagtgagatctgtacgacctcacgttgctttccagagcccgggcctgttttgccatctcagttttcttgggccctgcttcctgtgtaccactgaggggcagctgggccaggagctgcacccggtgcctgcagccttcataagcacacacgtccattccctcgtcaggaccagacctcctggaatctgccctgggatccctcatcccacctccatccagagttgcctaagctgcatgtccagcagaggcaggattgctcggtggtgagaaggttaggtctggctcagactgaataagaagagataaaatttgccttaaaacttgcctggcagtggctttgctgcacggtctgaaaccacctgtacccaaactcctgaacgaactttccttgtgacacag

SEQ ID NO: 30972 - DNA, 1254 bp, Macaca Mulatta
  misc_feature (1)...(1254): n = A,T,C or G
gagtggcagacaacccaataccttttcagcagaatcaagtcgaagcttttgaatctgtctactttgggttctcaaaaatgcagatgaaacagttctacagaagtggtttacagatctctcagtcttacaactaaaccggctgttagatctgctttatctctgtgtatcttgctttgagtataaannnnnnnnnnnnnnnnnnnnnnnnnnnnnnnnnnnnnnnnnnnnnnnnnnnnnnnnnnnnnnnnnnnnnnnnnnnnnnnnnnnnnnnnnnnnnnnnnnnnnnnnnnnnnnnnnnnnnnnnnnnnnnnnnnnnnnnnnnnnnnnnnnnnnnnnnnnnnnnnnnnnnnnnnnnnnnnnnnnnnnnnnnnnnnnnnnnnnnnnnnnnnnnnnnnnnnnnnnnnnnnnnnnnnnnnnnnnnnnnnnnnnnnnnnnnnnnnnnnnnnnnnnnnnnnnnnnnnnnnnnnnnnnnnnnnnnnnnnnnnnnnnnnnnnnnnnnnnnnnnnnnnnnnnnnnnnnnnnnnnnnnnnnnnnnnnnnnnnnnnnnnnnnnnnnnnnnnnnnnnnnnnnnnnnnnnnnnnnnnnnnnnnnnnnnnnnnnnnnnnnnnnnnnnnnnnnnnnnnnnnnnnnnnnnnnnnnnnnnnnnnnnnnnnnnnnnnnnnnnnnnnnnnnnnnnnnnnnnnnnnnnnnnnnnnnnnnnnnnnnnnnnnnnnnnnnnnnnnnnnnnnnnnnnnnnnnnnnnnnnnnnnnnnnnnnnnnnnnnnnnnnnnnnnnnnnnnnnnnnnnnnnnnnnnnnnnnnnnnnnnnnnnnnnnnnnnnnnnnnnnnnnnnnnnnnnnnnnnnnnnnnnnnnnnnnnnnnnnnnnnnnnnnnnnnnnnnnnnnnnnnnnnnnnnnnnnnnnnnnnnnnnnnnnnnnnnnnnnnnnnnnnnnnnnnnnnnnnnnnnnnnnnnnnnnnnnnnnnnnnnnnnnnnnnnnnnnnnnnnnnnnnnnnnnnnnnnnnnnnnnnnnnnnnnnnnnnnnnnnnnnnnnnnnnnnnnnnnnnnnnnnnnnnnnnnnnngaattgccaagggttaccagacctctccagatctgcgattgacctggctgcagaacatggctggcaagcactcagaacgaagcaatcatgctgaagctgcacagtgtctagtccactcagcagcacttgttgctgaatatttgagcatgctggaggaccggaaatatcttcctgtgggatgtgtaacatttcagn

SEQ ID NO: 30973 - DNA, 5164 bp, Macaca Mulatta
  misc_feature (1)...(5164): n = A,T,C or G
tgttagaaattgattttgcggagctaaccttggaagagattattggcatcgggggctttggcaaggtctatcgtgctttctggataggggatgaggttgctgtgaaagcagctcgccatgaccccgatgaggacatcagccagnnnnnnnnnnnnnnnnnnnnnnnnnnnnnnnnnnnnnnnnnnnnnnnnnnnnnnnnnnnnnnnnnnnnnnnnnnnnnnnnnnnnnnnnnnnnnnnnnnnnnnnnnnnnnnnnnnnnnnnnnnnnnnnnnnnnnnnnnnnnnnnnnnnnnnnnnnnnnnnnnnnnnnnnnnnnnnnnnnnnnnnnnnnnnnnnnnnnnnnnnnnnnnnnnnnnnnnnnnnnnnnnnnnnnnnnnnnnnnnnnnnnnnnnnnnnnnnnnnnnnnnnnnnnnnnnnnnnnnnnnnnnnnnnnnnnnnnnnnnnnnnnnnnnnnnnnnnnnnnnnnnnnnnnnnnnnnnnnnnnnnnnnnnnnnnnnnnnnnnnnnnnnnnnnnnnnnnnnnnnnnnnnnnnnnnnnnnnnnnnnnnnnnnnnnnnnnnnnnnnnnnnnnnnnnnnnnnnnnnnnnnnnnnnnnnnnnnnnnnnnnnnnnnnnnnnnnnnnnnnnnnnnnnnnnnnnnnnnnnnnnnnnnnnnnnnnnnnnnnnnnnnnnnnnnnnnnnnnnnnnnnnnnnnnnnnnnnnnnnnnnnnnnnnnnnnnnnnnnnnnnnnnnnnnnnnnnnnnnnnnnnnnnnnnnnnnnnnnnnnnnnnnnnnnnnnnnnnnnnnnnnnnnnnnnnnnnnnnnnnnnnnnnnnnnnnnnnnnnnnnnnnnnnnnnnnnnnnnnnnnnnnnnnnnnnnnnnnnnnnnnnnnnnnnnnnnnnnnnnnnnnnnnnnnnnnnnnnnnnnnnnnnnnnnnnnnnnnnnnnnnnnnnnnnnnnnnnnnnnnnnnnnnnnnnnnnnnnnnnnnnnnnnnnnnnnnnnnnnnnnnnnnnnnnnnnnnnnnnnnnnnnnnnnnnnnnnnnnnnnnnnnnnnnnnnnnnnnnnnnnnnnnnnnnnnnnnnnnnnnnnnnnnnnnnnnnnnnnnnnnnnnnnnnnnnnnnnnnnnnnnnnnnnnnnnnnnnnnnnnnnnnnnnnnnnnnnnnnnnnnnnnnnnnnnnnnnnnnnnnnnnnnnnnnnnnnnnnnnnnnnnnnnnnnnnnnnnnnnnnnnnnnnnnnnnnnnnnnnnnnnnnnnnnnnnnnnnnnnnnnnnnnnnnnnnnnnnnnnnnnnnnnnnnnnnnnnnnnnnnnnnnnnnnnnnnnnnnnnnnnnnnnnnnnnnnnnnnnnnnnnnnnnnnnnnnnnnnnnnnnnnnnnnnnnnnnnnnnnnnccccaaagaagaaggggcgaacgtgggggccagggacgcttggtcagaaggagcttgcctcgggagatgaaggnnnnnnnnnnnnnnnnnnnnnnnnnnnnnnnnnnnnnnnnnnnnnnnnnnnnnnnnnnnnnnnnnnnnnnnnnnnnnnnnnnnnnnnnnnnnnnnnnnnnnnnnnnnnnnnnnnnnnnnnnnnnnnnnnnnnnnnnnnnnnnnnnnnnnnnnnnnnnnnnnnnnnnnnnnnnnnnnnnnnnnnnnnnnnnnnnnnnnnnnnnnnnnnnnnnnnnnnnnnnnnnnnnatgaggacagtgaaggcccagggagtggagagagtcgcctacagcattcacccagccagtcctacctctgtatcccattccctcgtggagaggatggggatggcccctccagtgatggaatccatgaggagcccaccccagtcaactcagccaccagtacccctcagctgacgccaaccaacagcctcaagcggggcagtgctcaccaccgccgctgcgaggtggctctactcggctgtggggctgttctggcagccacaggcctagggtttgacttgctggaagctggcaagtgccagctgcttcccctggaggagcctgagccaccagctcgggaagagaagaaaagacgggagggtctttttcagaggtccagccgtcctcgtcggagcaccagccccccatcccgaaagctcttcaagaaggaagagcccatgctgttgctaggagaccccgctgcctccctgacactgctctccctctcctccatctccgagtgcaactccacacgctccctgctgcgctctgacagcgatgaaattgtcgtgtatgagatgccagtcagcccaattgaggcccctcccctgaccccttgtacccacaaccccctggtcaatgtccgagtggagcgcttcaaacgggatcctaaccaatctctgactcccacccacgtcaccctcaccgccccctcgcagcccagcagtcaccggcggactccttctgatggggcccttaagccagagactctcctagccnnnnnnnnnnnnnnnnnnnnnnnnnnnnnnnnnnnnnnnnnnnnnnnnnnnnnnnnnnnnnnnnnnnnnnnnnnnnnnnnnnnnnnnnnnnnnnnnnnnnnnnnnnnnnnnnnnnnnnnnnnnnnnnnnnnnnnnnnnnnnnnnnnnnnnnnnnnnnnnnnnnnnnnnnnnnnnnnnnnnnnnnnnnnnnnnnnnnnnnnnnnnnnnnnnnnnnnnnnnnnnnnnnnnnnnnnnnnnnnnnnnnnnnnnnnnnnnnnnnnnnnnnnnnnnnnnnnnnnnnnnnnnnnnnnnnnnnnnnnnnnnnnnnnnnnnnnnnnnnnnnnnnnnnnnnnnnnnnnnnnnnnnnnnnnnnnnnnnnnnnnnnnnnnnnnnnnnnnnnnnnnnnnnnnnnnnnnnnnnnnnnnnnnnnnnnnnnnnnnnnnnnnnnnnnnnnnnnnnnnnnnnnnnnnnnnnnnnnnnnnnnnnnnnnnnnnnnnnnnnnnnnnnnnnnnnnnnnnnnnnnnnnnnnnnnnnnnnnnnnnnnnnnnnnnnnnnnnnnnnnnnnnnnnnnnnnnnnnnnnnnnnnnnnnnnnnnnnnnnnnnnnnnnnnnnnnnnnnnnnnnnnnnnnnnnnnnnnnnnnnnnnnnnnnnnnnnnnnnnnnnnnnnnnnnnnnnnnnnnnnnnnnnnnnnnnnnnnnnnnnnnnnnnnnnnnnnnnnnnnnnnnnnnnnnnnnnnnnnnnnnnnnnnnnnnnnnnnnnnnnnnnnnnnnnnnnnnnnnnnnnnnnnnnnnnnnnnnnnnnnnnnnnnnnnnnnnnnnnnnnnnnnnnnnnnnnnnnnnnnnnnnnnnnnnnnnnnnnnnnnnnnnnnnnnnnnnnnnnnnnnnnnnnnnnnnnnnnnnnnnnnnnnnnnnnnnnnnnnnnnnnnnnnnnnnnnnnnnnnnnnnnnnnnnnnnnnnnnnnnnnnnnnnnnnnnnnnnnnnnnnnnnnnnnnnnnnnnnnnnnnnnnnnnnnnnnnnnnnnnnnnnnnnnnnnnnnnnnnnnnnnnnnnnnnnnnnnnnnnnnnnnnnnnnnnnnnnnnnnnnnnnnnnnnnnnnnnnnnnnnnnnnnnnnnnnnnnnnnnnnnnnnnnnnnnnnnnnnnnnnnnnnnnnnnnnnnnnnnnnnnnnnnnnnnnnnnnnnnnnnnnnnnnnnnnnnnnnnnnnnnnnnnnnnnnnnnnnnnnnnnnnnnnnnnnnnnnnnnnnnnnnnnnnnnnnnnnnnnnnnnnnnnnnnnnnnnnnnnnnnnnnnnnnnnnnnnnnnnnnnnnnnnnnnnnnnnnnnnnnnnnnnnnnnnnnnnnnnnnnnnnnnnnnnnnnnnnnnnnnnnnnnnnnnnnnnnnnnnnnnnnnnnnnnnnnnnnnnnnnnnnnnnnnnnnnnnnnnnnnnnnnnnnnnnnnnnnnnnnnnnnnnnnnnnnnnnnnnnnnnnnnnnnnnnnnnnnnnnnnnnnnnnnnnnnnnnnnnnnnnnnnnnnnnnnnnnnnnnnnnnnnnnnnnnnnnnnnnnnnnnnnnnnnnnnnnnnnnnnnnnnnnnnnnnnnnnnnnnnnnnnnnnnnnnnnnnnnnnnnnnnnnnnnnnnnnnnnnnnnnnnnnnnnnnnnnnnnnnnnnnnnnnnnnnnnnnnnnnnnnnnnnnnnnnnnnnnnnnnnnnnnnnnnnnnnnnnnnnnnnnnnnnnnnnnnnnnnnnnnnnntggcaaagtgctatttatagggtgcccagggagcccctgatgtacaataacctttaggttccccatactggaaactgaccaaggcctatgcacagggagcccctcatgctgggctctggaccatgagtggagtaggaaggatagcagaggccaaccctgacctttctggaagttatttccttaacttgaatgttgagcttcgtctaaagctttctcatgtatgtcttctccatgccactactctgaggcctcctgtgttctgtgtgaacagttgtctttatgtgggaatggcgacttgattgggagtagtctcgaggtcattccccttttccctcgatactctctgaatgctgctccactgtcttttgtcttggaggtcactcagcaggttccttgcatttgctgcctggatgtgcagctggcaacagtgatgagttggtcactgctctttctccataactaggatagatgtcctgccttggtgatcactaaaggggtgaccttgnnnnnnnnnnnnnnnnnnnnnnnnnnnnnnnnnnnnnnnnnnnnnnnnnnnnnnnnnnnnnnnnnnnnnnnnnnnnnnnnnnnnnnnnnnnnnnnnnnnnnnnnnnnnnnnnnnnnnnnnnnnnnnnnnnnnnnnnnnnnnnnnnnnnnnnnnnnnnnnnnnnnnnnnnnnnnnnnnnnnnnnnnnnnnnnnnnnnnnnnnnnnnnnnnnnnnnnnnnnnnnnnnnnnnnnnnnnnnnnnnnnnnnnnnnnnnnnnnnnnnnnnnnnnnnnnnnnnnnnnnnnnnnnnnnnnnnnnnnnnnnnnnnnnnnnnnnnnnnnnnnnnnnnnnnnnnnnnnnnnnnnnnnnnnnnnnnnnnnnnnnnnnnnnnnnnnnnnnnnnnnnnnnnnnnnnnnnnnnnnnnnnnnaaaaattagctgagcatggtggcacatgcctgtaatccctgctacttgggaggctgaggtaggagactcgcttgaacttgggaggcagaggttgcagtgagccaagatcgagccactgcactctagcctgggc

SEQ ID NO: 30974 - DNA, 735 bp, Macaca Mulatta
  misc_feature (1)...(735): n = A,T,C or G
ttcccggcgtcaatttagtggcgggaaaagcgacgtcttctgaacggcgttttcttgctgagtggtagcctttcccctcaaccagcaatggaggaacaaccccagatgcaagccgccgacgagcccgcggactccggagnnnnnnnnnnnnnnnnnnnnnnnnnnnnnnnnnnnnnnnnnnnnnnnnnnnnnnnnnnnnnnnnnnnnnnnnnnnnnntcaggctgagagcacagacaaaacaacagctcttagaatataaatcaatgattgatgcaagnnnnnnnnnnnnnnnnnnnnnnnnnnnnnnnnnnnnnnnnnnnnnnnnnnnnnnnnnnnnnnnnnnnnnnnnnnnnnnnnnnnnnnnnnnnnnnnnnnnnnnnnnnnnnnnnnnnnnnnnnnnnnnnnnnnnnnnnnnnnnnnnnnnnnnnnnnnnnnnnnnnnnnnnnnnnnnnnngtgtgctcatggataacatgaaacacctattagagctaaataaattaataatgaaatcacagcaggnnnnnnnnnnnnnnnnnnnnnnnnnnnnnnnnnnnnnnnnnnnnnnnnnnnaattaaaacaagcttcagaaagtaagcttttagaaatacagactgaaaagaacaaacagaagattgatttggacagtatggaaaactcagacaggataaagatcatacgacaaaacctacagatggagataaaaattactaccattattcaacatgtgttcca

SEQ ID NO: 30975 - DNA, 803 bp, Macaca Mulatta
  misc_feature (1)...(803): n = A,T,C or G
ggggcagttcggcggtcccgcgggtctgtctcttgcttcaacagtgtttggacggaacagatccggggactctttcttccagcctccgagcgccctccgatttcctctccacttgcaacctccgggaccatcttctcggccatctcctgcttctgggacctgccagcaccgtttttgtggttagctccgtcttgccgaccaaccatgagctcccagattcgtcagaattattccaccgacgtggaggcagccgtcaacagcctggtcaatatgagcctgcnggcctcctacacctacctctctctgggctttcatttcgaccgcgatgatgtggctctggaaagcgtgaaccaacttctcccccaaatgggccaaagaaaaacgcgagggcaacgagccgcctctggaaaaaggaaaacaaggcggggcggcagcgctcttttacagggagttccgaaacccagcagaaaaaggagtgggggaaaaacaaaaaaggccgcggaaacactctagggcacttacaaagagagtgaaatagcgggtcaaatgtgacatctaacttctcattaaaaatagtcgccaacaggaccccccaatatagagatatacctacggatagaggcaagtccgtaaggttgaaaaaataacagtcacctgttttgctaactcctttttatcaacatatgccagactatccaacgcgttttatgtggaaccccgcaggggatgatctcgcgatgaagtgatttattatcaaccatttaagtaccgcagtttgagcgcattaattatgaaactgaggc

SEQ ID NO: 30976 - DNA, 267 bp, Macaca Mulatta
cagccttgtgcaaaggaccttttcaccacagatcagccagaccatcttcctcctcccaagtcatcaaagagttccaagctggtcacctgtcccttgatgttcccaggaaactggcaaagaggacccctgcattttatcttcccattgggagtggcaggatctctgcctgggaaacaggctgcattcagcacaactgtggtagcattaacaaagcacagtgggcacatctagaagttgaagctaaaacattcaagaactccagtctgt

SEQ ID NO: 30977 - DNA, 84 bp, Macaca Mulatta
aggggttgatctgagcaacattgtaaagacggcgcctaaagtctctgcagacggaccccaggagcccacacatgacatcctgca

SEQ ID NO: 30978 - DNA, 732 bp, Macaca Mulatta
  misc_feature (1)...(732): n = A,T,C or G
aaagctggtgtgacctaatgttcaccttaattctgacttgaactggaaacattttaagaaaccttcttgttgcttttctaacaaattcctgcttattttgcctttgctgctactttttctagttagctttcaaacttgcctgtggacttaataatgcaagttgcaattaattatttctggagtcatgggaacacacagcatagagggtaggtggggccttctaggtgctgaatctagacatctgtggggtctcctgggttcagcggctgttgattcaaggtcaacattgaccactgaaggagcggtttaagagtaccaggcaaagggcaaactgtagatcgatctttatactgttatcacaagagaagtgacatactttatatatgtttctattagcaaggtctgtttctaataccatatactttatatctctatacatttatatttctaataatatggttatcactgatacatgtagacacttttagaatttattaaatccttgaccttgtgcattattccattagcaacagttgcaccccctccttagccctccccttcctctttttaagctgttttatgaaaaagatctagaagttcttgattcatttttactgttctttccagaggtaaaagagaaagttgattgggttggttgtttttcaattatgccattanactaaacatttctgttaaattaccctatcctttgttctcttgactgttttcttt

SEQ ID NO: 30979 - DNA, 117 bp, Macaca Mulatta
  misc_feature (1)...(117): n = A,T,C or G
gaaccatcaagaaatggggacctggattttatttgcctgcctcctgggagcagcttttgccatgcctnctaccacctcatcctgggcaccctggttatatcaacttcagctatgagg

SEQ ID NO: 30980 - DNA, 3327 bp, Macaca Mulatta
  misc_feature (1)...(3327): n = A,T,C or G
caggtgggctgcatccacgtgggccgcaagtatgcagctggccacactgttcacctgccgccctgccgggcctgccactgccctgacgccggcggagagctcatctgctaccnnnnnnnnnnnnnnnnnnnnnnnnnnnnnnnnnnnnnnnnnnnnnnnnnnnnnnnnnnnnnnnnnnnnnnnnnnnnnnnnnnnnnnnnnnnnnnnnnnnnnnnnnnnnnnnnnnnnnnnnnnnnnnnnnnnnnnnnnnnnnnnnnnnnnnnnnnnnnnnnnnnnnnnnnnnnnnnnnnnnnnnnnnnnnnnnnnnnnnnnnnnnnnnnnnnnnnnnnnnnnnnnnnnnnnnnnnnnnnnnnnnnnnnnnnnnnnnnnnnnnnnnnnnnnnnnnnnnnnnnnnnnnnnnnnnnnnnnnnnnnnnnnnnnnnnnnnnnnnnnnnnnnnnnnnnnnnnnnnnnnnnnnnnnnnnnnnnnnnnnnnnnnnnnnnnnnnnnnnnnnnnnnnnnnnnnnnnnnnnnnnnnnnnnnnnnnnnnnnnnnnnnnnnnnnnnnnnnnnnnnnnnnnnnnnnnnnnnnnnnnnnnnnnnnnnnnnnnnnnnnnnnnnnnnnnnnnnnnnnnnnnnnnnnnnnnnnnnnnnnnnnnnnnnnnnnnnnnnnnnnnnnnnnnnnnnnnnnnnnnnnnnnnnnnnnnnnnnnnnnnnnnnnnnnnnnnnnnnnnnnnnnnnnnnnnnnnnnnnnnnnnnnnnnnnnnnnnnnnnnnnnnnnnnnnnnnnnnnnnnnnnnnnnnnnnnnnnnnnnnnnnnnnnnnnnnnnnnnnnnnnnnnnnnnnnnnnnnnnnnnnnnnnnnnnnnnnnnnnnnnnnnnnnnnnnnnnnnnnnnnnnnnnnnnnnnnnnnnnnnnnnnnnnnnnnnnnnnnnnnnnnnnnnnnnnnnnnnnnnnnnnnnnnnnnnnnnnnnnnnnnnnnnnnnnnnnnnnnnnnnnnnnnnnnnnnnnnnnnnnnnnnnnnnnnnnnnnnnnnnnnnnnnnnnnnnnnnnnnnnnnnnnnnnnnnnnnnnnnnnnnnnnnnnnnnnnnnnnnnnnnnnnnnnnnnnnnnnnnnnnnnnnnnnnnnnnnnnnnnnnnnnnnnnnnnnnnnnnnnnnnnnnnnnnnnnnnnnnnnnnnnnnnnnnnnnnnnnnnnnnnnnnnnnnnnnnnnnnnnnnnnnnnnnnnnnnnnnnnnnnnnnnnnnnnnnnnnnnnnnnnnnnnnnnnnnnnnnnnnnnnnnnnnnnnnnnnnnnnnnnnnnnnnnnnnnnnnnnnnnnnnnnnnnnnnnnnnnnnnnnnnnnnnnnnnnnnnnnnnnnnnnnnnnnnnnnnnnnnnnnnnnnnnnnnnnnnnnnnnnnnnnnnnnnnnnnnnnnnnnnnnnnnnnnnnnnnnnnnnnnnnnnnnnnnnnnnnnnnnnnnnnnnnnnnnnnnnnnnnnnnnnnnnnnnnnnnnnnnnnnnnnnnnnnnnnnnnnnnnnnnnnnnnnnnnnnnnnnnnnnnnnnnnnnnnnnnnnnnnnnnnnnnnnnnnnnnnnnnnnnnnnnnnnnnnnnnnnnnnnnnnnnnnnnnnnnnnnnnnnnnnnnnnnnnnnnnnnnnnnnnnnnnnnnnnnnnnnnnnnnnnnnnnnnnnnnnnnnnnnnnnnnnnnnnnnnnnnnnnnnnnnnnnnnnnnnnnnnnnnnnnnnnnnnnnnnnnnnnnnnnnnnnnnnnnnnnnnnnnnnnnnnnnnnnnnnnnnnnnnnnnnnnnnagacatcaacgagtgtgtgaaggacctgcacacgtgcagccggggcgagcactgtgtgaacacgctgggctctttccactgctacacggcataaaggtgcgaaccgggctatgccctcaaggatggcgagtgagaannnnnnnnnnnnnnnnnnnnnnnnnnnnnnnnnnnnnnnnnnnnnnnnnnnnnnnnnnnnnnnnnnnnnnnnnnnnnnnnnnnnnnnnnnnnnnnnnnnnnnnnnnnnnnnnnnnnnnnnnnnnnnnnnnnnnnnnnnnnnnnnnnnnnnnnnnnnnnnnnnnnnnnnnnnnnnnnnnnnnnnnnnnnnnnnnnnnnnnnnnnnnnnnnnnnnnnnnnnnnnnnnnnnnnnnnnnnnnnnnnnnnnnnnnnnnnnnnnnnnnnnnnnnnnnnnnnnnnnnnnnnnnnnnnnnnnnnnnnnnnnnnnnnnnnnnnnnnnnnnnnnnnnnnnnnnnnnnnnnnnnnnnnnnnnnnnnnnnnnnnnnnnnnnnnnnnnnnnnnnnnnnnnnnnnnnnnnnnnnnnnnnnnnnnnnnnnnnnnnnnnnnnnnnnnnnnnnnnnnnnnnnnnnnnnnnnnnnnnnnnnnnnnnnnnnnnnnnnnnnnnnnnnnnnnnnnnnnnnnnnnnnnnnnnnnnnnnnnnnnnnnnnnnnnnnnnnnnnnnnnnnnnnnnnnnnnnnnnnnnnnnnnnnnnnnnnnnnnnnnnnnnnnnnnnnnnnnnnnnnnnnnnnnnnnnnnnnnnnnnnnnnnnnnnnnnnnnnnnnnnnnnnnnnnnnnnnnnnnnnnnnnnnnnnnnnnnnnnnnnnnnnnnnnnnnnnnnnnnnnnnnnnnnnnnnnnnnnnnnnnnnnnnnnnnnnnnnnnnnnnnnnnnnnnnnnnnnnnnnnnnnnnnnnnnnnnnnnnnnnnnnnnnnnnnnnnnnnnnnnnnnnnnnnnnnnnnnnnnnnnnnnnnnnnnnnnnnnnnnnnnnnnnnnnnnnnnnnnnnnnnnnnnnnnnnnnnnnnnnnnnnnnnnnnnnnnnnnnnnnnnnnnnaagtgcgagcgcaccacgtgccacgacttcctggagtgccagaactcgccggcgcgcatcacacattaccagctcaacttccagacgggcctcctggtgcctgcgcatatcttccgcattggccccgcgccagccttcacgggggacaccatcgccctgaccatcatcaagggcaacgaggagggctactttggcacacgcaggctcaacgcctacacgggcgtggtctacctgcagcgggctgtgctggagccccgggactttgccctggacgtggagatgaagctctggcggcagggctctgtcaccactttcctggccaagatgcacatcttcttcaccacctttgccctgtgaggtgccagcaccggccacctgcgggtgcgacgcagcccagggctcacactgcgtgggagggactgggtcactattgtggtttttactataactttgtaaattaacttaattttgctgacttgactcctgtgggcttctggacccctcctttgccccgcaggaggaag

SEQ ID NO: 30981 - DNA, 853 bp, Macaca Mulatta
gggataaggaaacagaaaagggagcatctcgaatagatgaaaaatcatcaaaggccaaagtgaatgatttcttagctgagatttttaagaagattggctctaaagaaaacactaaagaggggctagcagagttatatgaatataagaagaaatactcagatgctgacattgaaccatttctgaaaaattcctcacagttcttccagagctatgtcgaaagaggccttcgggtgattgagatggagagggagggcaaaggtcgcatttccacttcaacaggcatctcccctcagatggaggtcacatgtgtgcccacacccacaagcacagtgtcctccataggtaacacaaatggggaagaagtggggccatctgtctacctggaaaggctaaagatcctccgacagcgatgtggtctggacaacacaaagcaagatgaccgacctcctttgacctctttgctctccaaaccagcagttcctaccgttgcctcttccacagacatgctccacagcaaactctctcaactccgggagtctcgggagcagcaccagcattcagacctggattctaaccagactcactcttcaggaactgtgacctcctcctcctccacagctaacatagacgacttgaaaaaaagactggagagaataaagagcagtcgcaaatgaagctgccccattcccctggcaccctgcagctttagtttactaaactagaagtcctcatagtttaaagtggcctcagcaggcctagtgtatacagactggttgtacctatcatgccgtggagctggggggaggagtcgttgttggcacaagtacttgtacatactctggcttctccttca

SEQ ID NO: 30982 - DNA, 639 bp, Macaca Mulatta
tgaatgttcatccccacccccattcctggcaaggggtggccgagggtggggcagagaacaggagcagggaaggctgtgggggtgggcagaggggtctcaccataggagcttctcagactctgagtccctcgggggaaagcaagcaggggcaaagccagaggagtggagatcaggccagggacagacatcctgccctcagagaaagggaccccactcagactaggaagaggggacccgcccaccctagaggtcctgcccctcagtttggggtctcctgtggacaggtagggccatcgacatgtttgaaattagatgagcaatcagaagcaggcctggggcgctctccatgcatgtgtgggaggcggggtggggggttcacatgactcccttgcttgccactgcttttcaactcctccccttagctccactgaccaggtggcatggggagaatccaagggcctggggagtggttcccagcctgcctgccctcacctcctcctctcctcttgccctgcccagggctccccaagcttggtgctccttcctcctatcttccaggggcatcccttggagtatggtcaccctttctccagtccctcccctcaatgattagccctggatgcttaaggctttcagagc

SEQ ID NO: 30983 - DNA, 664 bp, Macaca Mulatta
  misc_feature (1)...(664): n = A,T,C or G
caagtgtctgcagtgaccctgnatgtaagggcaccgctgcgagaatggtgtctacgacccacagcaagatgatggggatgagagtgcagatgaggacagctgctctgagcacagctccagcacctcaacctccaccaaccagaaggagggcaagtactgcgactgctgctactgcgaattctttgggcacggcgggcctccagctgcaccaacaagtagaaattacgcagaaatgagggaaaagcttcgcttacggctgaccaagaggaaagaagagcaacctaaaaaaatggatcagatctcagaaagggaaagcgtcgttgaccatcggagggtggaggatttattgcagtttataaacagctctgaaaccaaaccagtgagcagcacgcgtgcagcaaagcgggcaaggcataagcaaaggaagctggaggagaaagctcgcctggaagcagaggccagggcccgggagcacctgcacctccaggaggagcagaggcggcnnnnnnnnnnnnnnnnnnnnnnnnnnnnnnnncgtttcaaggaggagtttcagcggcttcaggagcttcagaagctaagagctgtacaaaagaagaagaaggagaggccaagtaaagactgccccaagttggacatgctcactggaaaattccaggcagca

SEQ ID NO: 30984 - DNA, 2292 bp, Macaca Mulatta
  misc_feature (1)...(2292): n = A,T,C or G
ctctaggaatgaggcggagcgaccctctatggtcccggacccacccgaaagcgttgttcgttttttcttgtggttttgttttctcctccccccgccccgactcggaaggcgtcctgtgaccctctaggacctcaggagctgtaaccgcccttgtgtgtggtcgaggcttttgaaaacaaactccggcttctccaacctagaaactgcatacttcctacaaatactgagctttttgagagcctggtacttttcacgaagtcaccttatttaattatcaccgaaaagcacctgtaagatgggagcggttatactccatttacaggaaaggaaccaaggctcagagaagaaatttgctccgttcaccgtgtgngctcctcctcagccatcctggccgtgctcagtcatctgaccagctgacctccgagttcccccactccgtggggaactcctccacctcttggcttccaatgctattgctgcatgctgaagactcccgcattggtaactccagtctgaccgtgngacgtgaatgttattgaactttagacttgtatatcgaactgattactcaatagctgcatttgcctttgtaatggacatcccaaacttaacataccccaaaatgaccttctgatatctacctaacctgttcttgcaacagtcttcttcccagggatggttgaagatcccatcatctttccagttgctcaggccaaaaaccttgatgtcattgttgtcgcttctttttttcatccaaaactcacctgtgatttatcggcaaattctgttggcttcatctttaaaatatattcattatcgagccactttcaacacttccactgctataaccaccaagccaccttcatctaccttctggattattatactggcttcctgactggttgccctacagtctattcacagccccagagtaatcctcttaaacctaagtcagatcgtgtcattcatttgttcaaaaccttcaaagacttcccaacttattacagcaaagtcaggggccttgcagtggcacacgatgcctgtcatgatctgtctctttagttctttattgtgtctgcagtgctaataacagtgctcagcagggaacaggcgctcagtaaatatttgttgaatgaatgaatttataagatgccttattgtttacaaagtgcttttacatcttgtcttctggttactcatcttcaccatagtatcatgaagcacagatgatcatatctgtcttgcaaatcagtaaactgaggcaagagaggctgacctgcctgaagtaatacagtgggttgttggtggaggctaaactaagtcacaggttcattctcttaagctgaggctttctgctctgtagggagctgtctctgcatatggcaaagcacaaagctgaatgaggtctggacaaagaagctccactcacaatctagagagtatctggactattgcagtgattaaatgagataatgtaaggcacttagcacaatgtataacacagaagaaatgacagtcattgctgttacttttattattaaattattataagttggttgatgctggtggttggagagtttgggggtaaagagcaatggccagatatgtagaaatggtttaggaaaagtgtcaggagcaaacgtgacctgttgggagtgtctgctctatgtacactaaaataaaaagataattttaaaaaaccattttgttagtaaggtagttactaattaaaactaactcttttcatgtctacataaaggtggattatccctttttcctatacctgaaaacaactgggccagccatagaaggcccagaggtatgtcgactaaagcatcgcgtaaacaaggatggattttttaaaaagagagaaataaaagtcaggaaataaaggggtgtgtgtctctaagtgtggacagagtcctaggcagtaaggatggagaggagggagagccggagaaagatatgagggagaggagggtaaaggagaatgggaaaaagacaaggagagaaagcaggtagggttttatgccttcagcttagctattaacataataatagttaacacttactgagtgcttattgtgtgccgcacactgtttgcagcatttgaggatctcacgtgagatccctgaggcatgattgttcctgagagtttgctccaccttctctggttttggtccctgcactttgtggtgtgactctggtgcctccttgtgaaccacatgcccatgccactgatgttgacttgaccactgatttgaattggcttaatggatgtgactggatgca

SEQ ID NO: 30985 - DNA, 867 bp, Macaca Mulatta
  misc_feature (1)...(867): n = A,T,C or G
gggcaaaggtagaagaagaaatccagactctgtctcaagtgttagcagcaaaagagaagcatctagcagagatcaagcggaaacttggaatcaattctctacaggaactaaaacagaacattgccaaagggtggcaagacgtgacagcaacatctgcttacaagaagacatctgaaaccttgtcccaggctggacagaaggcctcagctgctttttcgtctgttggctcagtcatcaccaaaaagctggaagacgtaaaaaactccccaacttttaaatcatttgaagaaaaggtcgaaaacttaaagtctaaagtagggggaaccaagcctgctggtggtgattttggagaagtcttgaattcggctgcaaatgctaatgccaccaccacggagcctcttccgaaacagacacaggagagcctgtgaaattcctacctttgttctgctaccccactggcagatgcttgcaagcgaagtcaangaccacatcttggtaaacaatgcatttgcccaataaaatttcttacccaaaagggggcttttttaattttaagcttttaaacaatattttcccttttagacccaaaaatagtttttggtgggggtttaaaaccgaaagggaagaaataatccgttcaaacgttccaattttcctggggaaaaaaaacacccctttttaatcggataaattttaaatggtctcccctttgattttaaaggaaaaaccatgtgtatattaaaaaaaccactcgtaaatattaaacttgggggggaacatttctcccccgcaaacggatttcttaacgtcagcccttcccaggaattgggatcaggcgctggtgagtttaccccagaaatgtgaatg

SEQ ID NO: 30986 - DNA, 499 bp, Macaca Mulatta
  misc_feature (1)...(499): n = A,T,C or G
aggaatggctgctttaaatggtggcctgggcagcagtggcctttccaatggcaccgggagcaccatggaggccctcactcaggcctactcggnnnnnnnnnnnnnnnnnnnnnnnnnnnnnnnnnnnnnnnnnnnnnnnnnnnnnnnnnnnnnnnnnnnnnnnnnnnnnnnnnnnnnnnnnnnnnnnnnnnnnnnnnnnnnnnnnnnnnnnnnnnnnnnnnnnnnnnnnnnnnnnnnnnnnnnnnnnnnnnnnnnnnnnnnnnnnnnnnnnnnnnnnnnnnnnnnnnnnnnnnnnnnnnnnnnnnnnnnnnnnnnnnnnnnnnnnnnnnnggttttgtaagttacgacaatcctgtctcggcccaagctgccatccagtccatgaacggctttcagattggcatgaagcggcttaaagtacagctcaaacgttcgaagaatgacagcaagccctactgagcgtgctcccctctgagactggagtgagagggtcttctgg

SEQ ID NO: 30987 - DNA, 804 bp, Macaca Mulatta
  misc_feature (1)...(804): n = A,T,C or G
atctctttgttgggcagctaaagagctccctgacgtgtacagattgtggttactgttctacagtcttcgaccccttctgggacctctcactgcccattgctaagnnnnnnnnnnnnnnnnnnnnnnnnnnnnnnnnnnnnnnnnnnnnnnnnnnnnnnnnnnnnnnnnnnnnnnnnnnnnnnnnnnnnnnnnnnnnnnnnnnnnnnnnnnnnnnnnnnnnnnnnnnnnnnnnnnnnnnnnnnnnnnnnnnnnnnnnnnnnnnnnnnnnnnnnnnnnnnnnnnnnnnnnnnnnnnnnnnnnnnnnnnnnnnnnnnnnnnnnnnnnnnnnnnnnnnnnnnnnnnnnnnnnnnnnnnnnnnnnnnnnnnnnnnnnnnnnnnnnnnnnnnnnnnnnnnnnnnnnnnnnnnnnnnnnnnnnnnnnnnnnnnnnnnnnnnnnnnnnnnnnnnnnnnnnnnnnnnnnnnnnnnnnnnnnnnnnnnnnnnnnnnnnnncagcgtcactcccatgtcctccagccaagtgcgcaccagcgacgcctacctgctcttctacgaactggccagcccgccctcccgaatgtagcgccaggagccacgtcccttctcccttccccgtggtggccccgctccctaagtttcttaaaaagacaannnnnnnnnnnnnnnnnnnnnnncaaacctgacgagaaaaacaaacctgaagctgccgagcaggagtggacgcagcctggtcagggtctggagcaagcagccgggcgttcatgagctgtgaaagggcagggaagatcgcctggacgtggagccag

SEQ ID NO: 30988 - DNA, 882 bp, Macaca Mulatta
  misc_feature (1)...(882): n = A,T,C or G
atactgggaggatttccacagctgcacggtcacagcccttacggattgccaggaaggggcgaaagatatgtgggataaactgagaaaagaatccaaaaacctcaacatccaaggcagcttattcgaactctgcggcagcggcaacggggcggcggggtctctgctcccggcgctccccgtgctcctggtctctctctcggcagctttagcgacctggctttccttctgagcgtggggccagctccccccacgcgcccactcacactcactccatgctcccggaaatcgagaggaagatccattcgttctttggggacgttgtgattctctgtgatgctgaaaacactcatataggattgtgggaaatcctggttctcctttttatttcgtttgatttcttgtgttttatttgccaaatgttaccaatcagtgagcaagcaagcacagccaaaatcggacctcagctttagtccgtcttcacacacaaataagaaaacggcaaacccaccccatttttaaattttattattattannnnnnnnnttggcaaaagaatctcaggaacggccctgggccacctactatattaatcatgctagtaacatgaaaaatgatgggctcctcctaataggaaggcgaggagaggagaaggccaggggaatgaattcaagagagatgtccacggacgaaacatacggtgaataattcacgctcacgtcgttcttccacagtatcttgttttgatcatttccactgcacatttctcctcaagaaaagcgaaaggacggactgttggctttgtgtttggaggataggagggagagagggaagggaatgaggaaatctctggggtaagagtcaaggcttccagaagacaggctg

SEQ ID NO: 30989 - DNA, 202 bp, Macaca Mulatta
gatggattgaatttgggagaaatgaggaaggaagattaacaggagaaagcacaataatcctgccatggagtgatgactcagaataggcagggagagaacaagatcatttatctgctgaggttattttcctgttacaaaaccaacatgtaatttatggaaaattcacggattaactaagtgactaaaagataatttgaaaccc

SEQ ID NO: 30990 - DNA, 465 bp, Macaca Mulatta
gcagaaactcatggctgtatctatgattacaagagtgcagggaggagatacttgcacgaggcaaatcctgtggttaatgcaccaaaacttccaaaaatctaactcttcctctacatcttactgttctgcctgggaatcgtattataatgacagaagaaatactgtttagactattatttttgttcgactctaaaagatttgccaaataacaaaagcatacaatgcatactgttggagaacaagaatgctactgtattttacatctttatttcttggtgaaacaaaagttttaaaagtagttttaaaaactttacagtggaatgatttagctttgttattgcatgtcttgtgttaagtgttttatatatgatattgcagttttactagacaaatcttcaaaagatgcactttaggaaacgaaatacttcctaaataaccagccttccacattgtacagaatgagca

SEQ ID NO: 30991 - DNA, 455 bp, Macaca Mulatta
aagaggtggggcagggagaggaacccgacagactcacgctccagcagctttcctggtgcagtcctccgcattcctggaacagacagcaggacaccgacgtctctgacagcgggtgccttttggaaggccgccatcctcctgccctccatctgtggcgccaccccccggggggtttctcagactgcctggagcggattcttcgcgttggttttgccgcgttctctgtactctgggcgtgctgcctacgaatctgtggagctaaacagccttagatatcagcaggaggctttttggattctcctccttgaaaagatgctcagttaccaagcgtctccacctagaaaataaaaatacattaagatgggctttcattgctggttgtccgtttttgaattctcctttttcctgatgtttctttcttgtttcgtgtggcttattactttcagtttccttgt

SEQ ID NO: 30992 - DNA, 372 bp, Macaca Mulatta
aaaagatgttactgaggacctaggagaaatgctaaatacatacttttaaagcaaaaatacaaccaaacacattgacaaatatataaagatccacgtgtggctatgtgtgatatttcacactctgaattcttacttgatggaggtcttgtttgctgctacagttttaatcatccagggtgccattccaccctagaagagaaatacttttaggaaaaaaattaatcatgctattaattaatcaaatatctataaatgcataaagtacagtatttattcttgatacataggttttgagtcaagtgtattttacttagatttgtctttgactgctatactgaatcagtagtttcactctaagaaggaagggattga

SEQ ID NO: 30993 - DNA, 215 bp, Macaca Mulatta
gcaagttgctccctgagctgctccaaccttacacagaacgcgtggaacatctgagtgagttcctggtggacatcaagccttccttgacttttgatatcatccccctgctggacccctatgggcccgctggctctgacccctccctggagttcctggtggtcagcgaggagacctatcgtgggggcatggccgtcaaccgcttccgccttgagaat

SEQ ID NO: 30994 - DNA, 731 bp, Macaca Mulatta
gggaaattctcctactacaaacattcatttgtcaggagtaaggctgaattttctctcttcctgaaaccacttcagctagatggaagtctttcctttttctgtctgaaggcacgatatgttatacctagcccaaactggccaaaattagtttaattctaggtaagtggtttgatgtctagttaatttatgatattcttagcatttttttctctcctttttctagagagccactagagcagagttgctagtgaacagtttaatttccacatacgtcacagaaagagagctaaagggctctggttatcatccacagactgaccagtcaacccctaaataacctgatactagctccacaaatgttagctagattggaccatgtgtaatctgagtcagaagtcggaatcagaagagataaatgatgcgttatcactcatcaggaatgtctgtaacagtattgtaaaattgttatactttacctttacctgttgaccacatccatccttatctctctgatcaccttgctgtttaaggacagtccctgtactctacctatagtatttatctcaatgcttcctggtccttactttttctgttattatctcctttctcctacatatttaaatgcctagcatagtgccatacatatggtaaacaccagttcattatttttatttctttcctaatgtcatcttccccctcagcctatgaacataaacacatcttcatcttta

SEQ ID NO: 30995 - DNA, 703 bp, Macaca Mulatta
  misc_feature (1)...(703): n = A,T,C or G
gcaatgctaagaaaagagttaatggaagctgagaccaaaaaatatggtatgatttagccannnnnnnnnnnnnnnnnnnnnnnnnnnnnnnnnnnnnnnnnnnnnnnnnnnnnnnnnnnnnnnnnnnnnnnnnnnnnnnnnnnnnnnnnnnnnnnnnnnnnnnnnnnnnnnnnnnnnnnnnnnnnnnnnnnnnnnnnnnnnnnnnnnnnnnnnnnnnnnnnnnnnnnnnnnnnnnnnnnnnnnnnnnnnnnnnnnnnnnnnnnnnnnnnnnnnnnnnnnnnnnnnnnnnnnnnnnnnnnnnnnnnnnnnnnnnnnnnnnnnnnnnnnnnnnnnnnnnnnnnnnnnnnnnnnnnnnnnnnnnnnnnnnnnnnnnnnnnnnnnnnnnnnnnnnnnnnnnnnnnnnnnnnnnnnnnnnnnnnnnnnnnnnnnnnnaaaatatcatacttgcatcaccagatagacacatttccttctacacagaattatctccagagcttcttaaagcaaataaagcctccttcaaggaccgagtccctagtcaaattccctgaaggagtggagcctgtcatannnngtttatctagcatctgctcaagagtgtgctgcagtggagggaaatcagatgacctcccagtctggttgtgttaggtacaatcatgtgtaagaagtgccattcaagtcatgtcactggaggggactgaca

SEQ ID NO: 30996 - DNA, 796 bp, Macaca Mulatta
  misc_feature (1)...(796): n = A,T,C or G
cccagatccctgaaagtagtggagggaggcgccagggtgagtgaggtttccataggtagcccctaccgcctgcggatacccagagcttcatattttaggagaacgttcctccgcccagcgaggcgacggggctctgccggagttgcacgacagaaacagaaccccagcctttagggctgtggcaagtgtgggttgcgccatctgtaactaactaatcactcctgtctacaggcctgtgannnnnnnnnnnnnnnnnnnnnnnnnnnnnnnnnnnnnnnnnnnnnnnnnnnnnnnnnnnnnnnnnnnnnnnnnnnnnnnnnnnnnnnnnnnnnnnnnnnnnnnnnnnnnnnnnnnnnnnnnnnnnnnnnnnnnnnnnnnnnnnnnnnnnnnnnnnnnnnnnnnnnnnnnnnnnnaaaaaggaagacgccggcaacgagggaggaagcagatgtgcagaagggcatactcagagaggagaaggcgtccggggacagaaagccgcccgagaggcacactgtgcccaggaaacccagcacagagccccgcaaaaaaaatgaagacgaagagcgcatctttgatgccttcgacgcttcatttaaagatgactttgatggggttcccgtgttcattccttttcagaggaagaaaccctatgagtgcagtgagtgtgggcggatgtttaagcacaagacagaccacattcgccatcagagggtccacacgggagagaagcccttccagtgtgtgcagtgcgagaaagccttccggcacagctccgacgtcaccaaacaccaga

SEQ ID NO: 30997 - DNA, 194 bp, Macaca Mulatta
agaccactctggctcacatcatagccaacaacagcaagaaacatagcataaggtttgtgacattgtctgcaacaaatgccaagacaaatgatgtgcgagatgtcataaaacaagctcaaaatgaaaagagctttttcaaaaggaaaaccatcctttttattgatgagattcatcggttcaataaatctcagcag

SEQ ID NO: 30998 - DNA, 175 bp, Macaca Mulatta
gtgatacaattctggagactggagaagtaattccaccgatgaaagaatttcctgatcaacatcattaaagattatgtaaaaacttaaaaggcttatgagcctaaatttgttcctatattactgtatttactgaattttctggaaaagtaactttaataaagtttaatctcagaaa

SEQ ID NO: 30999 - DNA, 445 bp, Macaca Mulatta
tcctccccacaaactggttgttaaacatctaccagtgtagtgctgacatggatggtggaaaccttcagagagtgaattctctctgaatgtggctctactggacatttaggtctggttggagaatgccgtcaagggtttggccggcactgcactctggctggaatattactgagggctttgggttctgcactatcaagaggttgataatggagaaagattgagtgacaaactgtaatgtatcacttgggtctcaagaagaggcaggtgctagaaaacgctttccttcttccctggcttcttagtataatagaatcgggcaaggctgggtggagtggagtagtagggaggatgcccgtggccaatgccttggagagacttgactgctgtggttgcgtgtggcggtcgtgttggtacctcgctgcaatcctcttccccgcccagcatc

SEQ ID NO: 31000 - DNA, 959 bp, Macaca Mulatta
  misc_feature (1)...(959): n = A,T,C or G
agatctgcttccggctaagaacggggaggagcaaaccgtgcaattcctcctggaagtggtggacatactcctcaactatgtccgcaagacatttgatcgctccaccaaggtgctggacttccatcacccacaccagttgctggaaggcatggagggcttcaacttggagctctctgaccaccccgagtccctggagcagatcctggttgactgcagagagacattgaagtatggggttcgcacaggnnnnnnnnnnnnnnnnnnnnnnnnnnnnnnnnnnnnnnnnnnnnnnnnnnnnnnnnnnnnnnnnnnnnnnnnnnnnnnnnnnnnnnnnngtttacatatgaaattgcaccagtgtttgtcctcatggaacaaataacacttaagaagatgagagagatagttggatggtcaagtaaagatggtgatgggatattttctcctgnnnnnnnnnnnnnnnnnnnnnnnnnnnnnnnnnnnnnnnnnnnnnnnnnnnnnnnnnnnnnnnnnnnnnnnnnnnnnnnnnnnnnnnnnnnnnnnnnnnnnnnnnnnnnnnnnnnnnnnnnnnnnnnnnnnnnnnnnnnnnnnnnnnnnnnnnnnnnnnnnnnnnnnnnnnnnnnnnnnnnnnnnnnnnnnnnnnnnnnnnnnnnnnnnnnnnnnnnnnnnnnnnnnnnnnnnnnnnnnnnnnnnnnnnnnnnnnnnnnnnnnnnnnnnnnnnnnnnnnnnnnnnnnnnnnnnnnnnnnnnnnnnnnnnnnnnnnnnnnnnnnnnnnnnnnnnnnnnnnnnnnnnnnnnnnnnnnnnnnnnnnnnnnnnnnnnnnnnnnnnnnnnnnnnnnnnnnnnnnnnnnnnnnnnnnnnnnnnnnnnnnnnnnnnnagggccaactcagtcacctggaaccctcacaagatgatgggtgtgctgttgcagtgctctgccattctcgtcaaagaaaag

SEQ ID NO: 31001 - DNA, 560 bp, Macaca Mulatta
ttcagagaccacccacccctgccagcaaggagaccgagggcagcctcagcgactcggattttaaggagccgccctcggagggccgcctcgacgcgttgcagggcgccccccgcaccggcgggccctccccggctgggccagcggcggcgcggctggcggaggacccggcccctcactaccccgcgggcgcgccggcgccgggcccgcatccagccgcgggagagctgcccccgggtcccggcgggccctcggttatccattcgcaaaaaacgccgccgcctccggcggtgctcgccaagcccaaattgtggtctctggcagagatcgccacatcctcggacaaggtcaaggacgggggtggcgggagcgagggctctccatgcccaccgtgtcccgggcccatagctgggcaagccctaggaggcagccgtgcgtcgccgaccccggcgccatcgcgctcgccctcggcgcagtgtccttttccaggcgagacggtgctgtcccggcctctctactacaccgcgcccttctatcccggctacacgaactatggctccttc

SEQ ID NO: 31002 - DNA, 770 bp, Macaca Mulatta
  misc_feature (1)...(770): n = A,T,C or G
cagaaccgcagagcaaaggaaaggaaaatcaacaagaagaagtnnnnnnnnnnnnnnnnnnaatcaacaagaagaagttgcagcagcaacagcagcagccttcgccgcagccgcctccgccgccaccacagcctccccagcctcagccaggtcctctgagaagtgtccaggatcccttgagtccggtgtcttccctgcaagcctcagtgcctggctctgtccctggggttctggggccaactgggggggtgctaaaccccactgtcacccagtgacccacaggagtctgcagcagcagagcaattccaggctgagccatgaggagcgtggactccgcaaaactcctcaggagagacccctcccctcccacccacagctgtagacctacaaacctagctctcagaggaaaaatgggagctgggagtaagacaagtgggatttggggcctcaagaaatatactctcccagannnnnnnnnnnnnnnnnnnnnnnnnntctgccactgaggagacagagagccaccactgggcttcattcaggactggcagaagcattgcctggactgaccacaccaacgaggccttcagcctcctccccagctcttctcatcctagatctgcaggctgcacctctggctagagctgaggggagagagggacttaggggaacagcaagcttgannnnnnnnnnnnnnngcctgctcatggccctcggaggtccagctgggcctcctgcctccgggcaggcaaggtttacacggcagaagccaa

SEQ ID NO: 31003 - DNA, 6396 bp, Macaca Mulatta
  misc_feature (1)...(6396): n = A,T,C or G
ggtctcgaagtgctgcagctaaaactcatacaactgccttgactgggcgaagtccttcccctgcttcaggacgacgaggggagggagatnnnnnnnnnnnnnnnnnnnnnnnnnnnnnnnnnnnnnnnnnnnnnnnnnnnnnnnnnnnnnnnnnnnnnnnnnnnnnnnnnnnnnnnnnnnnnnnnnnnnnnnnnnnnnnnnnnnnnnnnnnnnnnnnnnnnnnnnnnnnnnnnnnnnnnnnnnnnnnnnnnnnnnnnnnnnnnnnnnnnnnnnnnnnnnnnnnnnnnnnnnnnnnnnnnnnnnnnnnnnnnnnnnnnnnnnnnnnnnnnnnnnnnnnnnnnnnnnnnnnnnnnnnnnnnnnnnnnnnnnnnnnnnnnnnnnnnnnnnnnnnnnnnnnnnnnnnnnnnnnnnnnnnnnnnnnnnnnnnnnnnnnnnnnnnnnnnnnnnnnnnnnnnnnnnnnnnnnnnnnnnnnnnnnnnnnnnnnnnnnnnnnnnnnnnnnnnnnnnnnnnnnnnnnnnnnnnnnnnnnnnnnnnnnnnnnnnnnnnnnnnnnnnnnnnnnnnnnnnnnnnnnnnnnnnnnnnnnnnnnnnnnnnnnnnnnnnnnnnnnnnnnnnnnnnnnnnnnnnnnnnnnnnnnnnnnnnnnnnnnnnnnnnnnnnnnnnnnnnnnnnnnnnnnnnnnnnnnnnnnnnnnnnnnnnnnnnnnnnnnnnnnnnnnnnnnnnnnnnnnnnnnnnnnnnnnnnnnnnnnnnnnnnnnnnnnnnnnnnnnnnnnnnnnnnnnnnnnnnnnnnnnnnnnnnnnnnnnnnnnnnnnnnnnnnnnnnnnnnnnnnnnnnnnnnnnnnnnnnnnnnnnnnnnnnnnnnnnnnnnnnnnnnnnnnnnnnnnnnnnnnnnnnnnnnnnnnnnnnnnnnnnnnnnnnnnnnnnnnnnnnnnnnnnnnnnnnnnnnnnnnnnnnnnnnnnnnnnnnnnnnnnnnnnnnnnnnnnnnnnnnnnnnnnnnnnnnnnnnnnnnnnnnnnnnnnnnnnnnnnnnnnnnnnnnnnnnnnnnnnnnnnnnnnnnnnnnnnnnnnnnnnnnnnnnnnnnnnnnnnnnnnnnnnnnnnnnnnnnnnnnnnnnnnnnnnnnnnnnnnnnnnnnnnnnnnnnnnnnnnnnnnnnnnnnnnnnnnnnnnnnnnnnnnnnnnnnnnnnnnnnnnnnnnnnnnnnnnnnnnnnnnnnnnnnnnnnnnnnnnnnnnnnnnnnnnnnnnnnnnnnnnnnnnnnnnnnnnnnnnnnnnnnnnnnnnnnnnnnnnnnnnnnnnnnnnnnnnnnnnnnnnnnnnnnnnnnnnnnnnnnnnnnnnnnnnnnnnnnnnnnnnnnnnnnnnnnnnnnnnnnnnnnnnnnnnnnnnnnnnnnnnnnnnnnnnnnnnnnnnnnnnnnnnnnnnnnnnnnnnnnnnnnnnnnnnnnnnnnnnnnnnnnnnnnnnnnnnnnnnnnnnnnnnnnnnnnnnnnnnnnnnnnnnnnnnnnnnnnnnnnnnnnnnnnnnnnnnnnnnnnnnnnnnnnnnnnnnnnnnnnnnnnnnnnnnnnnnnnnnnnnnnnnnnnnnnnnnnnnnnnnnnnnnnnnnnnnnnnnnnnnnnnnnnnnnnnnnnnnnnnnnnnnnnnnnnnnnnnnnnnnnnnnnnnnnnnnnnnnnnnnnnnnnnnnnnnnnnnnnnnnnnnnnnnnnnnnnnnnnnnnnnnnnnnnnnnnnnnnnnnnnnnnnnnnnnnnnnnnnnnnnnnnnnnnnnnnnnnnnnnnnnnnnnnnnnnnnnnnnnnnnnnnnnnnnnnnnnnnnnnnnnnnnnnnnnnnnnnnnnnnnnnnnnnnnnnnnnnnnnnnnnnnnnnnnnnnnnnnnnnnnnnnnnnnnnnnnnnnnnnnnnnnnnnnnnnnnnnnnnnnnnnnnnnnnnnnnnnnnnnnnnnnnnnnnnnnnnnnnnnnnnnnnnnnnnnnnnnnnnnnnnnnnnnnnnnnnnnnnnnnnnnnnnnnnnnnnnnnnnnnnnnnnnnnnnnnnnnnnnnnnnnnnnnnnnnnnnnnnnnnnnnnnnnnnnnnnnnnnnnnnnnnnnnnnnnnnnnnnnnnnnnnnnnnnnnnnnnnnnnnnnnnnnnnnnnnnnnnnnnnnnnnnnnnnnnnnnnnnnnnnnnnnnnnnnnnnnnnnnnnnnnnnnnnnnnnnnnnnnnnnnnnnnnnnnnnnnnnnnnnnnnnnnnnnnnnnnnnnnnnnnnnnnnnnnnnnnnnnnnnnnnnnnnnnnnnnnnnnnnnnnnnnnnnnnnnnnnnnnnnnnnnnnnnnnnnnnnnnnnnnnnnnnnnnnnnnnnnnnnnnnnnnnnnnnnnnnnnnnnnnnnnnnnnnnnnnnnnnnnnnnnnnnnnnnnnnnnnnnnnnnnnnnnnnnnnnnnnnnnnnnnnnnnnnnnnnnnnnnnnnnnnnnnnnnnnnnnnnnnnnnnnnnnnnnnnnnnnnnnnnnnnnnnnnnnnnnnnnnnnnnnnnnnnnnnnnnnnnnnnnnnnnnnnnnnnnnnnnnnnnnnnnnnnnnnnnnnnnnnnnnnnnnnnnnnnnnnnnnnnnnnnnnnnnnnnnnnnnnnnnnnnnnnnnnnnnnnnnnnnnnnnnnnnnnnnnnnnnnnnnnnnnnnnnnnnnnnnnnnnnnnnnnnnnnnnnnnnnnnnnnnnnnnnnnnnnnnnnnnnnnnnnnnnnnnnnnnnnnnnnnnnnnnnnnnnnnnnnnnnnnnnnnnnnnnnnnnnnnnnnnnnnnnnnnnnnnnnnnnnnnnnnnnnnnnnnnnnnnnnnnnnnnnnnnnnnnnnnnnnnnnnnnnnnnnnnnnnnnnnnnnnnnnnnnnnnnnnnnnnnnnnnnnnnnnnnnnnnnnnnnnnnnnnnnnnnnnnnnnnnnnnnnnnnnnnnnnnnnnnnnnnnnnnnnnnnnnnnnnnnnnnnnnnnnnnnnnnnnnnnnnnnnnnnnnnnnnnnnnnnnnnnnnnnnnnnnnnnnnnnnnnnnnnnnnnnnnnnnnnnnnnnnnnnnnnnnnnnnnnnnnnnnnnnnnnnnnnnnnnnnnnnnnnnnnnnnnnnnnnnnnnnnnnnnnnnnnnnnnnnnnnnnnnnnnnnnnnnnnnnnnnnnnnnnnnnnnnnnnnnnnnnnnnnnnnnnnnnnnnnnnnnnnnnnnnnnnnnnnnnnnnnnnnnnnnnnnnnnnnnnnnnnnnnnnnnnnnnnnnnnnnnnnnnnnnnnnnnnnnnnnnnnnnnnnnnnnnnnnnnnnnnnnnnnnnnnnnnnnnnnnnnnnnnnnnnnnnnnnnnnnnnnnnnnnnnnnnnnnnnnnnnnnnnnnnnnnnnnnnnnnnnnnnnnnnnnnnnnnnnnnnnnnnnnnnnnnnnnnnnnnnnnnnnnnnnnnnnnnnnnnnnnnnnnnnnnnnnnnnnnnnnnnnnnnnnnnnnnnnnnnnnnnnnnnnnnnnnnnnnnnnnnnnnnnnnnnnnnnnnnnnnnnnnnnnnnnnnnnnnnnnnnnnnnnnnnnnnnnnnnnnnnnnnnnnnnnnnnnnnnnnnnnnnnnnnnnnnnnnnnnnnnnnnnnnnnnnnnnnnnnnnnnnnnnnnnnnnnnnnnnnnnnnnnnnnnnnnnnnnnnnnnnnnnnnnnnnnnnnnnnnnnnnnnnnnnnnnnnnnnnnnnnnnnnnnnnnnnnnnnnnnnnnnnnnnnnnnnnnnnnnnnnnnnnnnnnnnnnnnnnnnnnnnnnnnnnnnnnnnnnnnnnnnnnnnnnnnnnnnnnnnnnnnnnnnnnnnnnnnnnnnnnnnnnnnnnnnnnnnnnnnnnnnnnnnnnnnnnnnnnnnnnnnnnnnnnnnnnnnnnnnnnnnnnnnnnnnnnnnnnnnnnnnnnnnnnnnnnnnnnnnnnnnnnnnnnnnnnnnnnnnnnnnnnnnnnnnnnnnnnnnnnnnnnnnnnnnnnnnnnnnnnnnnnnnnnnnnnnnnnnnnnnnnnnnnnnnnnnnnnnnnnnnnnnnnnnnnnnnnnnnnnnnnnnnnnnnnnnnnnnnnnnnnnnnnnnnnnnnnnnnnnnnnnnnnnnnnnnnnnnnnnnnnnnnnnnnnnnnnnnnnnnnnnnnnnnnnnnnnnnnnnnnnnnnnnnnnnnnnnnnnnnnnnnnnnnnnnnnnnnnnnnnnnnnnnnnnnnnnnnnnnnnnnnnnnnnnnnnnnnnnnnnnnnnnnnnnnnnnnnnnnnnnnnnnnnnnnnnnnnnnnnnnnnnnnnnnnnnnnnnnnnnnnnnnnnnnnnnnnnnnnnnnnnnnnnnngactctcccgtagaagccgttctgcctcatcctcaccagattctcgctctagaactcccccaaggcgccggagaagtccttcagtgtcttccccggagccagtcgaaaagtcaaggtcttcacgccgacggcgctcagcttcatctccacgcactaagacaacctcaaggagaggccgctctccttcaccaaagcctcgtggactgcagaggtcccgttcccgctcaaggagagagaaaaccatatttcccgacgtcgagataggtctggatcttctcagtcaatctctcggcgaagacagcggagccggtcaaggtcacgggttactcggcgacggaggggaggctctggttatcactcaaggtcccctgcccggcaggaaagttcccggacctcctctcgacgccgaagaggccgctctcggacacccccaacgagtcggaagcgttctcgctcacggacatcaccagccccatggaaacgctctagatctcgagcctctccagccactcaccggcgatccannnnnnnnnnnnnnnnnnnnnnnnnnnnnnnnnnnnnnnnnnnnnnnnnnnnnnnnnnnnnnnnnnnnnnnnnnnnnnnnnnnnnnnnnnnnnnnnnnnnnnnnnnnnnnnnnnnnnnnnnnnnnnnnnnnnnnnnnnnnnnnnnnnnnnnnnnnnnnnnnnnnnnnnnnnnnnnnnnnnnnnnnnnnnnnnnnnnnnnnnnnnnnnnnnnnnnnnnnnnnnnnnnnnnnnnnnnnnnnnnnnnnnnnnnnnnnnnnnnnnnnnnnnnnnnnnnnnnnnnnnnnnnnnnnnnnnnnnnnnnnnnnnnnnnnnnnnnnnnnnnnnnnnnnnnnnnnnnnnnnnnnnnnnnnnnnnnnnnnnnnnnnnnnnnnnnnnnnnnnnnnnnnnnnnnnnnnnnnnnnnnnnnnnnnnnnnnnnnnnnnnnnnnnnnnnnnnnnnnnnnnnnnnnnnnnnnnnnnnnnnnnnnnnnnnnnnnnnnnnnnnnnnnnnnnnnnnnnnnnnnnnnnnnnnnnnnnnnnnnnnnnnnnnnnnnnnnnnnnnnnnnnnnnnnnnnnnnnnnnnnnnnnnnnnnnnnnnnnnnnnnnnnnnnnnnnnnnnnnnnnnnnnnnnnnnnnnnnnnnnnnnnnnnnnnnnnnnnnnnnnnnnnnnnnnnnnnnnnnnnnnnnnnnnnnnnnnnnnnnnnnnnnnnnnnnnnnnnnnnnnnnnnnnnnnnnnnnnnnnnnnnnnnnnnnnnnnnnnnnnnnnnnnnnnnnnnnnnnnnnnnnnnnnnnnnnnnnnnnnnnnnnnnnnnnnnnnnnnnnnnnnnnnnnnnnnnnnnnnnnnnnnnnnnnnnnnnnnnnnnnnnnnnnnnnnnnnnnnnnnnnnnnnnnnnnnnnnnnnnnnnnnnnnnnnnnnnnnnnnnnnnnnnnnnnnnnnnnnnnnnnnnnnnnnnnnnnnnnnnnnnnnnnnnnnnnnnnnnnnnnnnnnnnnnnnnnnnnnnnnnnnnnnnnnnnnnnnnnnnnnnnnnnnnnnnnnnnnnnnnnnnnnnnnnnnnnnnnnnnnnnnnnnnnnnnnnnnnnnnnnnnnnnnnnnnnnnnnnnnnnnnnnnnnnnnnnnnnnnnnnnnnnnnnnnnnnnnnnnnnnnnnnnnnnnnnnnnnnnnnnnnnnnnnnnnnnnnnnnnnnnnnnnnnnnnnnnnnnnnnnnnnnnnncagaacagcggtggcaccttcggctgtgaacctggctgaccctcgcactcccacagccccagctgtgaacctagcaggggccagaaccccagctgccttggcagctctgagtctcacaggctctggcaccccaccagctgctgcaaactatccctccagctccagaacaccacaggctccagcctctgcaaacctggtgggtcctaaaaaaagcacatgccacagctcctgtgaatattgccggctccagaaccgctgcagccttggcccccgcgagcctcaccagtgctaggatggctccaacattgtctggtgcaaacctcaccagccccagggtgcccctctctgcctatgagcgtgtcagtggcagaacctcaccaccgctccttgaccgagccaggtccagagcacca

SEQ ID NO: 31004 - DNA, 156 bp, Macaca Mulatta
gtttacatgccaatacaatttataataaacactcatttttcctccctctggagagttggttgttaaccatttaccagcacatcctgtccctctctgctctacagagcaggccagtttcttcagccccataatttccccaccgtacagatctttcac

SEQ ID NO: 31005 - DNA, 238 bp, Macaca Mulatta
gttttcctattagcatccatttaacagctgggctattattaccctatgtagactgatactttccatgcgtttgcgtgcctgaaagttggaaccaacaaagtaaggggactgccattaagtgacttcttttgttttctctttcagcaaatgttcccagcaggccacaggtaagagttaatgggttggttggctctatgttactgatcccaacctagagtaagcagattatccaccactg

SEQ ID NO: 31006 - DNA, 826 bp, Macaca Mulatta
  misc_feature (1)...(826): n = A,T,C or G
gaggggctcccggaggaactgcgttcccggacaaactcaggatccgctgtatggttactttgctgctgtagctggacaggatgggcagatagatgctgatgaattgcagagatgtctgacacagtctggcattgctggaggatacaaaccttttaacctggagacttgcaggcttatggtttcaatgctggatagagatatgtctggcaaaatgggtttcaatgaatttaaagaactctgggctgtactgaatggctggagacaacactttatcagttttgacactgacaggagtggaacagtagatccacaagaattgcagaaggccctgacaacaatgggatttaggttgagtccccaggctgtgaattcaattgcaaaacgatacagcaccaatggaaagatcacctttgatgactacatcgcctgctgcgtcaaactgagggctcttacagacagctttcgaagacgggatactgctcagcaaggtgttgtgaatttcccatatgatgatttcattcaatgtgtcatgagcgtttaaatcaagaggaagctgcatgaatgtaatcgacattccaactggaatatcctcctttgcttgtcctctttgccttcagtaatatgtgtaaacttacatcacgactttcaatgctgttgtaaagtttattactttatgtaaaactgaagttttgtttttaattttgataataaattctttggaactttcaaaaaaccacaaacaaaccaccccaaccccacaaacacacacaacaacacnnnnnnnnnnnnnntacccanatgtcgccctatttagtgagtcgtatta

SEQ ID NO: 31007 - DNA, 430 bp, Macaca Mulatta
  misc_feature (1)...(430): n = A,T,C or G
gctgctccacgtcaaagaatagagttgacctttgatgaacattattatatagaaccatcatttgagtgtcggtttgatcacttggaagttcgagatgggccatttggtttctctcctcttatagatcgttactgtggtgtgaaaagccctccattaattagatcaacagggagattcatgtggattaagtttagttctgatgaagagcttgaaggactgggatttcgagcaaaatactcatttattccagncagatccagattttacttacctaggaggtattttaaatcccattccagnagattgtcagtttgagctctcgggagctgatggaatagtgcgctctagtcaggtagaacaagaggagaaaacaaaaccaggccaagccgttgattgcatctggaccattaaagccactccaaaagctaag

SEQ ID NO: 31008 - DNA, 921 bp, Macaca Mulatta
  misc_feature (1)...(921): n = A,T,C or G
aaattggatgaaccttcgggatgctgaaacagggaagatactctggcaaggaacagaagacctgtctgtccctggtgtggagcatgaannnnnnnnnnnnnnnnnnnnnnnnnnnnnnnnnnnnnnnnnnnnnnnnnnnnnnnnnnnnnnnnnnnnnnnnnnnnnnnnnnnnnnnnnnnnnnnnnnnnnnnnnnnnnnnnnnnnnnnnnnnnnnnnnnnnnnnnnnnnnnnnnnnnnnnnnnnnnnnnnnnnnnnnnnnnnnnnnnnnnnnnnnnnnnnnnnnnnnnnnnnnnnnnnnnnnnnnnnnnnnnnnnnnnnnntgggaacgttatcatagaaacaaagttttttgacgacgatcttcttgtaagcacatccagagtgagacttttctatgtttgaaagaagaatgtgtgcgcatgtcaagaatttgggttttttggagggaggaggaaactgtgtttacttttttcctccacacttttgatttttgacacttccacccctaattccctcaacagcagaacctacctgcagccaccaggggaccagctctgtgtaggtaaccagatggctctttttcccaagctgccatcttccagctgaccagactaaactcccaaccccagaccagnnnnnnnnnnnnnnnnnnnnnnnnnnnnnnnnnnnnnnnnnnnnnnnnnnnnnnnnnnnnnnnnnnnnnnnnnnnnnnnnnnnnnnnnnnnnnnnnnnnnnnnnnnnnnnnnnnnnnnnnnnnnnnnnnnnnnnnnnnnnnnnnnnnnnnnnnnnnnnnnnnnnnnnnnnnnnnnnnnnnnnnnnnnnnnnnnnnnnnnnnnnnnnnnnnnnnnnnntgtaaaatagactgtgatattattacataatgtaattaaaaatatgaattaaaatattcctacagtcttt

SEQ ID NO: 31009 - DNA, 171 bp, Macaca Mulatta
  misc_feature (1)...(171): n = A,T,C or G
ncacaggggagaagccgttccagtgtgagttcgagggctgcgaccggcgcttcgccaacagcagcgacaggaagaagcacatgcacgtccacacctcggataagccctatctctgtaagatgtgcgacaagtcctacacgcaccccagctcgctgcggaagcacatgaagg

SEQ ID NO: 31010 - DNA, 833 bp, Macaca Mulatta
gggttaagactaggtgtgacaaccgtataaaagagagcaatgaacttgccttgatctctagaatttcctgatgatggctggagatacatgcacatgggcggaaagaaaaagagagatacagccataagatgagctccacatattccaaacactttctgaagcccagcagttaactgcatcctcagtacagcttggacgatggcaccataagaagtgaaaatgggggtgagaagtatgagaacaaaaatggagcttgtgattatgagggtcagcttatttgcatgggtactgacccacaataatctcaaaagtgctggaacttcacagaaaaagtgatctacttggtgatgtccacacagcggtacccagaaggagaaggaggaattaagtgctgagtttgtaaaaccacttacccaagaagccacagccaacaagcagcagaaacgagggtgcatgaggacagtgtaatgcaaaagtctacacacagctgcgtaacagtcatagtacatcatcaccagtaggacacactctgtggttcccagtgtgagaacaaagtaaagttgaaccatgcaaccagcataagaaatggtcttttccagcccccagagattgtccagcaactgagggatagagttggtggtgtaacagagatccagaaatgagagacttgaaaggaagaaatacaagggagtgtgtagatgggagtccaggtaggacaggataatgatgaacaggtttcctatcagtgtcatcaagtagaagatccagaaacccactaagataactacttccagatgaggccaattagaaaatccaactaaaataaagtaccc

SEQ ID NO: 31011 - DNA, 572 bp, Macaca Mulatta
  misc_feature (1)...(572): n = A,T,C or G
agccattccttctatttggagagggaaatacttcagctccgggaatgaacctgcagaaaacaacccggtgacgccgatgctgcggcatcttatgtacaaaataaagtctactggtcccatcactgtggccgagtacatgaaggaggtgttgactaatccagccaaggnnnnnnnnnnnnnnnnnnnnnnnnnnnnnnnnnnnnnnnnnnnnnnnnnnnnnnnnnnnnnnnnnnnnnnnnnnnnnnnnnnnnnnnnnnnnnnnnnnnnnnnnnnnnnnnnnnnnnnnnnnnnnnnnnnnnnnnnnnnnnnnnnnnnnnnnnnnnnnnnnnnnnnnnnnnnnnnnnnnnnnnnnnnnnnggtgttcactcaacttggatctgtgctgaaaaactgtgacatttcagtacatctggtagaggtaagccaaaaattaagtgagattcaagcattgacactgactgaagagaaggtcccgttagagcgaaatgctggatccccagtgtatatgaaaggtgtcactaagtctgggattccaatttcctggtaccgacatgtgcacgatgttccaaaag

SEQ ID NO: 31012 - DNA, 850 bp, Macaca Mulatta
ttcctcagacagtaaatgatggggttgaggagtggaacaatgacagtgtagagaacagataccactttgttggaattgtaggcatacatgagtttgggacgggcataggtgaaaagggttgtggaatagaagagaattacaacggtcagatgggaggcacaggtggagaatgccttttggcggccctgagcagaagggatcctgaggatggtggcaaggatagcagcataggatgccaccacaacacaaagaggaatagcaatgaccatgagggccaagaagaagtccaccagctcagcctgtgaggagtcctcacaggagacgttaaggagtggagagatatcacaaaagtagtgattgatctgaggcgtgccacagtagtgaagttgcactataaaaaccatcttaatcatggcagtcatgagtccacagaaccagcatcctccagccagtgtgccacagagctggttgatcatgatgactgggtagcgtagtggattacaaatggctacatagcggtcaaaggccatgacagcaagaaggatgtactcagtgcagacaaaggtcacaaaaaagtaaagttgagtcatgcaaccattgaaggaaatactcttgtcgtgactgaggaagtcaacaagcatcttggggctgatgactgtgacataccacatctccaggaaggagaggtggctcaggaagaagtacatgggcttatgtagctgcccatcactgtggatagctaagatgataagaagattctccagcagtgtcagcaagtaggttgccaggaaaacggagaaaagaagaagctggaaggctggtcgtgttggaaaccccagaagaatgaaat

SEQ ID NO: 31013 - DNA, 823 bp, Macaca Mulatta
cccagcagtccaggctgctccatgcccgttacttctctccgcaggcatggaaggccaagtgttggctttgatgacattcagaggcacctggttccaggcttgtttctatatcttgtacgcagattttatttgtccttttgaatcatagagttcctaaatgatatcttccagtatccttatgagactttacttagatataggggctattcagtgtagagtgcagacagaccaagaagggtgcagaagatatggaatggctttaaacagggagatgggccatgcagatgaggccttatcctcaggtctaaattcaatctgtctttgtaggagacaagatgccaactggcaagcagctagctgaccttggctataagaccttctctgcctccatgatgctccttactgtgtatggggggtacctctgcagtgtcggaatctaccactatttccagcagcgcagggcccagcgccaggcggcagaagaacagaagacctcaggaatcctgtagatctggggggctttttctcctgagcagagaggcccaaggcatgctgtggagagacttcacctgccaccatttccaggtcaacaggactagagcgttgatggttttcaaactctgttggaagaaagtgtctgtaatttctctggttctgccagtctgtgccagtttgacagtttatggaggctgttgaatcataatagcaatgtgagtgtgaggtacacctacagacattaaatattttgccatgtctgtgtcttggtgttttttgtttacccaaatagtgtatgaaccacaaaaagggagccttgtctaccagt

SEQ ID NO: 31014 - DNA, 472 bp, Macaca Mulatta
tattttctcttatgccaccaagagacaaaataacgatattctcatcttttggtctaaggatataggatacagttttacagtgggtgggtctgaaatattattcgaagttcctgaagtcacagtagctccagtacacatttgtacaagctgggagtccgcctcggggatcgtggagttctgggtggatggaaagcccagggcaaggaagagtctgaagaggggatacactgtgggggaagatgcaagcatcatcttggggcaggagcaggattccttcggtgggagctttgaaacacagcagtccctggtgggagacattggaaatgtgaacatgtgggactttgtgctgtcaccagatgagattagcaccgtctatcgtggcgggaccttcagtcctagtgtcctgtactggcgggcactgaagtatgaagtgcaaggtgaagtgttcatcaaaccccagctgtggtcctga

SEQ ID NO: 31015 - DNA, 3189 bp, Macaca Mulatta
  misc_feature (1)...(3189): n = A,T,C or G
atgagtatctctcttccaggcaagatcctcttccgcagaagccacatccgggatgtagctgtgaagagactgaagcctatcgatgaatactgccggnnnnnnnnnnnnnnnnnnnnnnnnnnnnnnnnnnnnnnnnnnnnnnnnnnnnnnnnnnnnnnnnnnnnnnnnnnnnnnnnnnnnnnnnnnnnnnnnnnnnnnnnnnnnnnnnnnnnnnnnnnnnnnnnnnnnnnnnnnnnnnnnnnnnnnnnnnnnnnnnnnnnnnnnnnnnnnnnnnnnnnnnnnnnnnnnnnnnnnnnnnnnnnnnnnnnnnnnnnnnnnnnnnnnnnnnnnnnnnnnnnnnnnnnnnnnnnnnnnnnnnnnnnnnnnnnnnnnnnnnnnnnnnnnnnnnnnnnnnnnnnnnnnnnnnnnnnnnnnnnnnnnnnnnnnnnnnnnnnnnnnnnnnnnnnnnnnnnnnnnnnnnnnnnnnnnnnnnnnnnnnnnnnnnnnnnnnnnnnnnnnnnnnnnngtgtccaagagacgcaaggcccatctgcggcgcctggatcgnnnnnnnnnnnnnnnnnnnnnnnnnnnnnnnnnnnnnnnnnnnnnnnnnnnnnnnnnnnnnnnnnnnnnnnnnnnnnnnnnnnnnnnnnnnnnnnnnnnnnnnnnnnnnnnnnnnnnnnnnnnnnnnnnnnnnnnnnnnnnnnnnnnnnnnnnnnnnnnnnnnnnnnnnnnnnnnnnnnnnnnnnnnnnnnnnnnnnnnnnnnnnnnnnnnnnnnnnnnnnnnnnnnnnnnnnnnnnnnnnnnnnnnnnnnnnnnnnnnnnnnnnnnnnnnnnnnnnnnnnnnnnnnnnnnnnnnnnnnnnnnnnnnnnnnnnnnnnnnnnnnnnnnnnnnnnnnnnnnnnnnnnnnnnnnnnnnnnnnnnnnnnnnnnnnnnnnnnnnnnnnnnnnnnnnnnnnnnnnnnnnnnnnnnnnnnnnnnnnnnnnnnnnnnnnnnnnnnnnnnnnnnnnnnnnnnnnnnnnnnnnnnnnnnnnnnnnnnnnnnnnnnnnnnnnnnnnnnnnnnnnnnnnnnnnnnnnnnnnnnnnnnnnnnnnnnnnnnnnnnnnnnnnnnnnnnnnnnnnnnnnnnnnnnnnnnnnnnnnnnnnnnnnnnnnnnnnnnnnnnnnnnnnnnnnnnnnnnnnnnnnnnnnnnnnnnnnnnnnnnnnnnnnnnnnnnnnnnnnnnnnnnnnnnnnnnnnnnnnnnnnnnnnnnnnnnnnnnnnnnnnnnnnnnnnnnnnnnnnnnnnnnnnnnnnnnnnnnnnnnnnnnnnnnnnnnnnnnnnnnnnncaacctgagccgccgcactagcacgctgacccggcccaaggtgcccccgccagcgccccccagcaagcccaaggaggctgaggagggccctacgggggccagtgagagccaggactccccacggaagctcaagtatgaggaacctgagtatgacatccctgcattcggctttgactcagagcccgagctgagcgaggagcctgtggaggacagagcctcaggggagaggcggcctgcccagccccaccggccctcgccggcctcttctctgcagcgggcccgcttncaggtgggtgagtcttctgaggacgtggccctggaagaggagaccatctatgagaatgagggcttccggncatatgcagaggacaccctgtcagccagaagctcctctggngacagtgactccccaggcagctcctcgctgtccctggccaggnaaaactccccccaaatcagctcccccaaagcatcattcactcctaaagcttcagggcagaaaaaaatgcccagggcagaactgggggaagaaaccactcctcagcctccttttnnnnnnnnnnnnnnnnnnnnnnnnnnnnnnnnnnnnnnnnnnnnnnnnnnnnnnnnnnnnnnnnnnnnnnnnnnnnnnnnnnnnnnnnnnnnnnnnnnnnnnnnnnnnnnnnnnnnnnnnnnnnnnnnnnnnnnnnnnnnnnnnnnnnnnnnnnnnnnnnnnnnnnnnnnnnnnnnnnnnnnnnnnnnnnnnnnnnnnnnnnnnnnnnnnnnnnnnnnnnnnnnnnnnnnnnnnnnnnnnnnnnnnnnnnnnnnnnnnnnnnnnnnnnnnnnnnnnnnnnnnnnnnnnnnnnnnnnnnnnnnnnnnnnnnnnnnnnnnnnnnnnnnnnnnnnnnnnnnnnnnnnnnnnnnnnnnnnnnnnnnnnnnnnnnnnnnnnnnnnnnnnnnnnnnnnnnnnnnnnnnnnnnnnnnnnnnnnnnnnnnnnnnnnnnnnnnnnnnnnnnnnnnnnnnnnnnnnnnnnnnnnnnnnnnnnnnnnnnnnnnnnnnnnnnnnnnnnnnnnnnnnnnnnnnnnnnnnnnnnnnnnnnnnnnnnnnnnnnnnnnnnnnnnnnnnnnnnnnnnnnnnnnnnnnnnnnnnnnnnnnnnnnnnnnnnnnnnnnnnnnnnnnnnnnnnnnnnnnnnnnnnnnnnnnnnnnnnnnnnnnnnnnnnnnnnnnnnnnnnnnnnnnnnnnnnnnnnnnnnnnnnnnnnnnnnnnnnnnnnnnnnnnnnnnnnnnnnnnnnnnnnnnnnnnnnnnnnnnnnnnnnnnnnnnnnnnnnnnnnnnnnnnnnnnnnnnnnnnnnnnnnnnnnnnnnnnnnnnnnnnnnnnnnnnnnnnnnnatccagcagtgaagatgaggaacgggtccgacagtgcggttcaggccccagtcggtgttgtgtccccaccaccaaggacaccacctgtctggcgccctgccgaggaatgagtcactcacgccccccgatgccttccgaggcgtccgacggaactcctcctttagcactgctcgctccgctgctgccgaggccaagggccgcctggccgaacgggccgccagccagggttcagactcacccctgctgtccgcccagcgcaacggcatccccgtgtcccccgtgcgccccaagcccattgagaagtctcagttcatccacaacaacctcaaagacgtgtatgtctctatcgcggactacgagggggatgaggagacagcaggcttccaggagggagtgtccatggaggttctggagaggaaccctaatggctggtggtactgccagatcctggatggtgtgaagcccttcaaaggctgggtgccttccaactaccttgagaaaaagaacta

SEQ ID NO: 31016 - DNA, 223 bp, Macaca Mulatta
agtgtaagaatgtgcaagatgccatcgcagatgccgagcagcgtggtgagcatgccctcaaggatgccaggaacaagctgaatgacctggaggaggccctgcagcaggccaaggaggacctggcacggctgctgcgtgactaccaggagctgatgaatgtgaagctggccctggatgtggagattgccacctaccgcaagctgctagagggcgaggagtgcag

SEQ ID NO: 31017 - DNA, 931 bp, Macaca Mulatta
  misc_feature (1)...(931): n = A,T,C or G
gggggattatgcatctttgatgatgtcatagaacactgtagtccagcctcatttaaatatgcagaatatttcctaagaccaatgctccaatatgtatgtgacaacagcccagaagtcaggcaagcagctgcatatggcctgggagtcatggcacagtatggtggagataattatcgccctttttgtacagaagcacttcccctgctggtaagagttattcagtctgcggattctaagaccaaagaaaatgtcaatgctacagaaaactgcatttcagcagtagggaaaatcatgaagttcaagcctgactgtgtaaatgttgaagaggtccttccacactggttgtcttggcttccactacatgaagataaagaagaagctgttcagactttcaattatctgtgtgacctgattgaaagtaatcatccaattgttcttggcccaaacaataccaatctgcccaaaatatttagtataattgcggaaggagaaatgcacgaggcaattaaacatgaagatccttgtgccaaacgtctggccaatgtcgttcgccaagtacagacttctggaggactgtggactgagtgcatagcacagctcagtcctgagcagcaggccgccattcaggagctcctgaactctgcgtgaagggccttaatgtcacccaccagaaaactaactccaaataaacgcttaccctttcaaaaaggtttctttgtttttgtttttgagccaaaagagagcaaacacaacaccnnnnnnnnnnnnnnnnnnnnnnnnnnnnnnnnnnnnnnnnncgggccccccgccccccgaaaaattttttaaaccttcttttggcccccgggccccaaggaaaaagaaaaaggcacaccttttttccaaaaaaacccgggtaaaaaaaggtctggattctccctaaaaaaacccc

SEQ ID NO: 31018 - DNA, 546 bp, Macaca Mulatta
cgtccaactgagatggcggtcaggagcgtaggtttgaccagcagatgctgtcccaggaagggctagggacagcagaagggacctgcctccagtctctttgcttagccagtggagtcagctttgcctgtcttttcttgctgctcccaggaggaggtgtcaggcctcgggaggcagatgggaccagagacaggctgttcactgtgggctcacttgccccactgtgatagggcgcaggaggagagagcactgcagtggccctctgcagccactgtggctccccagacttccctgactcccccactccccttcatgccaggggcacacccagaccccacagggcaggcccctctcttgggaggggcctttgggatggtgaaattccaaccctgctccctggtcagtggtactgtttcctgtcctctctctgaggggccctttctggagtcctgggatggtgtctgcctggccgtggccctgctgacaggtcagcagatcttttgtaaaaaccttgaaaggggcagggaagaaaacagggatttcccctct

SEQ ID NO: 31019 - DNA, 673 bp, Macaca Mulatta
agaataaaattacaaaagtgtatatcctaatataattacattatttgttttcataagtctcctaatttttgctttgcctgtacatcacagttacagctacagaccaggtagagattacgcatgttctgactgccacccgcctgaaagacgtactcgtcatttctcctattttatgttgtgaaggaacagctacagcagctctaaatactgtaacaattaaattttgccaacgtccaacttacagtcataatagaggcttttaccagcacaatgacccctatttgtagtcattctgccagatggttaggctacgtgggttacacggctaaaaaaaggtctgccttttgtaaaaagttccctgtacatagtttggtgtttcttcatattgaagaaatgagttatggggaaaattcaggtacacacataggctcgttcagttgtgctcaccacagccatagcaacagatcaaagtgctctttgttggaaacagcttcctcctcacatcagttctccacaggcagcctcatctacaaccctgcaaatttgggccagaagtggtggcccctcagaggctctgaagtgcctccagccccaattcaggcacttgccacatgtgctgtgtaagaagggaccccccaccccagtgagtcaacataggttcatgtcaggtttg

SEQ ID NO: 31020 - DNA, 753 bp, Macaca Mulatta
gcggcgggcccgcggcgtcgtcggtgcggatgtcgggctgggcggacgagcgcggcggcgagggcgacgggcgcatctacgtggggaaccttccgaccgacgtgcgcgagaaggacctggaggacctcttctacaagtacggccgcatccgcgagatcgagctcaagaaccggcacggcctcgtgcccttcgccttcgtgcgcttcgaaagacccccgaagatgcagaggatgctatttatggaagaaatggttatgattatggccagtgtcggcttcgtgtggagttccccaggacttatggaggtcggggtgggtggccccgatggtgggaggaatgggcctcctacaaagaagatctgatttccgagttcttgtttcaggacttcctccatcaggcagctggcaggacctgaaggatcacatgcgagaagctggggatgtctgttatgctgatgtgcagaaggatggagtggggatggtcgagtatctcagaaaagaagatatggaatatgccctgcgtaaactggatgacaccaaattccgctctcatgagggtgaaacttcctacatccgagtttatcctgagagaagcaccagctatggctactcacggtctcggtctgggtcaaggggccgtgactctccataccaaagcaggggttcccacactacttctctcctttaggccctactgagacacgtgatgggaatttttcttcatttttaggttactgaacgtttgtgctcagaa

SEQ ID NO: 31021 - DNA, 355 bp, Macaca Mulatta
  misc_feature (1)...(355): n = A,T,C or G
atggaggactttgctactaggacctatggcaccagtggcctggacaacagacctctgtttggggagacgtccgccaagnnnnnnnnnnnnnnnnnnnnnnnnnnnnnnnnnnnnnnnnnnnnnnnnnnnnnnnnnnnnnnnnnnnnnnnnnnnnnnnnnnnnnnnnnnnnnnnnnnnnnnnnnnnnnnnnnnnnnnnnnnnnnnnnnnnnnnnnnnnnnnnnnnnnnnnnnnnatctactggtatcgacaaggagacttagaaccaaaatttagaaagctaatatactatatcatattttctatcatcatgttgtgtatatgtgcaaacctgtacttccatgatgtgggaaggtg

SEQ ID NO: 31022 - DNA, 412 bp, Macaca Mulatta
atgtcgtaccactccttccagccaggctccaggtgtggcggtcagagtttcagctcatactcggctgtcatgccccggatggtcactcactatgcagtgagcaaggggccatgccggcccgggggtggtgggggcctccgagctctgggctgcctcagctcacggagcctgtgcaatgtgggctttgggaggccccgggtagcctccagatgtggaggtacccttcctggcttcgggtaccgactgggggccacctgtgggccttctgcctgcatcacccctgtcaccatcaatgagagcctgctggtcccactggcactggacatcgaccccaccgtgcagagggtaaagagggatgagaaggagcagatcaagtgcctcaataaccgcttcgcatctttcatcaacaagg

SEQ ID NO: 31023 - DNA, 86 bp, Macaca Mulatta
gggcggcggcggcggaagcggatcggactctctttgtgggcaccttttgaacgaagtgaccgaggagctccttttcgagcttttca

SEQ ID NO: 31024 - DNA, 767 bp, Macaca Mulatta
ggtctttctctttaataaagacttgtcttcacaccttgctgccattaaaggcagctgttcctagaatttcaatcacttaagtacacccacaacacaataatatggaggtcttcatttcccctcgactttgatttgcccagttatacctcagtgttgtagcagtactgtgatacctggcacagtgctttgatcttatgatgccctctgtactgacctgaaggagacctaagagtcctttccctttttgagtttgaatcatagccttgatgtggtctcttgttttatgtccttgttcctaatgtaaaagtgcttaactgcttcttggttgtattgggtagcattgggataagattttaactgggtattcttgaattgcttttacaataaaccaattttataatctttaaatttatcagctttttacatttgtgttcttttcagtcagggcttcttagatctacttatggttgatggagcacattgatttggagtttcagatcttccaaagcactatttgttgtaataactattttctaaatatagtgcctttaaaggaaaaaatgaacacagggaaagtgactttgctacaaattaatgtttgctggtttttaagtattcatattaaaatacatgccctttctatatgggaaacatggcaggaaaagactggaaaaaataacaagtaattggtgtaaaatcaggaattccctatcaattccatggttggaaaactcaaaccattggcaaaagatgggtggccaattaat

SEQ ID NO: 31025 - DNA, 210 bp, Macaca Mulatta
  misc_feature (1)...(210): n = A,T,C or G
gcagtccaaggttgcgctcttggaagacctggcttcccaggtgggcctacgtactcaggnnnnnnnnnnnnnnnnnnnnnnnnnnnnnnnnnnnnnnnnnnnncaggtgtgattgacgaccggggcaagttcatctacataaccccagaggaattggccgccgtggccaacttcatccgacagcggggccgggtgtccatcgccgagctt

SEQ ID NO: 31026 - DNA, 621 bp, Macaca Mulatta
  misc_feature (1)...(621): n = A,T,C or G
gggggcatcctcaatggatgtgaaaatggtcgctgtgtgagggtccaggaaggttacacctgtgattgctttgatgggtatcacttggatacagccaagatgacctgtgtcgatgtaaatgaatgcgatgagttgaacaatcggatgtctctctgcaagaatgccaagtgcattaacaccgaaggttcctacaagtgtttgtgtctgccaggctatgtaccttctgacaagccgaactactgcactccgttgaataccgccttgaatttagagaaagacagtgacctggagtgaaacggaatctacataacctaagcccatatactctgcactgtgtaaaggaaaagggagaaatgtattatacttgagacattgcacctaacccggaaggctggaaatacagaaacagcatggagttgcaagtcctctgaagacaatgagaggacttaggatgagcccaacaggtgtggcagaccaaatggacatttctctganaaaccagtatatatagtctgttcatatgtaaaattcagtggaagagaggtggaacagtgctgttattttaacagaaggttgtattattatgttgttttgttttttactatgcttgattaatttggn

SEQ ID NO: 31027 - DNA, 539 bp, Macaca Mulatta
  misc_feature (1)...(539): n = A,T,C or G
tgtaatgttctcctaccgcgtgctgcaggccctgctgttgagtgagggggagcaggggatcccaatggcctgccctgcctttgcgcagcagccagcgggcgggtacgtcgtggcctggccgagggaggagagcgcggtccccagtcgagctgcgtgaactaccattgcacactgtagagtttctggtgcctctccttggaactcggctagcggcgccacagcccctgctaactaatcgcgacatcacaactgaattgtaagatgttcatcgctgtgttatccttgagtaaagaaacgggcttttaccatgttgtccaggctggtatcgnnnnnnnnnnnnnnnnnnnnnnnnnnnnnnnnnnnnnnnnnnnnnnnnnnnnnnnnngaatgtgagctctggaagcccagccagggacaatgctccttcacagagattctgcactaacctgagtgaaggcctaaggtttggaacctccccctcgtggaaagaagctttgtatggctgtcatgcttagacaatgattcctgcgacttgacct

SEQ ID NO: 31028 - DNA, 1196 bp, Macaca Mulatta
  misc_feature (1)...(1196): n = A,T,C or G
gcaccatggtgcaagaatttgtacacctgggggcgatagacacgtatctgcgaaaacgtggccacctggtgccagccagctggaagctgcaggtggtcaaacagctggcctacgccctcaactatctgnnnnnnnnnnnnnnnnnnnnnnnnnnnnnnnnnnnnnnnnnnnnnnnnnnnnnnnnnnnnnnnnnnnnnnnnnnnnnnnnnnnnnnnnnnnnnnnnnnnnnnnnnnnnnnnnnnnnnnnnnnnnnnnnnnnnnnnnnnnnnnnnnnnnnnnnnnnnnnnnnnnnnnnnnnnnnnnnnnnnnnnnnnnnnnnnnnnnnnnnnnnnnnnnnnnnnnnnnnnnnnnnnnnnnnnnnnnnnnnnnnnnnnnnnnnnnnnnnnnnnnnnnnnnnnnnnnnnnnnnnnnnnnnnnnnnnnnnnnnnnnnnnnnnnnnnnnnnnnnnnnnnnnnnnnnnnnnnnnnnnnnnnnnnnnnnnnnnnnnnnnnnnnnnnnnnnnnnnnnnnnnnnnnnnnnnnnnnnnnnnnnnnnnnnnnnnnnnnnnnnnnnnnnnnnnnnnnnnnnnnnnnnnnnnnnnnnnnnnnnnnnnnnnnnnnnnnnnnnnnnnnnnnnnnnnnnnnnnnnnnnnnnnnnnnnnnnnnnnnnnnnnnnnnnnnnnnnnnnnnnnnnnnnnnnnnnnnnnnnnnnnnnnnnnnnnnnnnnnnnnnnnnnnnnnnnnnnnnnnnnnnnnnnnnnnnnnnnnnnnnnnnnnnnnnnnnnnnnnnnnnnnnnnnnnnnnnnnnnnnnnnnnnnnnnnnnnnnnnnnnnnnnnnnnnnnnnnnnnnnnnnnnnnnnnnnnnnnnnnnnnnnnnnnnnnnnnnnnnnnnnnnnnnnnnnnnnnnnnnnnnnngccgccagagcctgcggctggtcatggagtacctgcccagcggctgcttgcgcgacttcctgcagcggcaccgcgcgcgcctggatgccagccgcctcctgctctactcctcgcagatctgcaaggnnagggcatggagtacctgggctcccgccgctgcgtgcaccgcgacctggccgcccgaaatatcctggtggagagcgaggcacacgtcaagatcgctgacttcggcctagctaagctgctgccgcttgacaaagactactacgtggtccgcgagccgggccagagccccattttctgg

SEQ ID NO: 31029 - DNA, 188 bp, Macaca Mulatta
  misc_feature (1)...(188): n = A,T,C or G
gagcctgttagtattaatgaagaaaatgagggatttgaacataacacacaagttaggaatcaaggaattatagctttgagttaccgtgactgggaggnaggagattgtgaagacctttgagatttcagagcctgtgattactccaagtcagaggcagcagaagctaagtgcttgatgctagctgaagg

SEQ ID NO: 31030 - DNA, 692 bp, Macaca Mulatta
  misc_feature (1)...(692): n = A,T,C or G
gatccagatctcagacacagctttagaacatactggaggacgaggcaacagatgtcaagacagcattcaatacaagcacaacacaacccatcacctttttatgtatttctatagtgtcacttaaaatttaaagggcagttcccccatgacaaccccccaaccagcccacaggaaaaaaaatataataaagacctaacaccacaggaaaagactatggagtatgttaaaaatgctcattgatgggccattatctttgaaagannnnnnnnnnnnnnnnnnnnnnnnnnnnnnnnnnnnnnnnnaccatgccagttttattcccgttgaatatttacaccttggacagcaaaccttgctcacataaagtagaaaacagatacgataaaacatggcttgaaaaatgaccagagtatgcacctgtagtactgtacactaaataaaatacacaaggcagcaatacttaggggccagaaacactgcttactacaagtcagttatggaatcataatttacagtaaaaatgggcacgtcccaaggctcnnnnnnnnnnnnnnnnnngtcatttacagtagaataaatattttgttgctattgctacactttaatttacattctaacctattaaatgcagaaagctagtgtaaagcatatagattaagtgtaggtcccatacgtatgacagtttgttcccc

SEQ ID NO: 31031 - DNA, 1057 bp, Macaca Mulatta
  misc_feature (1)...(1057): n = A,T,C or G
ggcattcccttcttttagctgcttgttttaagtcctttttatgtgacattccctacccccaatgttgtcagctgcttatgaaactcagccaggttgtctaacctggggtcaagtttgggtgactggtgcagagttacttcctaaaaggccactctccctgcttttggatttcgtagtttctctgtcagtagcatgatcccaccgccgtggtctatgatcaccgtgctttgtgaaactgtgcatccccttgtagcctctctcagtgtctgtggcatttttgtgacttcccagcactagaataagttttcctgccaaaacgagtgaggtgcttgacgccctctggactttcccacttcccaacatggaagaattgtgaactttccatcagactgcctccctggccctccccattcttctcctgttggttactctgggtctgacacaggcccatgagatgtcttataaagcctccaatggctttatcctacctagatcccttccagcccattttacttagactatgtcattgtgagaccaccagtcctttcatttgaattctgtgaatctccaccttgcctatctttgggtggaacctggacagtactgtcgccttcttccaaccctcttcccctacatccctggcactggttgttttctgtgaaaacagcagtgaacaggttcagtttttgaactggccctgaggaaacaggtcgggagtttgtattggcaagagggagggatgagagttgttggagaactgagaatgaggnnnnnnnnnnnnnnnnnnnnnnnttttttttatattagtaaataaatgcagtggaaacccccccncatcacactcaagcacataaactaaaattaagagcataaaccaccagggcggaaaaaacaagcaaagaacaaaaacttcaacaaaagttttttcagaaaacaaaccacagaaaaagaaagccttgttgggggccccctaggccctnnnnnnnnnnnnnnnnnnccnnnnnnnnnnnnnccgcgggcccccctttgggaaagtgggaaagggggccaaaaccgg

SEQ ID NO: 31032 - DNA, 523 bp, Macaca Mulatta
  misc_feature (1)...(523): n = A,T,C or G
atgatcatcatggcacctgtattactgatacttttgggggccactgagatactgcaagctgacttacttcctgatgacaagannnnnnnnnnnnnnnnnnnnnnnnnnnnnnnnnnnnnnnnnnnnnnnnnnnnnnnnnnnnnnnnnnnnnnnnnnnnnnnnnnnnnnnnnnnnnnnnnnnnnnnnnnnnnnnnnnnnnnnnnnnnnnnnnnnnnnnnnnnnnnnnnnnnnnnnnnnnnnnnnnnnnnnnnnnnnnnnnnnnnnnnnnnnnnnnnnnnnnnnnnnnnnnnnnnnnnnnnnnnnnnnnnnnnnnnnnnnnnnnnnnnnnnnnnnnnnnnnnnnnnnnnnnnnnnnnnnnnnnnnnnagggtctcccggaacctcagttgtgaatttaacttgcaccacaaacactacagcagataattattcatatttaaggccataccaagtttcccttcactgcacctggcttgttggcacagatgcccctgaggacacgcagtattttctctactataggt

SEQ ID NO: 31033 - DNA, 180 bp, Macaca Mulatta
aatgttctgaaggatctggaaaagagaaaagttgatttaaataccatcacagagagtagtgctgccctgcaaaacttgattgagggcagcgagcctattttagaagagaagctctgcgtccttaacgctgggtggagccgagttcgtacctggactgaagattggtgcaataccttgatg

SEQ ID NO: 31034 - DNA, 533 bp, Macaca Mulatta
atcttgaatctggcagctatcttgtaaaggctcataaaaatccgaagcttacattttttgtcaagttactgatgcttgtgtcttgtgaaagagaatttcacttacatgcagtttttccaaaagaattaaataatcgtgcatgtttatttttccttctattcagaccctctaaaatttggatgtatctgttttagatcagttcatctatttagctctttgtatattatctcctggagagacagctaggcagaaaaaataatctattaaaatgaaaaaataccatatgcagtctaatgtgggaactttaagtattttttaattcaaggtaaaatatattagtttcacaagatttctggttaatagggaaattactatcttcagtcttcctgagttggaggaaattataatgctgacactcttagtgctcctaaagttgccttttctccgtttatacatttggaatgttgtgatttatattcattttgattccagtttctctaaaatttcaactttttgattaaaaaatatgatac

SEQ ID NO: 31035 - DNA, 197 bp, Macaca Mulatta
tacaagcccctggcccggaggcaccttccccagagtcctgacaccgaagcactttcctgcttcatcaccagttctccgatccctggcccggcggaagcccaccatgagcctggaggagggactgtggcgggccgtgcgggaatggcagcacacaagcaactttgaccggatgatcttctacgagatggcagaaaagt

SEQ ID NO: 31036 - DNA, 771 bp, Macaca Mulatta
  misc_feature (1)...(771): n = A,T,C or G
ttagctgcccagtgcccacccctgaagattcctgaaagaggaaacatgacctgccttcattctgcaaaagcattccagcatcagtctagctgcggcttcagttgtgaagagggatttgtattagttggaccagaagtggtgcaatgcacagcctcgggggtatggacagccccagccccagtgtgtaaagnnnnnnnnnnnnnnnnnnnnnnnnnnnnnnnnnnnnnnnnnnnnnnnnnnnnnnnnnnnnnnnnnnnnnnnnnnnnnnnnnnnnnnnnnnnnnnnnnnnnnnnnnnnnnnnnnnnnnnnnnnnnnnnnnnnnnnnnnnnnnnnnnnnnnnnnnnnnnnnnnnnnnnnnnnnnnnnnnnnnnnnnnnnnnnnnnnnnnnnnnnnnnnnnnnnnnnnnnnnnnnnnnnnnnnnnnnnnnnnnnnnnnnnnnnnnnnnnnnnnnnnnnnnnnnnnnnnnnnnnnnnnnnnnnnnnnnnnnnnnnnnnnnnnnnnnnnnnnnnnnnnnnnnnnnnnnnnnnnnnnnnnnnnnnnnnnnnnnnnnnnnnnnnnnnggcatagcatcacttcctagtccaggggtgcaatgcccagccctcaccacacctgggcagggaaccatgcactgtaggcatcatccgggaacctttggttttaataccacttgttactttggctgcaacgctggattcacactcataggagaccgcattctcagctgcagaccttcaggacaatggacagcagtaactccaacatgcagag

SEQ ID NO: 31037 - DNA, 919 bp, Macaca Mulatta
ctccattaaagagcagtgaagagagttctgatcccatcactggaagttcggaaaatgcagtgtcatctgcagaactgatttcccagactcccactgaagttctgggtcccagcgagaatgaaaaactgagccctacaagtaatacctcatatagtttagaaaaaatctccagtctggcccctcctggtatggagtactgcgttttactcttctgctgttgtatttgtggttttgaatcaaccagcaaagaaaacctcttggatcatatgaaagagcacgagggtgaaattgtaaacatcatcctgaataaggaccacaacacagctctaaacacaaattaggtggaataatgactcaaacatgaaagcagtagaagaggattccttcaccacagtttcacatttgcgctgtcaaacaacttcctagccacagaagaaatcattgatgtgattttcgagaaaatgacagatgtgactttggaaccaaacttgtaataaaaggaattccaaatggacaagcagtaatgatatttaaatattttgagtgagggggagtgggtcgaagaggaagcagaggtgtaatcctgtattaaccctctgtcaccccttcttagtgttgagtgtatttattaaagcttattagagtgtagaaatgcaagcaaaagagttaagaaagggcttttcaggaaccattctaaaagtcataaaaaggtcacagtctgaagcagagcttagttttcttctcacttctcaaatgcagactgtgaggcctccagtgagaaatgggaggcacttctgggaggggtgttttcagtgtcaccaacagagtcaacaaggaaacataattagagggctttgaaatgatctactgaaatccctaaattgatagaaatgcatcatactcaatctaggacatgttt

SEQ ID NO: 31038 - DNA, 936 bp, Macaca Mulatta
  misc_feature (1)...(936): n = A,T,C or G
gggaattcgggattgttgaagacattgtctgttgatggaaaacattccttttttggaggtgatgaagttcaacctggatgtgaacatatcgctagtccagatcatgtgatccttagagcagcaagcttagttttaatgaaatccttggaaatcaagtnttctagaanattgntntttttnnnnnnnnnnnnnnnnnnnnnntcccccaaannnnnnnncccccctccccccccncnntntnttttttntcttnncnnnnnnnnnnnnnnnnnnnnnnnnnnnnnnnnnnnnnnnnnnnctccccccnnnncnnnnctnncncccnntttcttcccttttcctnnncnnnncccccacccccnnnnnnnnnnnnnnnnnnnnnnncnnnnnnnnnnnnnnnnnnnnnnnncgcccgcgccggccgaaagactgaaaaacncagnnnnnnnnnnnnnnnnnnncgggcgcnnncgcccncnnnnnnnnnnnnnnnnnnnnnnnnnnnnnnnnnnnnnnnnnnnnnnnnnnaccngccgcccgccggcnttnnnnnnnnnnnnnnnnnnnngnaagggggtttgctatcggcgtggggngcncccgaacagagtcgcacaagtatccggggaccgccgcnncccccccactcacaccccnnaacaactggacatngataagtgtnnnttgaagagcnacaccccatcaaatttacccgagttgcccggagcagccgatcactaagaagaacgacgtgtcgcgataggcgcggaggggccgggggagcggncgggtggggtgggnngntcncgcggtaggcgaganagaggacggaggcgcagagggcacgggtagcgcgcgcgcgttgctagnacgaggcgcgggacgaacgcgcaagatgaagggcgtggatgcgcnagttggtggttgtgattaagg

SEQ ID NO: 31039 - DNA, 1363 bp, Macaca Mulatta
  misc_feature (1)...(1363): n = A,T,C or G
agcctgaaggggaagagtgccaggctgcgcaatgctgcaggggtggagctgtggcagcatttccagcggcctctgcaggatctgcagctgtggagggccctggcccagcggctcttggaggtcactgccagcctgcaggacctgccttcccttcacaccttcctaccccagatcgaggtaaccnnnnnnnnnnnnnnnnnnnnnnnnnnnnnnnnnnnnnnnnnnnnnnnnnnnnnnnnnnnnnnnnnnnnnnnnnnnnnnnnnnnnnnnnnnnnnnnnnnnnnnnnnnnnnnnnnnnnnnnnnnnnnnnnnnnnnnnnnnnnnnnnnnnnnnnnnnnnnnnnnnnnnnnnnnnnnnnnnnnnnnnnnnnnnnnnnnnnnnnnnnnnnnnnnnnnnnnnnnnnnnnnnnnnnnnnnnnnnnnnnnnnnnnnnnnnnnnnnnnnnnnnnnnnnnnnnnnnnnnnnnnnnnnnnnnnnnnnnnnnnnnnnnnnnnnnnnnnnnnnnnnnnnnnnnnnnnnnnnnnnnnnnnnnnnnnnnnnnnnnnnnnnnnnnnnnnnnnnnnnnnnnnnnnnnnnnnnnnnnnnnnnnnnnnnnnnnnnnnnnnnnnnnnnnnnnnnnnnnnnnnnnnnnnnnnnnnnnaggaccttgtggacaggtgtcggcagagcgtggaggagcactgcaccttcagccaccaactgctggagctgcggcagtggatcgccgtgaccacgcaaaagctggaggcacaccggggagaggctggccnnnnnnnnnnnnnnnnnnnnnnnnnnnnnnnnnnnnnnnnnnnnnnnnnnnnnnnnnnnnnnnnnnnnnnnnnnnnnnnnnnnnnnnnnnnnnnnnnnnnnnnnnnnnnnnnnnnnnnnnnnnnnnnnnnnnnnnnnnnnnnnnnnnnnnnnnnnnnnnnnnnnnnnnnnnnnnnnnnnnnnnnnnnnnnnnnnnnnnnnnnnnnnnnnnnnnnnnnnnnnnnnnnnnnnnnnnnnnnnnnnnnnnnnnnnnnnnnnnnnnnnnnnnnnnnnnnnnnnnnnnnnnnnnnnnnnnnnnnnnnnnnnnnnnnnnnnnnnnnnnnnnnnnnnnnnnnnnnnnnaaatcttgtccaggaagaagaagggagccatgaagatttctcccagctcctgaggaactttgagcagtggttgcaggtggaaaattccaagctggttagaatcatcgcaatgaggacttctacagccgaggacttgaggaccagagaatcaaagctgcaggncaggagctggaggctcgggtgccagaaggtcagcatctctttgagcatctccttcgtctcgggccagcaagggggacctcggacaagctggaa

SEQ ID NO: 31040 - DNA, 121 bp, Macaca Mulatta
  misc_feature (1)...(121): n = A,T,C or G
naggtagaagatgttgttagcccaaataaatcgagattctcagggaatgacagagtttcctggaggagggatggaggctcagcatgttaccctgtgcttgacagaggcagtcacagtggca

SEQ ID NO: 31041 - DNA, 1361 bp, Macaca Mulatta
  misc_feature (1)...(1361): n = A,T,C or G
gtcctttccctgggatccgagccctcaccgtctctcctcagccctatccggcgagaagcggagcgctgccagcggaggcagcgccttcccgaagcagtttatctttggacgnnnnnnnnnaaggaaaaagcaaccaactggttgccnnnnnnnnnnnnnnnnnnnnnnnnnnnnnnnnnnnnnnnnnnnnnnnnnnnnnnnnnnnnnnnnnnnnnnnnnnnnnnnnnnnnnnnnnnnnnnnnnnnnnnnnnnnnnnnnnnnnnnnnnnnnntccgcgccgccctcgctgctgctgctgctcctggcgcagctggtgggccgggcggccgccgcgtccaaggccccggtgtgccaggaaatcacggtgcctatgtgccgcggcatcggctacaacctgacgcacatgcccaaccagttcaaccacgacacgcaggacgaggcgggcctggaggtgcaccagttctggccgctggtggagatccaatgctcgccggacctgcgcttcttcctatgctccatgtacacgcccatctgtctgcctgactaccacaagccgctgccgccctgccgctcggtgtgcgagcgcgccaaggccggctgctcgccgcagaaaagccagtacggcttcgcctggcccgagcgcatgagctgcgaccgcctcccggtgctgggccgcgacgccgaggtcctctgcatggattacaaccgcagcgaggccaccacggcgccccccaggcctttcccagccaagcccacccttccaggcccgccaggggcgccggcctctgggggcgaatgccccgctgggggcccatccgtgtgcaagtgtcgcgaaaccttcgtgcccatcctgaaggagtcacaccccctctacaacaaggtgcggacgggccaggtgcccaactgcgcggtaccctgctaccagccgtccttcagtgccgacgagcgcacgttcgccaccttctggatcggcctgtggtcggtcctgtgcttcatctccacatccaccacggtggccaccttcctcatcgacatggaacgcttccgctatcctgagcgccccatcatcttcctgtcagcctgctacctgtgcgtgtcgctgggcttcctagtgcgcctggtcgtgggccatgccagcgtggcctgcagccgcgagcacaaccacatccactacgagaccacgggccctgcgctgtgcaccattgtcttcctcctggtctacttcttcggcatggccagctccatctggtgggtcatcctgtcgctcacctggttcctggccgccggcatgaagtggggcaacgaggccatcgcgggctacgcgcagtacttccacctggctgcgtggctcatccccagcg

SEQ ID NO: 31042 - DNA, 495 bp, Macaca Mulatta
tcctgtggggtccaagagctcattcagaaatcagtaagaggaaagtagtggagtttttggccatgctcaacaataccgtccctatttcctttccaccctcgtacaaggaggctttgaaagatgtggaagagagagcccaggccataattgacagcacagatgactccactgccacagacagtgcaagctccagtgtcgtgtcccccagcttctcttctgagtgaagtctggggtagattattccctctgagtttgaagaggcggtcgagtttctacgtggtggagggctcgggtgaggctggagagaacacagtgctgtttgcacttctgttccatatgggcggttaagggatttacctgttttccttttgggtatttttcaaatgcttttcctattaatgacaggtttaaatagcttcagaatcttagtttacgaatattagtcacacgtgtattgctgtttatctggtttaagagtaacagtttgatattttg

SEQ ID NO: 31043 - DNA, 182 bp, Macaca Mulatta
attaaaaactggaaaggagatgtgagggcctgattctgcgttgtgattctgcccagaggctgggaccaggagagccttagaggagggtgacagagccgggtgttcagggctagggaggccacatggaaaccagctcaggccctgggttctgaccacagggatgggaaccagtggcacgtggc

SEQ ID NO: 31044 - DNA, 535 bp, Macaca Mulatta
  misc_feature (1)...(535): n = A,T,C or G
ttggggtggaggcagggtgtancctgcctganaangannagtcagggcaatgccagagacctgggagaggctgactggcgagaagggaggcattcaactaagtaccttgaggaacaatacttcggaattttccttctaaccaaaaatgtgggtcagacaaaaggcaaagtcagatgagtggtgagggcacacttaacttggccgacagcctgattagactatacaaaggattgtacttttgtttactttcacgcacagtattgtattagtaatgccagagccaccacggccactgctgtacctttgaacaaagttaaacaccattcatctccttttgaaaatgactcctgtccaggactgtaactcttggtcagtactacccctggcccaaatgctgtgttaattacagaaactgcacatcagtttcatggtgaccagctattgcaaataaattaataagagatacatatcaatcttttaaatagatttgcatggtatagtgtaccccaaacataaaaagtaactacaaaaaaca

SEQ ID NO: 31045 - DNA, 4260 bp, Macaca Mulatta
  misc_feature (1)...(4260): n = A,T,C or G
gacactgttagaagcaatcttccccatattgaagaaactacaagtgatgatgtaagtgctactaacactaacaacctgaagaagaccatgagagtcgctaaaaacaaatcgaggaacacacagtcagcaactgaaaatcctaatgatgatgttagtgtagaggaagacaaacaaggaaagccaaataaaaaggtggtaaagacggtgtcccagttgactacacaagatatgaaattggaaactcctgagaaggaagttgattctacacaccagaaagcgcgtacaaagccacagccaggccttgatcatcagaaaagtgagaaggcaaatgagggaagagaagagaatgatttagaagaggacgaagaactgatgcaagcatatcagcgccatgtaactgaagaaatggcaaaggagattaagaagaaaataagaaaaaaactgaaagaacagttgacttactttccctcagatactttattccatgacgacaaannnnnnnnnnnnnnnnnnnnnnnnnnnnnnnnagtacattgaccatctctggtgacacagttgaaggtgaacaaaagaaggaatcttcagttagaccagtttcttcagattctcatcaagatggtgaaataagctcaatggaaaaaaacacagaaggcagcatgcaagatgacacaaaacctaaaccnnnnnnnnnnnnnnnnnnnnnnnnnnnnnnnnnnnnnnnnnnnnnnnnnnnnnnnnnnnnnnnnnnnnnnnnnnnnnnnnnnnnnnnnnnnnnnnnnnnnnnnnnnnnnnnnnnnnnnnnnnnnnnnnnnnnnnnnnnnnnnnnnnnnnnnnnnnnnnnnnnnnnnnnnnnnnnnnnnnnnnnnnnnnnnnnnnnnnnnnnnnnnnnnnnnnnnnnnnnnnnnnnnnnnnnnnnnnnnnnnnnnnnnagtgaacgacctgtttcatcttactatgaaaaagagaatgtggattatattcttcctattatgacccagccatatgattttaaacagttaaaatcaagacttccagagtgggaagaacaaattatatttaatgaaaattttccctatttgcttcgagactctgatgagagtcctaaagtcatcctgttctttgagnnnnnnnnnnnnnnnnnnnnnnnnnnnnnnnnnnnnnnnnnnnnnnnnnnnnnnnnnnnnnnnnnnnnnnnnnnnnnnnnnnnnnnnnnnnttaagcttctgggagccaatggaaatgcaaacatcaactcaaaacttcgtttgcagctgtattacccacctactaagactcgatcccaattaaatgttgttgaggtgtttgaatggtggtcaaaatgtccaagaaatcgttacccatcaacactgtatgtaactgtaagaggactgaaagttccagactgtnnnnnnnnnnnnnnnnnnnnnnnnnnnnnnnnnnnnnnnnnnnnnnnnnnnnnnnnnnnnnnnnnnnnnnnnnnnnnnnnnnnnnnnnnnnnnnnnnnnnnnnnnnnnnnnnnnnnnnnnnnnnnnnnnnnnnnnnnnnnnnnnnnnnnnnnnnnnnnnnnnnnnnnnnnnnnnnnnnnnnnnnnnnnnnnnnnnnnnnnnnnnnnnnnnnnnnnnnnnnnnnnnnnnnnnnnnnnnnnnnnnnnnnnnnnnnnnnnnnnnnnnnnnnnnnnnnnnnnnnnnnnnnnnnnnnnnnnnnnnnnnnnnnnnnnnnnnnnnnnnnnnnnnnnnnnnnnnnnnnnnnnnnnnnnnnnnnnnnnnnnnnnnnnnnnnnnnnnnnnnnnnnnnnnnnnnnnnnnnnnnnnnnnnnnnnnnnnnnnnnnnnnnnnnnnnnnnnnnnnnnnnnnnnnnnnnnnnnnnnnnnnnnnnnnnnnnnnnnnnnnnnnnnnnnnnnnnnnnnnnnnnnnnnnnnnnnnnnnnnnnnnnnnnnnnnnnnnnnnnnnnnnnnnnnnnnnnnnnnnnnnnnnnnnnnnnnnnnnnnnnnnnnnnnnnnnnnnnnnnnnnnnnnnnnnnnnnnnnnnnnnnnnnnnnnnnnnnnnnnnnnnnnnnnnnnnnnnnnnnnnnnnnnnnnnnnnnnnnnnnnnnnnnnnnnnnnnnnnnnnnnnnnnnnnnnnnnnnnnnnnnnnnnnnnnnnnnnnnnnnnnnnnnnnnnnnnnnnnnnnnnnnnnnnnnnnnnnnnnnnnnnnnnnnnnnnnnnnnnnnnnnnnnnnnnnnnnnnnnnnnnnnnnnnnnnnnnnnnnnnnnnnnnnnnnnnnnnnnnnnnnnnnattagtagcaaggaaatttgtaggagcagcaaattatcgggagaagattcatagtactttgactccatgtgggacttttctgtttgctggaagtgaggatggtatagtgtatgtttggaacccagaaacaggnnnnnnnnnnnnnnnnnnnnnnnnnnnnnnnnnnnnnnnnnnnnnnnnnnnnnnnnnnnnnnnnnnnnnnnnnnnnnnnnnnnnnnnnnnnnnnnnnnnnnnnnnnnnnnnnnnnnnnnnnnnnnnnnnnnnnnnnnnnnnnnnnnnnnnnnnnnnnnnnnnnnnnnnnnnnnnnnnnnnnnnnnnnnnnnnnnnnnnnnnnnnnnnnnnnnnnnnnnnnnnnnnnnnnnnnnnnnnnnnnnnnnnnnnnnnnnnnnnnnnnnnnnnnnnnnnnnnnnnnnnnnnnnnnnnnnnnnnnnnnnnnnnnnnnnnnnnnnnnnnnnnnnnnnnnnnnnnnnnnnnnnnnnnnnnnnnnnnnnnnnnnnnnnnnnnnnnnnnnnnnnnnnnnnnnnnnnnnnnnnnnnnnnnnnnnnnnnnnnnnnnnnnnnnnnnnnnnnnnnnnnnnnnnnnnnnnnnnnnnnnnnnnnnnnnnnnnnnnnnnnnnnnnnnnnnnnnnnnnnnnnnnnnnnnnnnnnnnnnnnnnnnnnnnnnnnnnnnnnnggtagtggctctttatgactacacagcgaatcgatcagatgaactaaccatccatcgcggagacattatccgagtgtttttcagagataatgaagactggtggtatggcagcataggaaagggacaggaaggttattttccagctaatcatgtggctagtgaaannnnnnnnnnnnnnnnnnnnnnnnnnnnnnnnnnnnnnnnnnnnnnnnnnnnnnnnnnnnnnnnnnnnnnnnnnnnnnnnnnnnnnnnnnnnnnnnnnnnnnnnnnnnnnnnnnnnnnnnnnnnnnnnnnnnnnnnnnnnnnnnnnnnnnnnnnnnnnnnnnnnnnnnnnnnnnnnnnnnnnnnnnnnnnnnnnnnnnnnnnnnnnnnnnnnnnnnnnnnnnnnnnnnnnnnnnnnnnnnnnnnnnnnnnnnnnnnnnnntgtgccagctgtcacttttctcaggagtggtcgatggagttgactgctaccttaaccagatttgccatcattctgaaactgccatgtgttttctaaggacaacccggtgttaagcctttctctttagaggaaggacagtaacctttnnnnnnnnnnnnnnnnnnnnnnnnnnnnnnnnnnnnnnnnnnnnnnnnnnnnnnnnnnaaaccaaatggaatttttcttcagagttccagaattttcacataataaagaggaagaaaggatccacttacttttttttttttatgaatgactctagaaaaattagaatcaagttgtgggacgaaaaaatcaatgtgacctttgagctcaaattgttataaaccatgcgattgttgtgggtccaagtattggtacttatattggtagtaattgcatcatagttacattaccagtgttggaaatctcatgaagaaaacactgtaattgctactcagcaaatgtgaataaaaggtgtttgcattattaggatgtctgttaagtaatcatttaatattattatattggtaatgtggttatatatgtggtgttatgcccagaatatgaagtgtctgcttttgaaattcactttattcaaaagagaagcagctggctgggcacggtgcctcacacctgtaatcccagcactttaggaggccaaggtgggtggatcacctaaggtcaggagttcaagaccagcctgaccgacgtggtgaaaccccgtctctactaaaaatacaaatattagccgggcgtcgtggcaggcgcctgtaatcccaactactgaggcaggagaatcacccaggaggcagaggttgcagtgagccgagatcatgccattgcactccagcctgggcaacagagcaagact

SEQ ID NO: 31046 - DNA, 387 bp, Macaca Mulatta
  misc_feature (1)...(387): n = A,T,C or G
tgaaggtctccgtggctctcctctcctgcctcatgcttgttgctgcccttggatcccaggcccagnnnnnnnnnnnnnnnnnnnnnnnnnnnnnnnnnnnnnnnnnnnnnnnnnnnnnnnnnnnnnnnnnnnnnnnnnnnnnnnnnnnnnnnnnnnnnnnnnnnnnnnnnnnnnnnnnnnnnnnnnnnnnnnnnnnnnnnnnnnnnnnnnnnnnnnnnnnnnnnnnnnnnnnnnnnnnnnnnnnnnnntcctcaccaagaaggggcgacaagtctgtgccaaacccaatggtccgggagttcagaattgcatgaaaaagctgaagtcctaaccaatataataataaagatacaaaagaggccagccaaccacctccaacacctcctg

SEQ ID NO: 31047 - DNA, 197 bp, Macaca Mulatta
aggtgaagcgggagccgggtgagaatggcaccagcctgacggatgaggagctggtgaccatgtcggtgcgggagctgaaccagcacctgcgtggcctgtccaaggaggagatcgtccagctgaagcagcgccggcgcacgctcaagaaccgcggctacgctgccagctgccgcgtgaagcgggaacgcagaaggagg

SEQ ID NO: 31048 - DNA, 285 bp, Macaca Mulatta
gagcaggtctccactccagaaattaaagtgttaaacaagacccaggagaatgggacctgcaccttgatactgggctgcacagtggagaagggggaccatgtggcttacagctggagtgaaaaggcgggcacccacccactgcacccagccaacagctcccacctcctgtccctcacccttggcccccagcatgctgacaatatctatatctgcactgtgagcaacgccatcagcaacaattcccagaccttcagcccgtggcccagatgcaggacagaccactca

SEQ ID NO: 31049 - DNA, 697 bp, Macaca Mulatta
ttttcttattactttacttttgtttcagcagaagtggcagtggatttaaaaactttgtgcgatatcttgatgtattctggtagctctgtctccttgaataaggaaatagccaacttttttctctccaagttttatttattatcacagttgctcatttttatgtaacatatttttaaatgttaaggaatgacacattttgggtaatttccctcagacttaaaaaaatcaataagccattttagtctctatctatcaaagttgtttcatacttgtctattttaaagcaggactgcaatgctttaataggattgagagagctatttgaaatgtatgccaatgattcctgtcatttcatggcagcccggccatggttcactgagccccctcttctctcttgtcagctcaactgaagacaagcatttagttgcaaactttaagcaggttgtgcaaaacagaaatgatgtgactgcttctcctcctgcacaataatgtcactcctggtcaatgtgagaaggtcaggttgctccttgtaaagctacatgataccacttgcccatttgaacaagttaagttaactgctgaatctggtccctgaaggcactgaaaacttattcttttagcaagtctgcatttgataagaaagtagagcaattgtgctggaggatttctgtggtatgtttaggcacttcataaggac

SEQ ID NO: 31050 - DNA, 2500 bp, Macaca Mulatta
  misc_feature (1)...(2500): n = A,T,C or G
gtgaaaattcagaggagcgacaggcaacttacctgggattcctgggccagcaaccacagcagcctccacaccaaccatcactataacacgcaccaccctgaccattgcagagcaccagccctgacactcccgaaagcacctcctccaaacagccctcncagcttgggtgtcttctccttctctcctacctccatgagtgcatacagcctgagtcccctgaacatgggaactctnnnnnnnnnnnnnnnnnnnnnnnnnnnnnnnnnnnnnnnnnnnnnnnnnnnnnnnnnnnnnnnnnnnnnnnnnnnnnnnnnnnnnnnnnnnnnnnnnnnnnnnnnnnnnnnnnnnnnnnnnnnnnnnnnnnnnnnnnnnnnnnnnnnnnnnnnnnnnnnnnnnnnnnnnnnnnnnnnnnnnnnnnnnnnnnnnnnnnnnnnnnnnnnnnnnnnnnnnnnnnnnnnnnnnnnnnnnnnnnnnnnnnnnnnnnnnnnnnnnnnnnnnnnnnnnnnnnnnnnnnnnnnnnnnnnnnnnnnnnnnnnnnnnnnnnnnnnnnnnnnnnnnnnnnnnnnnnnnnnnnnnnnnnnnnnnnnnnnnnnnnnnnnnnnnnnnnnnnnnnnnnnnnnnnnnnnnnnnnnnnnnnnnnnnnnnnnnnnnnnnnnnnnnnnnnnnnnnnnnnnnnnnnnnnnnnnnnnnnnnnnnnnnnnnnnnnnnnnnnnnnnnnnnnnnnnnnnnnnnnnnnnnnnnnnnnnnnnnnnnnnnnnnnnnnnnnnnnnnnnnnnnnnnnnnnnnnnnnnnnnnnnnnnnnnnnnnnnnnnnnnnnnnnnnnnnnnnnnnnnnnnnnnnnnnnnnnnnnnnnnnnnnnnnnnnnnnnnnnnnnnnnnnnnnnnnnnnnnnnnnnnnnnnnnnnnnnnnnnnnnnnnnnnnnnnnnnnnnnnnnnnnnnnnnnnnnnnnnnnnnnnnnnnnnnnnnnnnnnnnnnnnnnnnnnnnnnnnnnnnnnnnnnnnnnnnnnnnnnnnnnnnnnnnnnnnnnnnnnnnnnnnnnnnnnnnnnnnnnnnnnnnnnnnnnnnnnnnnnnnnnnnnnnnnnnnnagaactggcgcaatccacataggagaccgaaatcctagcccatcaatagcagcagcttgaaagggaagccctctgagtgaagccttccatttgttacagagggcaggagagactgtcaccttgaaaattaagaaacagacagatgngcccagtcagcatcgagccccaagaagttccccatttctagccatttgagtgacctgggggatgtggaggaggactcctcgccagcacagaagccaggcaagctgtccgacatgtacccttccacagtgcccagtgtggacagtgctgtggattcatgggatgggtctgcaatagacaccagctatggaaatcaaggnnnnnnnnnnnnnnnnnnnnnnnnnnnnnnnnnnnnnnnnnnnnnnnnnnnnnnnnnnnnnnnnnnnnnnnnnnnnnnnnnnnnnnnnnnnnnnnnnnnnnnnnnnnnnnnnnnnnnnnnnnnnnnnnnnnnnnnnnnnnnnnnnnnnnnnnnnnnnnnnnnnnnnnnnnnnnnnnnnnnnnnnnnnnnnnnnnnnnnnnnnnnnnnnnnnnnnnnnnnnnnnnnnnnnnnnnnnnnnnnnnnnnnnnnnnnnnnnnnnnnnnnnnnnnnnnnnnnnnnnnnnnnnnnnnnnnnnnnnnnnnnnnnnnnnnnnnnnnnnnnnnnnnnnnnnnnnnnnnnnnnnnnnnnnnnnnnnnnnnnnnnnnnnnnnnnnnnnnnnnnnnnnnnnnnnnnnnnnnnnnnnnnnnnnnnnnnnnnnnnnnnnnnnnnnnnnnnnnnnnnnnnnnnnnnnnnnnnnnnnnnnnnnnnnnnnnnnnnnnnnnnnnnnnnnnnnnnnnnnnnnnnnnnnnnnnnnnnnnnnnnnnnnnnnnnnnnnnnnnnnnnnnnnnnnnnnnnnnnnnnnnnnnnnnnnnnnnnnnnnnnnnnnnnnnnnnnnnnnnnnnnnnnnnnnnnnnnnnnnnnnnnnnnnnnnnnnnnnnnnnnnnnncaggtgaaccatgtccgaaccagagactttgactgctgccttgttgtgcccctcatagcagaatccgggaataagctggacctggttattagtagaaacccacctggcttcacagaagtctgtaaaacaacagagtctacctggagattggagtgaacagaacagtgcttttttccagcagcctacccacggtggtaatttggagacacgagaacccactaatacattatatcaacgctttttataaagcaggacaaaagacaatatctttatggtgctaataatcccttttaagatttctgtgacatttgaagcatattataatcacgtggcattaactgcaagcacaggggtcttttaaatctctctcaaggctcatgctcacttcccctttcaagttgaagagggttccttttttggtgacc

SEQ ID NO: 31051 - DNA, 1014 bp, Macaca Mulatta
  misc_feature (1)...(1014): n = A,T,C or G
gggacagaaaggaagttctctccctgtaggcctctctccctcagaactgctcgaggagcgagacctcagaagacagggcttcccgcgaagaaccggaaaggagcgcctactaaggacgccgtcgaggtccgtggcgcctcaactctatagctctaactggctagaagggcccaacgtggnnnnnnnnnnnnnnnnnnnnnnncggctgaggcgacccggaagcggaaatggaagaaagttctagtggcgtgacgtatccgcgggagcagcagggtggcgggaggaaccgttacggggactgaagctgccgattaaggctgatcaagatgacagcctcccaaaagcaccgagacttcgtggcagagcccatgggggagaagccagtggggagcctggctgggattggtgaagtcctgggcaagaagctgggaggagaggggctttgacaaggcctatgttgtccttggccagtttgtggtgctaaagaaagatggagacctcttccgggaatggctgaaggacacgtgtggcgccaacgccgactgaagctgccgattaggactgcttcggatgccttcgagagtggtgtgacgccttcttgtgatgctctctgggaagctctcaatccccagccctcatccagagtttgcagccgagtagggactcctcccctgccctctacgaaggaaaagattgctattgtcgtactcacctcccgacgtactccaggggtcttttgggagttttctcccctaaccatttcaacttttttggattctcgctcttgcatgcctcccccgccctttttcccttgccagttccctggtgacagttaccagctttcctgaatggattcctggccccgtccctcaccccccaccctcactttcagtccgtttgataccatttggctcctttttgggcagaacagtcactgtccttgtaaagttttttagatcaataaagtcagtggctttcataggngaatgataaaatattagagatatccctgtc

SEQ ID NO: 31052 - DNA, 221 bp, Macaca Mulatta
tcaggtaaaacatggctaaaagcttacggagtaagtggaaaagaaagatgcgtgctgaaaagagaaaaaagaatgccccaaaggagctcagcaggcttaaaagtattctcaaactagaaggtgatgttttaatgaaagatgttcaagagatagcaactgtggtggtacccaaacgcaaacattgccaagagaaaatgcaatgtgaggtaaaagatgaaaaa

SEQ ID NO: 31053 - DNA, 124 bp, Macaca Mulatta
tggacgaatgtcagctcttccgagaccaggtgtgcaagagtggcgtgtgtgtgaacacggccccgggctactcgtgctattgcagcaacggctactactaccacacacagcggctggagtgcat

SEQ ID NO: 31054 - DNA, 843 bp, Macaca Mulatta
tagtgcacctccctgactactttaggatttccttctcagattttatttaacttgttaacctctggaatgcctaaaattaaataaaaatactgttttgagtttatattgggctatgtattttgtctgtgtgtaatctgttatatatatgtattgtatagagtttatattgagctgtatataatagccaatatttggggctctatgcttggaacatttttagaaaaatattctattttgattatatggtccaggaattaatctcattttaatttttcattgcagatggagtcgggtggtacagttttgagtaccaactggtctgatgtaggtaaaaggaaagttgaaatcaaccctcctgatgatatggaatggaaaaagtactaaataaattaatttgctctcactgtattatgtatattcacctaatgcccgttgtgtattgatattgcattcttgaattttgaacactgaatatctttttgaaagattatacctctttacctctttgtgctttagaaattattttccttcaagtgttcaagtctaatgaagaatgaagataacattttatcacttctgtccttaaagatttcagacatggtgaaactgaataaagcgtatcacttgctcctagatagattcattctatctagttgtggggatggagaaatctttaatggtatattttgggttattgccttatttttgatgcagtattctgtcagtaatttattagatctggcagctttgggtgagcatagatttttcgccttcagtgttacattgtgtttgcttttaaaaactgcttttgaatggagttgtaaatacaatttttctatgaag

SEQ ID NO: 31055 - DNA, 234 bp, Macaca Mulatta
  misc_feature (1)...(234): n = A,T,C or G
ttctgcttataaatgctatcactatgaaaaggcgaatgcagctctttctgttcttacttnttatctgaatgncaagttcctctttgggtgtaggagggggcgggcaggggacaaggccaggaggggtcccagggccttcatgcgtggtctcggggaagaagcttcctctggcctggtgtaggtcgttccatctgcctcccgggtctgcgtccctaaccccttccctagcttggt

SEQ ID NO: 31056 - DNA, 972 bp, Macaca Mulatta
  misc_feature (1)...(972): n = A,T,C or G
gtcttgtgaaaatgccattgtgtgctggaaacctggcaagatggaagatgatatagataaaattaaacccagtgagtctaatgtgactattcttgggcgatttgattacagccagtgtgacatttggtacatgaggttttctatggatttctggcaaaagnnnnnnnnnnnnnnnnnnnnnnnnnnnnnnnnnnnnnnnnnnnnnnnnnnnnnnnnnnnnnnnnnnnnnnnnnnnnnnnnnnnnnnnnnnnnnnnnnnnnnnnnnnnnnnnnnnnnnnnnnnnnnnnnnnnnnnnnnnnnnnnnnnnnnnnnnnnnnnnnnnnnnnnnnnnnnnnnnnnnnnnnnnnnnnnnnnnnnnnnnnnnnnnnnnnnnnnnnnnnnnnnnnnnnnnnnnnnnnnnnnnnnnnnnnnnnnnnnnnnnnnnnnnnnnnnnnnnnnnnnnnnnnnnnnnnnnnnnnnnnnnnnnnnnnnnnnnnnnnnnnnnnnnnnnnnnnnnnnnnnnnnnnnnnnnnnnnnnnnnnnnnnnnnnnnnnnnnnnnnnnnnnnnnnnnacatctgcttattttctaatccactgttttagggtagacactgacaacgttatgtgtggtctttaacctgttgtcatgtttttttccctagatgtacaacactgactcatcataaatgtggtgctgctattcgacaaaccagttttagcagggatagcagcattcttatagctgtttgtgatgatgccagtatttggcgctgggatcgacttcgataaaatacttttgcctaatcaaaattagagtgtgtttgttgtctgtgtaaaatagaattaatgtatcttgctagtaagggcacgtagagcatttagagttgtctttcagcattcaatcaggctgagctgaatgtagtgatgtttacattgtttacattctttgtactgtcttcctgctcagactctactgcttttaataaaaattt

SEQ ID NO: 31057 - DNA, 452 bp, Macaca Mulatta
gtcagcccaaggccacccctcagtcactctgtttccgccatcttctgaggagatgcaagccaacaaggccacactggtgtgtctcatgagtgacttctatccaggaatcttgacggtgatctggaaggcagatggtacccccatcacccaggacatggagatgattgcgccctccaaacagagcaacaagtatgtggccagcagctatctgagcgtgatgcgtgagcagtggaggtcccgcaacatcttcagctgccaggtcacgcatgatgggagcaccgtggagaagacagtggcccctgcagaatgttcataggttcccaacccgtcccccacctatgggggcctggagctgcagaatcccaggggacaggtgtctctgcatcccaagccatccagcccttctctgtgtacccagtaaaccctcattaaacatcctttgtcaaccagaa

SEQ ID NO: 31058 - DNA, 349 bp, Macaca Mulatta
ggccggggcgccagcgcccgccttcccgttccctccggttgcgcggcgcgcccacggcctgtgaccccggcggccgctcctcagtgacaagagagcggggccgtttttcggctccggcctgacctgcgaagggacctcggaccagtcccctgttgcgccgcgcctcccgaccgcccgtgcgcgggccagtcaggggccagtgtctcgagtggtcgaggtcgcagacctagaggcgccccacaggccggaccgggacgcggcgagcgccggccgcgggccagagtggggatgcccctgcgcgtgaagtggccgctccccgcggtgccgccgctcacctgaaccctggcca

SEQ ID NO: 31059 - DNA, 127 bp, Macaca Mulatta
agcacaacagctccagctggcagcatcacttcctgccaatttatccaacttctgccaaggctctgaaatgccaacaacgtcgaggcctgcacttgatgtcaagggtggcacctcacctgcgaaggag

SEQ ID NO: 31060 - DNA, 498 bp, Macaca Mulatta
caggtccacagcaaggacaagaagtacgtatgcaaggtgtgcagccgcgtcttcatgtctgccgccagcgtgggcatcaggcacggctcccggcgccacggtgtgtgtgccgactgtgccggccgcggcatggccgggcccctggaccacggcggcggaggcggcgagggctctccggaggcgctgttcccaggtgatgggccctatctggaggaccccgatgacccacgaggggaggcggaggagctgggcgaggacgacgagggcctggcccccgaggatgcgctgttggcggacgacaaggaggaggaagactcgccgcggccgcgcagcccaccggggggccccgacaaggactttgcctggctctcctagacccgcccaccggcagggttggtggctgcctcgcttcgtccacctgtgtgtgtgtccggtgggtctccactgcggggccagggccacgctcatccccctcgcggccctcctctgcttcccccg

SEQ ID NO: 31061 - DNA, 320 bp, Macaca Mulatta
  misc_feature (1)...(320): n = A,T,C or G
agctggtgatgcggtactgggagcccgtaccccgaggccccgtgttgtgggaagctcaggctgagccatgggccacctgggtgcccctcctgtgctttgtgctccatgtcatctcctggcttctcatcttcagcatccttctcgtctttgactatgctgagctcatgggcctcaaacaggtnaggtatactaccatgtgctggggctgggcgagcctctggccctgaagtctccccgggctctcagacttttctctcacctgcgccacccagtgtgtgtggagctgctgacagtgctgtgggtggtgcctaccctgggca

SEQ ID NO: 31062 - DNA, 744 bp, Macaca Mulatta
atggaatatcatcctgatttagaaaatttggatgaagatggatatactcaattacacttcgactctcgaagcaataccaggatagctgttgtttcagagaaaggatcttgtgttgcatctcctccttggcgcctcattgctgtgattttgggaatcctatgcttggtgatactggtgatagctgtggtcctgggtaccatggctatttggagacccaattcaggaagaaactcattggagaatggctactttccatcaagaaataaagagaaccacagtcaacccacacaatcacctttagaagagagtgtgactcctaccaaagctgtcaaaaccacaggggttctttccagcccttgtcctcctaattggattatatatgagaagagctgttacctattcagcccgtcactaaattcctgggatcaaagtaaaagacaatgctcgcaactgggctctaatctcataaagatagacagctcaaaggaattgggatttatagtaaaacaagtgtcttcccaacctgataattcattttggataggcctttctcggccccagactgaggtaccatggctctgggaggatggatcaacattctcttctaacctatttcagatcagaaccacagctacccaagaaaacccatctccaaattgtgtatggattcatgtgtcagtcatttatgaccagctgtgtagtgtgccttcatgtagtatttgtgagaagaagttttcaatgtaa

SEQ ID NO: 31063 - DNA, 849 bp, Macaca Mulatta
  misc_feature (1)...(849): n = A,T,C or G
ggacatgagcaacattgacctggtggagggcgacgagggcaggatgtgcatcaacacagagtggggggccttcggggacgatggggccctggaggacattcgcaccgagttcgacagggagctggacctaagctctctcaacccgggaaagcannnnnnnnnnnnnnnnnnnnnnnnnnnnnnnnnnnnnnnnnnnnnnnnnnnnnnnnnnnnnnnnnnnnnnnnnnnnnnnnnnnnnnnnnnnnnnnnnnnnnnnnnnnnnnnnnnnnnnnnnnnnnnnnnnnnnnnnnnnnnnnnnnnnnnnnnnnnnnnnnnnnnnnnnnnnnnnnnnnnnnnnnnnnnnnnnnnnnnnnnnnnnnnnnnnnnnnnnnnnnnnnnnnnnnnnnnnnnnnnnnnnnnnnnnnnnnnnnnnnnnnnnnnnnnnnnnnnnnnnnnnnnnnnnnnnnnnnnnnnnnnnnnnnnnnnnnnnnnnnnnnnnnnnnnnnnnnnnnnnnnnnnnnnnnnnnnnnnnnnnnnnnnnnnnnnnnnnnnnnnnnnnnnnnnnntacccaaaacgcctgcacaaggtggtgaggaaactggtcccgagctgtgatgtccgattcctcctgtcagagagtggcagcaccaagggggccgccatggtgactgcggtggcctcccgcgtgcaggcccagcggaagcagatcgacaaggtgctggctttgttccggctgacccgagagcagcttgtggacgtgcaggccaagatgcgggctgagctggagtatgggctgaagaagaagagccacgggctggccacggtcagaatgctgcccacttacgtctgcgggctgccggacggcacag
